(19) United States
(12) Patent Application Publication
(10) Pub. No.: US 2014/0244228 A1
(43) Pub. Date: Aug. 28, 2014

(54) CODON OPTIMIZATION OF A SYNTHETIC GENE(S) FOR PROTEIN EXPRESSION

(71) Applicants: AGENCY FOR SCIENCE, TECHNOLOGY AND RESEARCH, SINGAPORE (SG); NATIONAL UNIVERSITY OF SINGAPORE, SINGAPORE (SG)

(72) Inventors: Dong-Yup LEE, Singapore (SG); Bevan Kai Sheng CHUNG, Singapore (SG); Yuansheng YANG, Singapore (SG)

(73) Assignees: AGENCY FOR SCIENCE, TECHNOLOGY AND RESEARCH, SINGAPORE (SG); NATIONAL UNIVERSITY OF SINGAPORE, SINGAPORE (SG)

(21) Appl. No.: 14/031,426

(22) Filed: Sep. 19, 2013

Related U.S. Application Data
(60) Provisional application No. 61/702,795, filed on Sep. 19, 2012.

(51) Int. Cl. G06F 19/12

(52) U.S. Cl. CPC G06F 19/12
USPC 703/11

(57) ABSTRACT

The present disclosure is related to a method of optimization of a nucleotide coding sequence coding for an amino acid sequence, wherein the nucleotide coding sequence is optimized for expression in a host cell. The present disclosure also relates to system for optimizing a nucleotide coding sequence coding for an amino acid sequence, wherein the nucleotide coding sequence is optimized for expression in a host cell.

### CROSS REFERENCE TO RELATED APPLICATIONS

[0001] This application claims priority to and is a conversion of U.S. Provisional Application No. 61/702,795, entitled “Codon Context Optimization for Design of Synthetic Gene” filed on 19 Sep. 2012, which is incorporated herein by reference in its entirety.

### TECHNICAL FIELD

[0002] The present disclosure is related to a method of optimization of a nucleotide coding sequence coding for an amino acid sequence, wherein the nucleotide coding sequence is optimized for expression in a host cell. The present disclosure also relates to system for optimizing a nucleotide coding sequence coding for an amino acid sequence, wherein the nucleotide coding sequence is optimized for expression in a host cell. In particular, the present disclosure relates to codon optimization.

### BACKGROUND

[0003] Recent developments in artificial gene synthesis have enabled the construction of synthetic gene circuits and even the synthesis of the whole bacterial genome. The introduction of synthetic genes into a living system can either modulate existing biological functions or give rise to novel cellular behavior. In this sense, de novo gene synthesis is a valuable synthetic biological tool for biotechnological studies, which typically aims to improve tolerance to toxic molecules, retrofit existing biosynthetic pathways, design novel biosynthetic pathways and/or enhance heterologous protein production. In the aspect of recombinant protein production, natural genes found in wild-type organisms are usually transformed into the heterologous hosts for recombinant expression. This approach typically results in poorly expressed recombinant protein since the wild-type foreign genes have not been evolved for optimum expression in the host. Thus, it is highly desirable to harness the flexibility in synthetic biology to create customized artificial gene designs that are optimal for heterologous protein expression. To aid the gene design process, computational tools have been developed for designing coding sequences based on some performance criteria. Specifically, the degeneracy of the genetic code, reflected by the use of sixty-four codons to encode twenty amino acids and translation termination signal, leads to the situation whereby all amino acids, except methionine and tryptophan, can be encoded by two to six synonymous codons. Notably, the synonymous codons are not equally utilized to encode the amino acids, thus resulting in phenomenon of codon usage bias which was first reported in a study that examines the frequencies of 61 amino acid codons (i.e. termination codons are excluded) in 90 genes. The emergence of codon usage bias in organisms has been largely attributed to natural selection, mutation, and genetic drift. More importantly, codon usage bias has been shown to be correlated to gene expression level. As a result, this bias has been proposed as an important design parameter for enhancing recombinant protein production in heterologous expression hosts. Consequently, the algorithms implemented in many of the sequence design software tools, such as Codon optimizer, Gene Designer, and OPTIMIZER, are mainly focused on the frequency of individual codon occurrences. Notably, the popular web-based software, known as the Java Codon Adaptation Tool (JCat), is integrated with the PRODORIC database to allow convenient retrieval of prokaryotic genetic information. However, apart from individual codon usage (ICU) bias, non-random utilization of adjacent codon pairs in organisms has also been reported in several studies. This phenomenon is termed “codon context” as it implicates some “rule” for organizing neighboring codons as a result of potential tRNA-tRNA steric interaction within the ribosomes. Codon context (CC) was shown to correlate with translation elongation rate such that the usage of rare codon pairs decreased protein translation rates. Therefore, the incorporation of CC has been proposed in the conventional ICU-based gene optimization algorithm GeneOptimizer. Furthermore, a technology, known as “Translation Engineering”, demonstrated that better enhancement in translational efficiency is achievable by optimizing codon pair usage in addition to ICU optimization.

### SUMMARY

[0004] The advent of synthetic biology has allowed biologists great flexibility to modulate an organism's physiology via introduction of synthetic biomolecules. The manipulation of cellular behavior is usually accomplished through recombinant DNA technology. The ability to synthesize artificial DNA de novo allows the flexibility to customize genetic sequences. Therefore, the rational design of synthetic genes can be a crucial component to overcome the frequently encountered problem of low heterologous protein productivity in commonly used expression systems such as Escherichia coli, P. pastoris and S. cerevisiae. Toward this end, the codon context optimization computational framework is developed to optimize synthetic gene such that the designed coding DNA sequence is able to achieve high in vivo protein expression. The codon context optimization algorithm optimizes any DNA sequence by systematically altering the synonymous codons for each amino acid in the target protein sequence, resulting in an optimal DNA sequence with a codon arrangement that allows efficient expression of the protein product. The computational procedure is based on the principle that the interaction between adjacent codons in a coding sequence can affect protein expression efficiency. Hence, by identifying favorable codon pairing arrangements via the processing of omics information obtained from the expression hosts, any coding sequence can be computationally optimized such that it will exhibit a favorable distribution of codon pairs to allow efficient protein expression in the respective host organisms.

[0005] A first aspect of the present disclosure provides a computer implemented method of optimization of a nucleotide coding sequence coding for a predetermined amino acid sequence, wherein the nucleotide coding sequence is optimized for expression in a predetermined host cell, wherein the method can comprise: automatically generating at least two initial nucleotide coding sequences coding for the predetermined amino acid sequence to form a first population of initial nucleotide coding sequences coding for the predetermined amino acid sequence; and automatically dividing the first population of initial nucleotide coding sequences.

[0006] In some embodiments, the method described above can further comprise: automatically determining a fitness value for each of the initial nucleotide coding sequences of the first population using a fitness function that determines codon context fitness for the predetermined host cell.

[0007] In some embodiments, the method described above can further comprise: automatically ranking each of the initial nucleotide coding sequences of the first population according to the fitness value of each of the initial nucleotide coding sequences of the first population.

[0008] In some embodiments, the dividing described above can comprise automatically dividing the first population of initial nucleotide coding sequences according to the fitness value ranking of each of the initial nucleotide coding sequences of the first population, wherein the top fifty percent of the initial nucleotide coding sequences having the highest fitness value ranking are selected as first parent nucleotide coding sequences.

[0009] In some embodiments, the method described above can further comprise: automatically producing first offspring nucleotide coding sequences via recombination and/or mutation of the first parent nucleotide coding sequences.

[0010] In some embodiments, the method described above can further comprise: automatically combining the first offspring nucleotide coding sequences and the first parent nucleotide coding sequences to form a second population of nucleotide coding sequences.

[0011] In some embodiments, the method described above can further comprise: automatically determining a fitness value for each of the nucleotide coding sequences of the second population using a fitness function that determines codon context fitness for the predetermined host cell; automatically ranking each of the nucleotide coding sequences of the second population according to the fitness value of each of the nucleotide coding sequences of the second population; automatically dividing the second population of nucleotide coding sequences according to the fitness value ranking of each of the nucleotide coding sequences of the second population, wherein the top fifty percent of the nucleotide coding sequences of the second population having the highest fitness value ranking are selected as a second parent nucleotide coding sequences; automatically producing second offspring nucleotide coding sequences via recombination and/or mutation of the second parent nucleotide coding sequences; and automatically combining the second offspring nucleotide coding sequences and the second parent nucleotide coding sequences to form a third population of nucleotide coding sequences.

[0012] In some embodiments, the optimization of the nucleotide coding sequence coding for the predetermined amino acid sequence described above can be automatically repeated until a predetermined termination criterion is met.

[0013] A second aspect of the present disclosure provides a system that can comprise: a processing unit; a memory unit comprising an optimizing module, wherein the optimizing module comprises a set of program instructions executable by the processing unit; wherein execution of the set of program instructions causes the processing unit to optimize a nucleotide coding sequence coding for a predetermined amino acid sequence, wherein the nucleotide coding sequence is optimized for expression in a predetermined host cell, the optimization comprising: automatically generating at least two initial nucleotide coding sequences coding for the predetermined amino acid sequence to form a first population of initial nucleotide coding sequences coding for the predetermined amino acid sequence; and automatically dividing the first population of initial nucleotide coding sequences.

[0014] In some embodiments, the optimization described above can further comprise: automatically determining a fitness value for each of the initial nucleotide coding sequences of the first population using a fitness function that determines codon context fitness for the predetermined host cell.

[0015] In some embodiments, the optimization described above can further comprise: automatically ranking each of the initial nucleotide coding sequences of the first population according to the fitness value of each of the initial nucleotide coding sequences of the first population.

[0016] In some embodiments, the dividing described above can comprise automatically dividing the first population of initial nucleotide coding sequences according to the fitness value ranking of each of the initial nucleotide coding sequences of the first population, wherein the top fifty percent of the initial nucleotide coding sequences having the highest fitness value ranking are selected as first parent nucleotide coding sequences.

[0017] In some embodiments, the optimization described above can further comprise: automatically producing first offspring nucleotide coding sequences via recombination and/or mutation of the first parent nucleotide coding sequences.

[0018] In some embodiments, the optimization described above can further comprise: automatically combining the first offspring nucleotide coding sequences and the first parent nucleotide coding sequences to form a second population of nucleotide coding sequences.

[0019] In some embodiments, the optimization described above can further comprise: automatically determining a fitness value for each of the nucleotide coding sequences of the second population using a fitness function that determines codon context fitness for the predetermined host cell; automatically ranking each of the nucleotide coding sequences of the second population according to the fitness value of each of the nucleotide coding sequences of the second population; automatically dividing the second population of nucleotide coding sequences according to the fitness value ranking of each of the nucleotide coding sequences of the second population, wherein the top fifty percent of the nucleotide coding sequences of the second population having the highest fitness value ranking are selected as a second parent nucleotide coding sequences; automatically producing second offspring nucleotide coding sequences via recombination and/or mutation of the second parent nucleotide coding sequences; and automatically combining the second offspring nucleotide coding sequences and the second parent nucleotide coding sequences to form a third population of nucleotide coding sequences.

[0020] In some embodiments, the optimization of the nucleotide coding sequence coding for the predetermined amino acid sequence by the system described above can be automatically repeated until a predetermined termination criterion is met.

### BRIEF DESCRIPTION OF THE DRAWINGS

[0021] FIG. 1 is a block diagram of a system for codon optimization in accordance with an embodiment of the present disclosure.

[0022] FIG. 2 illustrates a multi-objective codon optimization solution in accordance with an embodiment of the present disclosure, in which optimal solutions generated by multi-objective codon optimization (MOCO) lies on the pareto front.

[0023] FIG. 3 illustrates a general codon optimization workflow in accordance with an embodiment of the present disclosure, wherein during codon optimization, either individual codon usage optimization (ICO), codon context optimization (CCO) or MOCO can be used for sequence optimization.

[0024] FIG. 4 illustrates principal component analysis (PCA) of individual codon usage (ICU) and codon context (CC) distributions, in which first and second principal components (PC1 and PC2) are plotted to show the differences in the ICU and CC distributions of (top 5%) high-expression genes (H), (bottom 5%) low-expression genes (L) and all genes (A) found in the genomes of E. coli (EC), L. lactis (LL), P. pastoris (PP) and S. cerevisiae (SC). The unbiased distribution (U) is also included for each plot as reference.

[0025] FIGS. 5A and 5B illustrate codon optimization validation, in which in silico cross-validation of the optimization procedures is performed according to the presented workflow.

[0026] FIGS. 6A and 6B illustrate a codon context optimization algorithm in accordance with an embodiment of the present disclosure.

[0027] FIG. 7 illustrates a comparison of performance of codon optimization methods.

[0028] FIGS. 8A and 8B illustrates a comparison of Chinese hamster ovary (CHO) genes' codon patterns in terms of ICU, in which points corresponding to the highly and lowly expressed genes are indicated as “high” and “low”, respectively. The bottom PCA plot illustrates the differences in average ICU distribution among the three groups of genes (H, M and L) across the various expression hosts.

[0029] FIGS. 9A and 9B illustrates a comparison of CHO genes' codon patterns in terms of CC, in which points corresponding to the highly and lowly expressed genes are indicated as “high” and “low”, respectively. The bottom PCA plot illustrates the differences in average CC distribution among the three groups of genes (H, M and L) across the various expression hosts.

[0030] FIG. 10 illustrates an expression of interferon genes in CHO cells.

[0031] FIGS. 11A-11C illustrates expression levels and codon patterns of IFN-γ genes, in which expression values of IFN-γ genes measured with ELISA are normalized with respect to the level of IFN_WT such that it has a value of 1. The individual codon frequency is shown by the color of the codon itself while the codon pair frequency is indicated by the color of the rectangular block between adjacent codons.

[0032] FIGS. 12A and 12B illustrates multiple ICU optimal sequences, wherein it will be understood that many combinatorial coding sequences can attain the same ICU fitness via the interchange of codons, e.g., between Ser-4 and Ser-18. Hence, it is common to have many optimal sequences with equal ICU fitness, similar to the sequences illustrated in the figure.

[0033] FIG. 13 illustrates hierarchical clustering of optimized genes based on ICU distributions, wherein euclidean distance is used as the distance measure.

[0034] FIG. 14 illustrates hierarchical clustering of optimized genes based on CC distributions, wherein euclidean distance is used as the distance measure.

[0035] FIG. 15 illustrates ICU and CC fitness of MFLS gene variants.

[0036] FIG. 16 illustrates codon usage patterns of the MFLS gene variants, wherein colors of individual codons and codon pairs (represented by small rectangular blocks between adjacent codons) indicate the usage frequency with respect to the P. pastoris host, as indicated by the gradient at the top of the figure.

[0037] FIGS. 17A-17D illustrates properties of MFLS gene variants, wherein correlation between ICU, CC fitness and gene expressivity is illustrated (FIG. 17A), and CAI, G+C content and mRNA folding energy, calculated by mfold, of the gene variants are also plotted (FIGS. 17B-D).

### DETAILED DESCRIPTION

[0038] In the following detailed description, reference is made to the accompanying drawings, which form a part hereof. In the drawings, similar symbols typically identify similar components, unless context dictates otherwise. The illustrative embodiments described in the detailed description, drawings, and claims are not meant to be limiting. Other embodiments can be utilized, and other changes can be made, without departing from the spirit or scope of the subject matter presented herein.

[0039] Unless specified otherwise, the terms “comprising” and “comprise” as used herein, and grammatical variants thereof, are intended to represent “open” or “inclusive” language such that they include recited elements but also permit inclusion of additional, un-recited elements. As used herein, the term “about”, in the context of concentrations of components, conditions, other measurement values, etc., means +/−5% of the stated value, or +/−4% of the stated value, or +/−3% of the stated value, or +/−2% of the stated value, or +/−1% of the stated value, or +/−0.5% of the stated value, or +/−0% of the stated value.

[0040] As used herein, the term “set” corresponds to or is defined as a non-empty finite organization of elements that mathematically exhibits a cardinality of at least 1 (i.e., a set as defined herein can correspond to a unit, singlet, or single element set, or a multiple element set), in accordance with known mathematical definitions (for instance, in a manner corresponding to that described in An Introduction to Mathematical Reasoning: Numbers, Sets, and Functions, “Chapter 11: Properties of Finite Sets” (e.g., as indicated on p. 140), by Peter J. Eccles, Cambridge University Press (1998)). In general, an element of a set can include or be a system, an apparatus, a device, a structure, an object, a process, a physical parameter, or a value depending upon the type of set under consideration.

[0041] Throughout this disclosure, certain embodiments may be disclosed in a range format. It should be understood that the description in range format is merely for convenience and brevity and should not be construed as an inflexible limitation on the scope of the disclosed ranges. Accordingly, the description of a range should be considered to have specifically disclosed all the possible sub-ranges as well as individual numerical values within that range. For example, description of a range such as from 1 to 6 should be considered to have specifically disclosed sub-ranges such as from 1 to 3, from 1 to 4, from 1 to 5, from 2 to 4, from 2 to 6, from 3 to 6 etc., as well as individual numbers within that range, for example, 1, 2, 3, 4, 5, and 6. This applies regardless of the breadth of the range.

### Abbreviations

[0042] ICU: Individual codon usage; CC: Codon-pair context; MFLS: Saccharomyces cerevisiae-derived mating factor α prepro-leader sequence; ICO: ICU-based codon optimization; CCO: CC-based codon optimization; MOCO: Multi-objective codon optimization; CALB: Lipase B from Candida antarctica; P_{TEF}: Pichia pastoris-derived TEF promoter.

[0043] Codon optimization can be applied to any life science research area, allowing biologists to systematically enhance the expression of recombinant genes in a heterologous host organism. There is yet to be a study that investigates the relative effects of ICU and CC on protein expression. To address this issue, a computational analysis was proposed to evaluate the performance of sequences generated by various ICU and CC optimization approaches. The proposed methodology optimizes synthetic genes based on codon context as its key design criterion.

[0044] In the present disclosure, novel computational procedures were applied to generate DNA sequences exhibiting optimal ICU and CC in Escherichia coli, Lactococcus lactis, Pichia pastoris and Saccharomyces cerevisiae based on information obtained from omics data analysis. While E. coli and S. cerevisiae has been model organisms for recombinant protein production studies, codon optimization in the Gram-positive bacterium L. lactis and methylotrophic yeast P. pastoris were also considered since they are also promising candidates for expressing recombinant proteins. Assuming that the native DNA sequences of highly expressed genes have evolved to exhibit optimal ICU and CC for high in vivo expression, the efficacy of the computational approaches in the present disclosure by performing a leave-one-out cross-validation on the high-expression genes were demonstrated for each expression host.

[0045] FIG. 1 is a block diagram of a system 100 for codon optimization in accordance with an embodiment of the present disclosure. In an embodiment, the system 100 includes a computer or computing device having at least one processing unit 110 configured for executing program instructions; a data storage unit 120 including one or more types of computer or electronically readable/accessible media for configured for storing data and/or program instructions; an input/output (I/O) and/or communication unit 130 (e.g., a network interface/communication unit); a display device/visual output unit 140 (e.g., a computer monitor); and a memory 200 wherein an operating system 210, a codon optimization module 220, an optimization process memory 230, and an optimization results memory 240 reside. Each element of the system 100 can be coupled by way of a set of communication/signal transfer pathways, links, or lines 102 such as a bus. Depending upon embodiment details, the system 100 can include or be a desktop computer system, a portable computing system/device, or one or more servers (e.g., a local server or a set of remote servers, such as associated with a computing cloud).

[0046] In various embodiments, the codon optimization module 220 includes one or more program instruction sets which are executable by the processing unit(s) 110, and which are configured for performing a set of codon optimization processes, procedures, routines, or methods described herein. The codon optimization module 220 can additionally manage or direct the presentation of visual information related to a codon optimization process and/or results associated therewith (e.g., algorithm convergence information/progress; optimized coding sequence matching relative to high expression genes; and/or other information) on the display device 140. The optimization process memory 230 can include information/data storage elements configured for storing initially retrieved or provided data, intermediate results, and data structures associated therewith. The optimization results memory 240 can include storage elements configured for storing final output or results associated with codon optimization processes described herein.

[0047] Aspects of codon optimization processes, procedures, routines, or methods in accordance with embodiments of the present disclosure are described in detail hereafter.

### Codon Optimization Formulation

[0048] To investigate the relative importance of ICU and CC towards designing sequences for high protein expression, three computational procedures were implemented: the individual codon usage optimization (ICO) method generates a sequence with optimal ICU only; the codon context optimization (CCO) method optimizes sequences with regard to codon context only; and the multi-objective codon optimization (MOCO) method simultaneously considers both ICU and CC. Thus, the resultant sequence is ICU-/CC-optimal when its ICU/CC distribution is closest to the organism's reference ICU/CC distribution calculated based on the sequences of native high-expression genes. Based on the mathematical formulation presented in Methods, the ICO problem can be described as the maximization of ICU fitness, Ψ_{ICU} (see Eqn. 23), subject to the constraint that the codon sequence can be translated into the target protein (see Eqns. 3, 4 and 11). Due to the discrete codon variables and nonlinear fitness expression of Ψ_{ICU}, ICO is classified a mixed-integer nonlinear programming (MINLP) problem. Nonetheless, it can be linearized using a strategy by decomposing the nonlinear |p₀^{k}−p₁^{k}| term (see Eqn. 23) into a series of linear and integer constraints which consist of binary and positive real variables. The resultant mixed-integer linear programming (MILP) problem can be solved using well established computational methods such as branch-and-bound and branch-and-cut. However, due to the large and discrete search space which contains all possible DNA sequences that can encode the target protein, solving the MILP using these methods may require a long computational time. Thus, alternative methods, such as GASCO and QPSOBT, have been proposed for solving ICO using genetic algorithm and particle swarm optimization. Although these heuristic methods are more efficient than conventional MILP solving procedures, they still require a significant amount of computational resources due to the iterative nature of the algorithms. To circumvent the high computational costs, the non-iterative method is developed for solving ICO using the following steps:
[0049] I1. Calculate the host's individual codon usage distribution, p₀^{k}.
[0050] I2. Calculate the subject's amino acid counts, θ_{AA,1}^{j}.
[0051] I3. Calculate the optimal codon counts for the subject using the expression:

$${θ}_{C , opt}^{k} = {p}_{0}^{k} \times {\sum }_{j = 1}^{21} [ {θ}_{A , 1}^{j} \times 1 \{ {α}^{j} = f ( {κ}^{k} ) \} ] ∀ k ∈ \{ 1 , 2 , … , 64 \}$$

[0052] I4. For each τᵢ in the subject's sequence, randomly assign a codon κ^{k} if θ_{C}^{k}>0, and decrement θ_{C,opt}^{k} by one.
[0053] I5. Repeat step I4 for all amino acids of the target protein from τ_{1,1} to τ_{n,1}.

[0054] Similarly, CCO can be formulated as the maximization of CC fitness, Ψ_{CC} (see Eqn. 26), subject to the constraint that the codon pair sequence can be translated into the target protein (see Eqns. 7, 8 and 12). To find the solution for CCO, the procedure in ICO may not be applicable due to the computational complexity which arises from the dependency of adjacent codon pairs. For example, given a codon pair “AUG-AGA” in a 5′-3′ direction, the following codon pair must only start with “AGA”. Therefore, if the ICO procedure had been adopted to directly identify the codon pairs and randomly assign them to the respective amino acid pairs, there could be conflicting codon pair assignments in certain parts of the sequence. Since the characteristic of independency, which was exploited to develop a simple solution procedure for ICO, is absent in the CCO problem, a more sophisticated computational approach was resorted to.

[0055] The CCO problem can be conceptualized in a similar way as the well-known traveling salesman problem whereby the traversing from one codon to the next adjacent codon is analogous to the salesman traveling from one city to the next. Since there will be a “cost” incurred by taking a particular “codon path”, the CCO problem aims to minimize of the total cost for traveling a codon path that is able to code the desired protein sequence. However, the CCO problem is more complex than the traveling salesman problem due to the nonlinear cost function evaluated based on the frequency of codon pair occurrence. For an average sized protein consisting 300 amino acids, the total number of codon paths can be as many as 10¹⁰⁰. Finding an optimal solution for such a large-scale combinatorial problem within an acceptable period of computation time can only be achieved via heuristic optimization methods. Incidentally, the use of genetic algorithm provides an intuitive framework whereby codon path candidates are “evolved” towards optimal CC through techniques mimicking natural evolutionary processes such as selection, crossover or recombination and mutation.

[0056] Thus, the procedure for solving CCO is as follows:
[0057] C1. Randomly initialize a population of coding sequences for target protein.
[0058] C2. Evaluate the CC fitness of each sequence in the population.
[0059] C3. Rank the sequences by CC fitness and check termination criterion.
[0060] C4. If termination criterion is not satisfied, select the “fittest” sequences (top 50% of the population) as the parents for creation of offspring via recombination and mutation.
[0061] C5. Combine the parents and offspring to form a new population.
[0062] C6. Repeat steps C2 to C5 until termination criterion is satisfied.

[0063] In step C3, the termination criterion depends on the degree of improvement in best CC fitness values for consecutive generations of the genetic algorithm. If the improvement in CC fitness across many generations is not significant, the algorithm is said to have converged. In the present disclosure, the CC optimization algorithm is set to terminate when there is less than 0.5% increase in CC fitness across 100 generations, i.e. Ψ_{CC}^{(r+100)}/Ψ_{CC}^{(r)}<0.005 where r refers to the r^{th} generation of the genetic algorithm. When the termination criterion is not satisfied, the subsequent step C4 will perform an elitist selection such that the fittest 50% of the population are always selected for reproduction of offspring through recombination and mutation. During recombination, a pair of parents is chosen at random and a crossover is carried out at a randomly selected position in the parents' sequences to create 2 new individuals as offspring. The offspring subsequently undergo a random point mutation before they are combined with the parents to form the new generation.

[0064] Unlike traditional implementations of genetic algorithm where individuals in the population are represented as 0-1 bit strings, the presented CC optimization algorithm represents each individual as a sequential list of character triplets indicating the respective codons. Therefore, the codons can be manipulated directly with reference to a hash table which defines the synonymous codons for each amino acid. As a result, the protein encoded by the coding sequences is always the same in the genetic algorithm since crossovers only occur at the boundary of the codon triplets and mutation is always performed with reference to the hash table of synonymous codons for each respective amino acid.

[0065] Based on the formulations for ICU and CC optimization, the MOCO problem, which is an integration of both, can be described as maximizing both ICU and CC fitness, i.e. max (Ψ_{ICU}, Ψ_{CC}), subject to the constraints that both the codon and codon pair sequences can be translated into the target protein sequence. As such, due to the complexity attributed to CC optimization, solution to MOCO will also require a heuristic method. In this case, the nondominated sorting genetic algorithm-II (NSGA-II) is used to solve the multi-objective optimization problem. The procedure for NSGA-II is similar to that presented for CC optimization except for additional steps required to identify the nondominated solution sets and the ranking of these sets to identify the pareto optimum front. The NSGA-II procedure for solving the MOCO problem is as follows:
[0066] M1. Randomly initialize a population of coding sequences for target protein.
[0067] M2. Evaluate ICU and CC fitness of each sequence in the population.
[0068] M3. Group the sequences into nondominated sets and rank the sets.
[0069] M4. Check termination criterion.
[0070] M5. If termination criterion is not satisfied, select the “fittest” sequences (top 50% of the population) as the parents for creation of offspring via recombination and mutation.
[0071] M6. Combine the parents and offspring to form a new population.
[0072] M7. Repeat steps M2 to M5 until termination criterion is satisfied.

[0073] The identification and ranking of nondominated sets in step M3 is performed via pair-wise comparison of the sequences' ICU and CC fitness. For a given pair of sequences with fitness values expressed as (Ψ_{ICU}¹, Ψ_{CC}¹) and (Ψ_{ICU}², Ψ_{CC}²), the domination status can be evaluated using the following rules:
[0074] If (Ψ_{ICU}¹>Ψ_{ICU}²) and (Ψ_{CC}¹≧Ψ_{CC}²), sequence 1 dominates sequence 2.
[0075] If (Ψ_{ICU}¹≧Ψ_{ICU}²) and (Ψ_{CC}¹>Ψ_{CC}²), sequence 1 dominates sequence 2.
[0076] If (Ψ_{ICU}¹<Ψ_{ICU}²) and (Ψ_{CC}¹≦Ψ_{CC}²), sequence 2 dominates sequence 1.
[0077] If (Ψ_{ICU}¹≦Ψ_{ICU}²) and (Ψ_{CC}¹>Ψ_{CC}²), sequence 2 dominates sequence 1.

[0078] Whenever a particular sequence is found to be dominated by another sequence, the domination rank of the former sequence is lowered. As such, the grouping and sorting of the nondominated sets are performed simultaneously in step M3 (FIG. 2). In the original nondominated sorting algorithm, the set of individuals that is dominated by every individual is stored in memory. Therefore, for a total population of n, the total storage requirement is O(n²). However, for the abovementioned algorithm, only O(n) storage is required for storing the domination value of each individual. In terms of computational complexity, both the original and modified algorithm requires at most O(mn²) computations for m objective values since all the n individuals have to be compared pair-wise for every objective to be optimized. Therefore, the nondominated sorting algorithm presented in the present disclosure is superior on the whole, especially with regards to computational storage requirement which can become an important issue when dealing with long coding sequences.

[0079] The output of multi-objective optimization is a set of solutions also known as the pareto optimal front. Since the aim of MOCO is to examine the relative effects of ICU and CC optimization, it is not necessary to analyze all the sequences in the pareto optimal front. Instead, the solution which is nearest to the ideal point will represent the sequence with balanced ICU and CC optimality. As such, the solutions of ICO, CCO and MOCO will subsequently be referred to as x_{ICO}, x_{CCO} and x_{MOCO} respectively (FIG. 2).

### Finding the Codon Preference

[0080] The entire workflow for codon optimization of a target protein sequence begins with the identification of the host's preferred ICU and CC distributions as the reference (FIG. 3). These ICU and CC distributions should ideally capture codon usage patterns that correspond to efficient translation of mRNA to protein. Therefore, the first step of codon optimization identifies the reference ICU and CC distributions by characterizing the underlying mechanisms of efficient translation which can be achieved through transcriptome, translatome and proteome profiling. However, such large-scale experimental data are not readily available for the extraction of codon usage preference information in all the expression hosts considered in the present disclosure. Alternatively, it is assumed that the organisms have evolved to conserve resources by producing high amounts of transcripts for genes that will also be efficiently translated. As such, the widely available transcriptome data from microarray experiments can be used to identify the highly expressed and efficiently translated genes. Thus, the codon pattern of the host's native high-expression genes will be a suitable reference point for codon optimization.

[0081] The step for selecting high-expression genes codon pattern for codon optimization is only relevant if the following two conditions are true: (1) ICU and CC distributions of high-expression genes are significantly biased and non-random; and (2) there is a significant difference in ICU and CC distribution between highly expressed genes and all the genes in the host organism's genome. It is noted that if the first condition is false, there is no codon (pair) bias and codons can be assigned randomly based on a uniform distribution; if the second condition is false, the computation of ICU and CC distributions based on all the genes in the genome will be sufficient to characterize the ICU and CC preference of the organism without the need for selecting high-expression genes.

[0082] To determine the significance of ICU and CC biases, the Pearson's chi-squared test is applied. Using a p-value cut-off of 0.05, the ICU and CC distributions of at least 80% of the amino acids (pairs) amenable to the chi-squared test were found to be significantly biased in the micro-organisms (Table 1).

### ICU and CC Biasness Analysis

[0083] The chi-squared statistic is computed based on the observed occurrence of each codon (pair) and the expected occurrence under the null hypothesis of uniform distribution. Any amino acid (pair) with p-value <0.05 is considered to exhibit significantly biased codon (pair) usage. Singular amino acids (methionine and tryptophan) and singular amino acid pairs (pairs only consisting of methionine and/or tryptophan) are not amenable to the biasness analysis since they are not encoded by more than one synonymous codon (pair). Chi-squared statistic and p-value are not calculated for amino acid (pair) with expected counts less than 5. Abbreviations: D^{A}, codon (pair) distribution of all genes in the genome; D^{H}, codon (pair) distribution of high-expression genes; U, uniform distribution.

TABLE 1
ICU and CC biasness analysis

| | E. coli | | P. pastoris | | S. cerevisiae | |
|---|---|---|---|---|---|---|
| | Null hypothesis (H₀) | | | | | |
| | D^{H} = U | D^{H} = D^{A} | D^{H} = U | D^{H} = D^{A} | D^{H} = U | D^{H} = D^{A} |
| | Alternative hypothesis (H₁) | | | | | |
| | D^{H} ≠ U | D^{H} ≠ D^{A} | D^{H} ≠ U | D^{H} ≠ D^{A} | D^{H} ≠ U | D^{H} ≠ D^{A} |
| No. of biased amino | 18 | 17 | 18 | 19 | 18 | 19 |
| acids | | | | | | |
| (P-value < 0.05) | | | | | | |
| No. of unbiased amino | 1 | 2 | 1 | 0 | 1 | 0 |
| acids | | | | | | |
| (P-value ≧ 0.05) | | | | | | |
| No. of singular amino | 2 | 2 | 2 | 2 | 2 | 2 |
| acids | | | | | | |
| No. of unevaluated | 0 | 0 | 0 | 0 | 0 | 0 |
| amino acids | | | | | | |
| (Expect count < 5) | | | | | | |
| Total no. of amino | 21 | 21 | 21 | 21 | 21 | 21 |
| acids | | | | | | |
| No. of biased amino | 314 | 99 | 354 | 259 | 372 | 282 |
| acid pairs | | | | | | |
| (P-value < 0.05) | | | | | | |
| No. of unbiased amino | 26 | 23 | 38 | 36 | 19 | 9 |
| acid pairs | | | | | | |
| (P-value ≧ 0.05) | | | | | | |
| No. of singular amino | 4 | 4 | 4 | 4 | 4 | 4 |
| acid pairs | | | | | | |
| No. of unevaluated | 76 | 294 | 24 | 121 | 25 | 125 |
| amino acid pairs | | | | | | |
| (Expect count < 5) | | | | | | |
| Total no. of amino | 420 | 420 | 420 | 420 | 420 | 420 |
| acid pairs | | | | | | |

[0084] In the high-expression genes, aspartate was found to be the only one among all amino acids exhibiting an ICU distribution that is not significantly different from the unbiased distribution for E. coli, P. pastoris and S. cerevisiae. Similarly, more than 80% of the amino acids (pairs) show significant difference in ICU and CC distributions between high-expression genes and all genes in the genomes of these three microbes. Contrastingly, 80% amino acids did not show significant difference in CC distributions between high-expression genes and all genes in L. lactis, suggesting that the selection of highly expressed genes may not be required to establish the CC preference of L. lactis. By applying the principal component analysis, it can be observed that the ICU and CC distributions for all types of genes in L. lactis are close to one another when compared to genes from other organisms (FIG. 4). This indicates that the short listing of highly expressed genes may not be necessary for organisms like L. lactis. Nonetheless, the identification of high-expression genes is recommended to characterize the ICU and CC preference of any host, such that there is a better level of confidence that the optimized recombinant gene can be efficiently expressed.

### Performance of Codon Optimization Methods

[0085] The performance of each optimization approach was evaluated using a leave-one-out cross-validation, where a gene is randomly selected from the entire set of high-expression genes for sequence optimization while the rest of the genes will be used as the training set to calculate the reference ICU and CC distribution (FIGS. 5A and 5B). The predicted optimum sequences are compared with the original native sequences to evaluate the performance of each codon optimization approach. As the degree of similarity to the wild-type high expression genes indicates the gene expressivity potential of the optimized sequences, the quality of each optimized sequence was measured in terms of the percentage of codons matching the corresponding native sequence, denoted by p_{M}. From the results, the x_{ICO}, x_{CCO} and x_{MOCO} solutions were generally found to be more similar to the native genes than the random sequences generated by random codon assignment (RCA) indicating that all the optimization approaches are indeed capable of improving the codon usage pattern compared to the control (FIGS. 5A and 5B). The p_{M} values of x_{ICO}, x_{CCO}, x_{MOCO} and x_{RCA} sequences for each gene are further compared in a “tournament” style to show the relative performance of each optimization method. In the tournament matrix (Table 2), each cell shows the number of wins by the method in the left-most column against that in the upper-most row. Whenever the numbers of wins and losses (i.e. cells diagonally opposite of each other) do not sum up to 100, the shortfall will be equal to the number of draws.

### Tournament Matrix

[0086] For every gene, the p_{M} of the optimal sequences generated by respective optimization approaches are compared pair-wise for each expression host. The numbers of tournament wins/losses by each approach for all the genes in each expression host are added up. The sequences generated by ICO, CCO, MOCO and RCA are indicated as x_{ICO}, x_{CCO}, x_{MOCO} and respectively. In each cell, the numbers from top-most to bottom-most corresponds to x_{RCA} the data for E. coli, L. lactis, P. pastoris and S. cerevisiae, respectively.

TABLE 2
Tournament matrix

| | x_{ICO} | x_{CCO} | x_{MOCO} | x_{RCA} |
|---|---|---|---|---|
| x_{ICO} | | 7 | 19 | 95 |
| | | 2 | 18 | 99 |
| | | 4 | 15 | 93 |
| | | 5 | 22 | 99 |
| x_{CCO} | 92 | | 82 | 97 |
| | 96 | | 93 | 100 |
| | 96 | | 86 | 100 |
| | 93 | | 89 | 99 |
| x_{MOCO} | 78 | 15 | | 97 |
| | 74 | 5 | | 100 |
| | 83 | 12 | | 99 |
| | 75 | 9 | | 99 |
| x_{RCA} | 5 | 2 | 3 | |
| | 0 | 0 | 0 | |
| | 6 | 0 | 1 | |
| | 1 | 0 | 0 | |

[0087] Through the comparison of ICO and CCO, the x_{CCO}, solutions have a higher average percentage of codon matches than x_{ICO}, sequences for all four microbes (FIGS. 5A and 5B), with at least 90% of the x_{CCO} sequences matching the native corresponding sequences better than those generated by ICO (Table 2). This result indicates that CC fitness can be a more important design parameter for sequence optimization than ICU fitness which has been a conventional design criterion implemented in several software tools. While it appears likely that the integration of CCO with ICO under a multi-objective optimization framework can potentially lead to even better sequence design, results from the MOCO analysis in the present disclosure suggest otherwise. The average of p_{M} value of x_{MOCO} were observed to be lower than that of x_{CCO}, indicating that the consideration of ICU fitness in addition to CC fitness can be detrimental to the sequence design. To our best knowledge, no such formal evaluation of the relative impact of ICU and CC fitness on synthetic gene design has been presented to date. Hence, based on the promising in silico validation results which implicate CC as an important design parameter for optimizing sequences, the newly developed CCO procedure can potentially supersede the ICU optimization techniques currently implemented in gene design software tools.

[0088] It is noted that similar observations on the relative performance of ICO, CCO and MOCO were made when the in silico leave-one-out cross-validation were performed on the set of 27 high-expression genes of E. coli.

### Capturing the Preferred Codon Usage Patterns

[0089] Earlier codon optimization studies have recommended the usage of high expression genes to design the recombinant gene for efficient heterologous expression. In the analysis of codon usage patterns, the significant distinction in the ICU and CC distributions between highly expressed and other genes corroborated the relevance of identifying high-expression genes to characterize the preferred codon usage patterns. It is noted that although there is codon usage information readily available in the Codon Usage Database (http://www.kazusa.or.jp/codon/), these data may not be useful as prior filtering of highly expressed genes was not performed.

[0090] Such codon usage data may reflect some degree of preference for “rare” codons, thus leading to low gene expression.

[0091] Several options are available for quantifying the codon usage patterns. In the present disclosure, the method of treating the ICU and CC distributions as a vector of frequency values has been adopted to capture the relative abundance of individual codons and codon pairs. An earlier well-known method for quantifying codon usage bias is the codon adaptation index (CAI). The CAI has been widely used for codon optimization due to its observed correlation with gene expressivity. However, by designing a gene through the maximization of CAI, the resultant coding sequence will become a “one amino acid—one codon” design where CAI=1.0. This sequence design may not be desirable as the overexpression of this gene can lead to very rapid depletion of the specific cognate tRNAs resulting in tRNA pool imbalance, which can in turn cause an increase in translational errors. In this aspect, the ICU fitness measure will be a better performance criterion than CAI since the former allows a small number of rare codons to be included in the final sequence. Furthermore, the calculation of CAI is intrinsically based on individual codon usage and does not have the capability to account for codon pairing. Therefore, the information captured by the CC fitness cannot be reflected in the CAI value.

[0092] Therefore, the proposed approach of optimizing codons according to the complete ICU and CC distributions of highly expressed genes will be suitable to alleviate the problem of tRNA pool imbalance when the cell is induced to overexpress the target gene.

### Efficacy of CCO

[0093] Codon usage has been shown to affect the accuracy and speed of translation. Hence, the concept of CCO implementation is to identify favorable codon pairings that can lead to more efficient protein synthesis process. Notably, an optimization framework based on the dynamic modeling of protein translation has been recently developed to identify suitable codon placements to improve translation elongation speed. Although this recent method provides a mechanistic understanding of how codon choice affects translation efficiency, it requires a protein translation kinetic model and codon-specific elongation rates which may not be readily available for organisms other than E. coli as shown in previous studies. Therefore, CCO may be a better alternative as it can achieve the aim of enhancing translation efficiency while having the advantage of utilizing information, including genome sequence and gene expression data, which are easily accessible in public databases such as the Gene Expression Omnibus (www.ncbi.nlm.nih.gov/geo/) and GenBank (www.ncbi.nlm.nih.gov/genbank/). Incidentally, there was evidence suggesting that translation initiation rather than elongation is the rate limiting step. Nonetheless, CCO generated sequences can indirectly increase translation initiation by freeing up more ribosomes through enhanced translation elongation rates. The increased pool of free ribosomes can then help to improve translation initiation by mass action effect.

[0094] On the other hand, translation initiation can also be affected by the mRNA structure of the initiation site. At the primary structure level, Shine-Dalgarno sequence and Kozak sequence should be added to the 5′ end of the coding sequence since previous studies have shown that they are required for recognition of the AUG start codon to initiate translation in prokaryotes and eukaryotes, respectively. At the secondary structure level, it was found that hairpin, stem-loop and pseudoknot mRNA structures can repress protein translation. Although this suggests that the computationally intensive mRNA secondary structure evaluation may be required for designing synthetic genes, it was also reported that the helicase activity of ribosome is able to disrupt the secondary structures for mRNA translation. Therefore, using the mRNA secondary structure analysis only as a supplementary step for the CC-optimized sequences such that no significant computational cost is added to the main CCO procedure is suggested.

### CCO Tool for Synthetic Biology

[0095] To further develop CCO into a software tool for designing synthetic genes, several other factors may also be considered. From the experimental aspect, the gene optimization should take into consideration the types of restriction enzymes used for vector construction such that the restriction sites DNA motifs are avoided to prevent unnecessary cleavage of the coding sequence. In certain cases where the optimized coding sequence tends to have nucleotide repeats, additional steps may be required to avoid the repeats or inverted repeats which may lead to DNA recombination or formation of mRNA hairpin loops, respectively, that will reduce the heterologous expressivity of the target protein. In addition, sequence homology may also be considered to design genes that are resistant to RNA interference such that complementary sequences of the silencing RNAs are avoided in the coding sequence.

[0096] The optimal sequences generated by CCO are not found in any natural organism. Thus, the CCO software tool should also consider challenges involved in the synthesis of these artificial genes. The current technology for de novo gene synthesis involves the chemical synthesis of short oligonucleotides followed by ligation- or PCR-mediated assembly of the oligonucleotides to form the complete gene. The way in which a long coding sequence is broken down into short oligonucleotides has to be properly designed to minimize the oligonucleotide synthesis error rate and maximize the uniformity of the oligonucleotides' annealing temperatures for efficient assembly. Several methods such as DNAWorks, Gene2Oligo and TmPrime have been proposed to address these goals in oligonucleotide design optimization for gene synthesis. Although these oligonucleotide optimization methods can be performed independently from the codon optimization procedure, these two processes can be integrated to facilitate the “design-to-synthesis” workflow. As long as the current gene synthesis paradigm prevails, researchers can further explore the possibility of developing an integrated codon and oligonucleotide optimization software tool to effectively and systematically design high performance synthetic genes for protein expression.

### Applications of CCO

[0097] Through the in silico cross-validation of the present disclosure, the inventors have shown that CCO performs better than the conventional ICO approach. This implies that the incorporation of the CCO algorithm into existing gene designing tools such as Codon optimizer, GeneDesigner, and OPTIMIZER can lead to much better gene designs compared to the current framework. Furthermore, existing tools typically use all of the host genome's coding sequences for codon evaluation without specifically focusing on high expression genes as presented in the CCO procedure of the present disclosure. Thus, these existing tools are likely to yield sequences that use more rare codons than desired.

[0098] The concept of codon optimization has been widely applied to enhance heterologous gene expression. However, the application of existing codon optimization frameworks has several inherent problems. Firstly, most of the experimentalists claim to optimize the heterologous gene by arbitrarily replacing one or a few codons with the preferred ones for some amino acid, which is usually leucine or serine since they have the most synonymous codons. This approach is problematic because even though the modified sequence can exhibit improved in vivo expression, the sequence design can only be considered “locally optimal” with respect to the few codons instead of the global optimum that can only be reasonably achieved via computational means. In other cases where computational algorithms were used to optimize the gene, many design parameters, including GC content, codon adaptation index (CAI), mRNA structure, codon (pair) distribution and translation initiation sites, were incorporated. To accommodate the multitude of design parameters, sophisticated computational procedures were used, which adds to the complexity of the problem. Ultimately, numerous experiments may be required to elucidate the relative importance of these parameters before the gene optimization method can be applied successfully.

[0099] The CCO algorithm of the present disclosure overcomes the limitations of existing tools and existing algorithms by designing a genetic sequence with optimal codon pair usage, which has been experimentally shown to be a strong determinant of protein expression capability. Hence, the resultant gene design is expected to exhibit improved expression of heterologous proteins. Since CCO is primarily based on minimizing the discrepancy in codon pair usage between the host and the synthetic gene, well-established global optimization methods can be used to provide a solution sequence.

[0100] The key motivation behind the development of the CCO algorithm of the present disclosure is to enhance the expression of foreign genes in commonly used microbial cell factories such as Escherichia coli, Sacchromyces cerevisiae and Pichia pastoris. Therefore, the CCO algorithm of the present disclosure can be used in any industry where it is desirable to improve the production of heterologous proteins in a particular host organism. As such, the CCO algorithm of the present disclosure can be integrated into biopharmaceutical processes to improve the production of therapeutic protein drugs. In addition, in cases where metabolic engineering of cells is required, the CCO algorithm of the present disclosure can be used to enhance the expression of the respective metabolic enzymes to alter biosynthetic pathways for biotechnological applications which can include biofuel production, bio-catalysis and bioremediation.

[0101] The motivation behind codon optimization is usually to enhance the expression of foreign genes in expression hosts such as E. coli, P. pastoris and S. cerevisiae. In addition, codon optimization can also be used to generate synthetic designs of native genes for metabolic engineering applications. While conventional overexpression of native metabolic genes is achieved by increasing gene copy number through the introduction of plasmids, codon optimization provides an alternative approach for enhancing pathway utilization via insertion of high-expression synthetic genes of the respective metabolic enzymes into the host's genome. The latter technique can be advantageous as it obviates the metabolic burden associated with plasmid maintenance, thus allowing the cells to have more resources for growth and biochemical production.

[0102] Apart from biotechnological applications, codon optimization can also be used in biomedical research where modulation of protein expression is required to alter physiological response. For example, in the development of vaccines against viruses, one approach is to genetically manipulate the virus to obtain a “live attenuated” strain as the vaccine. Such a vaccine, when administered to the host, will elicit an immune response for the host to develop immunologic memory and specific immunity against the virus without severe disruption to the overall physiology. Some conventional methods of developing live attenuated vaccines include laboratory adaptation of virus in non-human hosts and random/site-directed mutagenesis. Since the wild-type virus is able to hijack the gene expression machinery of the host for replication, the de-optimization of viral codon usage can lead to the development of live attenuated vaccines. Therefore, the CCO framework developed in the present disclosure can be slightly modified to design a synthetic virus consisting of more rare codons that can be used as vaccines. Specifically, either inverting the objective function to minimize CC fitness or altering the target CC distribution during the execution of the optimization procedure can be done to design the sequence of the attenuated virus.

### Processes/Procedures/Methods

### Identifying Highly Expressed Genes

[0103] Provided that highly expressed genes have evolved to adopt optimal codon patterns, information on ICU and CC preference of any organism can be extracted from the DNA sequences of the high-expression genes. In this sense, published microarray data of E. coli, L. lactis, P. pastoris and S. cerevisiae from various experimental conditions were used to identify the top 5% of genes with the highest expression value for each microbe. The ICU and CC of these genes were then extracted from their corresponding DNA coding sequences that can be obtained from publicly available genome annotations for E. coli, L. lactis, P. pastoris and S. cerevisiae. Each host's ICU and CC preference can be represented as the frequency of occurrence of individual codons and codon pairs found in the sequences of the highly expressed genes. These ICU and CC distributions are then be used as the targets for the respective codon optimization methods. For the evaluation of ICU and CC biasness difference between high- and low-expression genes, the low-expression genes are identified in a similar way whereby the bottom 5% of the genes with the lowest expression values are consolidated (see list of sequences for a list of high-expression genes).

ICU and CC biasness

[0104] To compute the significance of codon (pair) usage bias, the Pearson's chi-squared test was resorted to. Based on the null hypothesis that “the ICU (CC) of high-expression genes follows the uniform/unbiased distribution”, the chi-square statistic for amino acid (pair) j is calculated as:

$${X}_{j}^{2} = {\sum }_{i = 1}^{{n}_{j}^{H}} \frac{{( {O}_{ij}^{H} - {E}_{ij}^{H} )}^{2}}{{E}_{ij}^{H}} \qquad ( Eqn . 1 )$$

where Eᵢⱼ^{H} and Oᵢⱼ^{H} are the expected and observed numbers of synonymous codon (pair) i encoding amino acid (pair) j, respectively. The constant nⱼ^{H} refers to the number of unique synonymous codon (pair) encoding the amino acid j; for example, the nH values for asparagine, glycine and leucine are 2, 4, and 6 respectively. The superscript “H” indicates that only the high-expression genes are used to evaluate the respective values. Given the null hypothesis of unbiased codon (pair) usage, Eᵢⱼ^{H} can be calculated as

$${E}_{ij}^{H} = \frac{{N}_{j}^{H}}{{n}_{j}^{H}}$$

where Nⱼ^{H} refers to the total number of amino acid (pair) j found in the high-expression genes. The p-value is then evaluated by comparing the calculated Xⱼ² against the χ² distribution with (nⱼ^{H}−1) degrees of freedom since the reduction in degrees of freedom is one due to the constraint:

$${\sum }_{i = 1}^{{n}_{j}^{H}} {O}_{ij}^{H} = {N}_{j}^{H} .$$

Using a p-value cut-off of 0.05, the amino acid (pair) with biased ICU (CC) distribution that is significantly different from the normal distribution can be identified. This test of ICU and CC biasness will be referred to as “χ² Test 1”. To ensure that the statistical adequacy of this chi-squared test, any amino acid (pair) with low expected occurrence (i.e. Eᵢⱼ^{H}<5) will be omitted from this analysis. Furthermore, chi-squared test of singular amino acids (methionine and tryptophan) and amino acid pairs (pairs only consisting of methionine and/or tryptophan) are also not relevant since they are not encoded by more than one synonymous codon (pair) such that the chi-squared statistic will always be equal to 1.

[0105] The presented Pearson's chi-squared formulation is slightly modified to determine whether the ICU (CC) is significantly different between high-expression genes and all genes in the genome. Based on the null hypothesis as “ICU (CC) of high-expression genes is the same as that of all genes in the genome”, the expected number of codon (pair) i in high-expression genes is modified as:

$${\tilde{E}}_{ij}^{H} = \frac{{O}_{ij}^{A} {N}_{j}^{H}}{{N}_{j}^{A}} \qquad ( Eqn . 2 )$$

where Oᵢⱼ^{A} refers the observed number of codon (pair) i encoding amino acid (pair) j and Nⱼ^{A} refers to the total number of amino acid (pair) j. The superscript “A” indicates that all genes in the host's genome are used for evaluating the respective values. By substituting Eᵢⱼ^{H} with \tilde{E}ᵢⱼ^{H} in the expression for Xⱼ², the chi-squared statistic to test the difference in ICU (CC) distribution between high-expression genes and all genes in the host's genome can be calculated.

### ICU and CC Fitness Evaluation

[0106] In the present disclosure, the target gene, subsequently known as the “subject”, is optimized such that the final synthetic sequence design will exhibit ICU and/or CC distributions that are as similar as possible to those preferred by the host's organism. The ICU and CC fitness values can be used to quantify the degree of similarity in ICU and CC distributions between the subject and the host. Before formulating the ICU and CC fitness, the mathematical expression of the coding sequence and amino acid sequence was presented as follows:

S_{A,1}={M,R,F,P,S,I,F, . . . ,G,D,R,*}={τ_{i,1}}ᵢ₌₁ⁿ (Eqn. 3)

S_{C,1}={AUG,AGA,UUU,CCU,UCA, . . . ,GAC,AGA,UGA}={λ_{i,1}}ᵢ₌₁ⁿ (Eqn. 4))

τ_{i,1}εA={α^{j}}ⱼ₌₁²¹={A,C,D, . . . ,W,Y*}∀i (Eqn. 5)

λ_{i,1}εK={κ^{k}}ₖ₌₁⁶⁴={AAA,AAC,AAG, . . . ,UUG,UUU}∀i (Eqn. 6)

where τ_{i,1} refers to the amino acid occupying the i^{th} position of the amino acid sequence S_{A,1} with the subscript 1 indicating the target protein; τ_{i,1} also belongs to the set A of 21 unique amino acids α^{j}. Similarly, λ_{i,1}, a codon from the set K of 64 unique codons κ^{k}, represents the codon variable in the i^{th} position of the target coding sequence S_{C,1}. It is noted that the coding sequence is express as a sequence of codons instead of nucleotides since codon usage patterns is the key concern. As codon context is another key issue to be examined, the mathematical expressions for amino acid pairs and codon pairs are as follows:

S_{AA,1}={MR,RF,FP,PS,SI, . . . ,GD,DR,R*}={ω_{i,1}}ᵢ₌₁ⁿ⁻¹ (Eqn. 7)

S_{CC,1}={AUGAGA,AGAUUU,UUUCCU, . . . ,AGAUGA}={γ_{i,1}}ᵢ₌₁ⁿ⁻¹ (Eqn. 8)

ω_{i,1}εB={AA,AC,CA, . . . ,W*,Y*}={β^{j}}ⱼ₌₁⁴²⁰∀iε{1, . . . ,n−1} (Eqn. 9)

γ_{i,1}εP={AAAAAA, . . . ,UUUUUU}={ρ^{k}}ₖ₌₁³⁹⁰⁴∀iε{1, . . . ,n−1} (Eqn. 10)

[0107] By defining a function to ƒ translate codon(s) to the corresponding amino acid(s) and a concatenation function g(a, b) to append the string b to right of string a, the mathematical relationships for τ_{i,1}, ω_{i,1}, λ_{i,1} and γ_{i,1} are as follows:

ƒ(λ_{i,1})=τ_{i,1} (Eqn. 11)

ƒ(γ_{i,1})=ω_{i,1} (Eqn. 12)

g(τ_{i,1},τ_{(i+1),1})=ω_{i,1} (Eqn. 13)

g(λ_{i,1},λ_{(i+1),1})=γ_{i,1} (Eqn. 14)

[0108] The ICU distribution can be defined as the frequency of each unique codon based on its total number of occurrences in the sequence(s). Based on the mathematical formulation presented hitherto, the required mathematical expressions to calculate the ICU distribution are as follows:

$$\begin{matrix}{θ}_{A , 1}^{j} = {\sum }_{i = 1}^{n} 1 \{ {τ}_{i , 1} = {α}^{j} \} ∀ j ∈ \{ 1 , 2 , … , 21 \} & ( Eqn . 15 ) \\ {θ}_{C , 1}^{k} = {\sum }_{i = 1}^{n} 1 \{ {λ}_{i , 1} = {κ}^{k} \} ∀ k ∈ \{ 1 , 2 , … , 64 \} & ( Eqn . 16 ) \\ {θ}_{A , 0}^{j} = {\sum }_{i = 1}^{{n}^{′}} 1 \{ {τ}_{i , 0} = {α}^{j} \} ∀ j ∈ \{ 1 , 2 , … , 21 \} & ( Eqn . 17 ) \\ {θ}_{C , 0}^{k} = {\sum }_{i = 1}^{{n}^{′}} 1 \{ {λ}_{i , 0} = {κ}^{k} \} ∀ k ∈ \{ 1 , 2 , … , 64 \} & ( Eqn . 18 ) \\ {p}_{0}^{k} = \frac{{θ}_{C , 0}^{k}}{{\sum }_{j = 1}^{21} [ {θ}_{A , 0}^{j} \times 1 \{ {α}^{j} = f ( {κ}^{k} ) \} ]} ∀ k ∈ \{ 1 , 2 , … , 64 \} & ( Eqn . 19 ) \\ {p}_{1}^{k} = \frac{{θ}_{C , 1}^{k}}{{\sum }_{j = 1}^{21} [ {θ}_{A , 1}^{j} \times 1 \{ {α}^{j} = f ( {κ}^{k} ) \} ]} ∀ k ∈ \{ 1 , 2 , … , 64 \} & ( Eqn . 20 ) \\ {θ}_{C , 0}^{k} = {\sum }_{i = 1}^{{n}^{′}} 1 \{ {λ}_{i , 0} = {κ}^{k} \} ∀ k ∈ \{ 1 , 2 , … , 64 \} & ( Eqn . 21 ) \\ {θ}_{C , 0}^{k} = {\sum }_{i = 1}^{{n}^{′}} 1 \{ {λ}_{i , 0} = {κ}^{k} \} ∀ k ∈ \{ 1 , 2 , … , 64 \} & ( Eqn . 22 )\end{matrix}$$

where 1{•} is an indicator function such that

$$1 \{ x \} = \{ \begin{matrix}1 & if x is true \\ 0 & otherwise\end{matrix}$$

The count variables θ_{AA}^{j} and θ_{C}^{k} refer to the numbers of occurrences of amino acid j and codon k, respectively, found in the host's (indicated by subscript “0”) or subject's (indicated by subscript “1”) sequence(s), while p^{k} represents the frequency of occurrence of codon k. Accordingly, the ICU fitness can be expressed as:

$${Ψ}_{ICU} = - \frac{{\sum }_{k = 1}^{64} \vert {p}_{0}^{k} - {p}_{1}^{k} \vert}{64} \qquad ( Eqn . 23 )$$

[0109] The ICU fitness, Ψ_{ICU}, was divided by 64 such that the numerical value will reflect the average fitness of all codons. In a similar way, if the frequency of occurrence of codon pair k is denoted as q^{k}, the CC fitness can be calculated as:

$$\begin{matrix}{q}_{0}^{k} = \frac{{θ}_{CC , 0}^{k}}{{\sum }_{j = 1}^{420} [ {θ}_{AA , 0}^{j} \times 1 \{ {β}^{j} = f ( {ρ}^{k} ) \} ]} ∀ k ∈ \{ 1 , 2 , … , 3904 \} & ( Eqn . 24 ) \\ {q}_{1}^{k} = \frac{{θ}_{CC , 1}^{k}}{{\sum }_{j = 1}^{420} [ {θ}_{AA , 1}^{j} \times 1 \{ {β}^{j} = f ( {ρ}^{k} ) \} ]} ∀ k ∈ \{ 1 , 2 , … , 3904 \} & ( Eqn . 25 ) \\ {Ψ}_{CC} = - \frac{{\sum }_{k = 1}^{3904} \vert {q}_{0}^{k} - {q}_{1}^{k} \vert}{3904} & ( Eqn . 26 )\end{matrix}$$

### EXAMPLES

### Example 1

[0110] A detailed mathematical formulation of ICO, CCO and MOCO is given in the following.

### 1.1 Codon Optimization Mathematical Formulation

[0111] The amino acid sequence of the recombinant EPO sequence with MFα signal peptide as the target protein for heterologous expression in P. pastoris is as follows:

MRFPSIFTAVLFAASSALAAPVNTTTEDETAQIPAEAVIGYLDLEGDFDVAVLPFSNSTNNG
LLFINTTIASIAAKEEGVSLDKRAPPRLICDSRVLERYLLEAKEAENITTGCAEHCSLNENI
TVPDTKVNFYAWKRMEVGQQAVEVWQGLALLSEAVLRGQALLVNSSQPWEPLQLHVDKAVSG
LRSLTTLLRALGAQKEAISPPDAASAAPLRTITADTFRKLFRVYSNFLRGKLKLYTGEACRT
GDR*

[0112] The abbreviation and corresponding synonymous codons for each amino acid is shown in Table 3.

TABLE 3
Amino acid abbreviation and synonymous codons

| | Abbre- | |
|---|---|---|
| Amino acid | viation | Synonymous codon(s) |
| Methionine | M | AUG |
| Tryptophan | W | UGG |
| Cysteine | C | UGC, UGU |
| Aspartate | D | GAC, GAU |
| Glutamate | E | GAA, GAG |
| Phenylalanine | F | UUC, UUU |
| Histidine | H | CAC, CAU |
| Lysine | K | AAA, AAG |
| Asparagine | N | AAC, AAU |
| Glutamine | Q | CAA, CAG |
| Tyrosine | Y | UAC, UAU |
| Isoleucine | I | AUA, AUC, AUU |
| Alanine | A | GCA, GCC, GCG, GCU |
| Glycine | G | GGA, GGC, GGG, GGU |
| Proline | P | CCA, CCC, CCG, CCU |
| Threonine | T | ACA, ACC, ACG, ACU |
| Valine | V | GUA, GUC, GUG, GUU |
| Leucine | L | CUA, CUC, CUG, CUU, UUA, |
| | | UUG |
| Arginine | R | AGA, AGG, CGA, CGC, CGG, |
| | | CGU |
| Serine | S | AGC, AGU, UCA, UCG, UCC, |
| | | UCU |
| (Stop) | * | UAA, UAG, UGA |

[0113] Based on the recombinant EPO sequence, the mathematical formulation of the codon optimization problem is illustrated as below.

### 1.2 Mathematical Representation of RNA and Protein Sequences

[0114] The primary structure of the target protein can be described as a sequence amino acids mathematically denoted as:

S_{A,1}={M,R,F,P,S,I,F, . . . ,G,D,R,*}={τ_{i,1}}ᵢ₌₁ⁿ

where τ_{i,1} refers to the amino acid occupying the i^{th} position of the protein sequence S_{A,1} with the subscript 1 indicating that this is the target protein and n refers to the sequence length which is 252 for the recombinant EPO. Each τ_{i,1} belongs to the set of unique amino acids which also includes the translation termination signal. Therefore, the following relationship can be established:

τ_{i,1}εA={α^{j}}ⱼ₌₁²¹={A,C,D, . . . ,W,Y,*}∀i

[0115] Since the primary concern is the manipulation of codons, the nucleotide sequence will be defined in terms of nucleotide triplets instead of individual nucleotides. Therefore, the coding sequence of the EPO gene will be mathematically written as:

S_{C,1}={AUG,AGA,UUU,CCU,UCA,AUU,UUU, . . . ,GGG,GAC,AGA,UGA}={λ_{i,1}}ᵢ₌₁ⁿ

where λ_{i,1} refers to the codon variable in the i^{th} position of the target coding sequence S_{C}. Every variable λ_{i,1} belongs to the set of 64 unique codons such that:

λ_{i,1}εK={κ^{k}}ₖ₌₁^{Γ}={AAA,AAC,AAG, . . . ,UUG,UUU}∀i

[0116] By defining a function ƒ to many any codon to its corresponding amino acid sequence, the translation of mRNA to protein can be written as τ_{i,1}=ƒ(λ_{i,1}) for individual codons, or S_{A}=ƒ(S_{C}) for the entire coding sequence. In ICU optimization, every λ_{i,1} is a variable while τ_{i,1} is a predefined constant. Therefore, the constraint ƒ(λ_{i,1})=τ_{i,1} delineates the feasible solution space of the ICU optimization problem. It is noted that in this writing, the subscript will be consistently used to indicate the position in a sequence while a superscript will always be used as index for elements in a unique set.

### 1.3 ICU Fitness

[0117] After defining the variables (codons) and constraint (target protein sequence), the final component of the optimization problem formulation is the objective function. In ICU optimization, the aim is to search for a candidate coding sequence which exhibits an ICU pattern that is most similar to the host's. Therefore, a fitness measure can be used to quantify the similarity between the ICU distributions of the host and the designed coding sequence, subsequently known as the “subject”.

[0118] The ICU distribution can be mathematically written as a vector of individual codon frequencies. The frequency of a codon can be calculated by dividing the number of codon occurrences in a coding sequence by the total number of corresponding amino acid occurrences in the target protein sequence. The counts of codons and amino acids are mathematically formulated as follows:

[0119] Subject's count for amino acid j:

$${θ}_{A , 1}^{j} = {\sum }_{i = 1}^{n} 1 \{ {τ}_{i , 1} = {α}^{j} \} ∀ j ∈ \{ 1 , 2 , … , 21 \}$$

[0120] Subject's count for codon k:

$${θ}_{C , 1}^{k} = {\sum }_{i = 1}^{n} 1 \{ {λ}_{i , 1} = {κ}^{k} \} ∀ k ∈ \{ 1 , 2 , … , 64 \}$$

[0121] Host's count for amino acid j:

$${θ}_{A , 0}^{j} = {\sum }_{i = 1}^{{n}^{′}} 1 \{ {τ}_{i , 0} = {α}^{j} \} ∀ j ∈ \{ 1 , 2 , … , 21 \}$$

[0122] Host's count for codon k:

$${θ}_{C , 0}^{k} = {\sum }_{i = 1}^{{n}^{′}} 1 \{ {λ}_{i , 0} = {κ}^{k} \} ∀ k ∈ \{ 1 , 2 , … , 64 \}$$

[0123] where 1{•} is an indicator function such that

$$1 \{ x \} = \{ \begin{matrix}1 & if x is true \\ 0 & otherwise\end{matrix}$$

[0124] It is noted that the host's codon and amino acid counts are calculated for a group of selected native genes while the subject's counts are calculated for the target protein sequence only. Hence, the host's counts are summed over the total number of amino acids/codons in all the genes denoted by n′. Accordingly, the subject's codon frequency can be calculated as:

$${p}_{1}^{k} = \frac{{θ}_{C , 1}^{k}}{{\sum }_{j = 1}^{21} [ {θ}_{A , 1}^{j} \times 1 \{ {α}^{j} = f ( {κ}^{k} ) \} ]} ∀ k ∈ \{ 1 , 2 , … , 64 \}$$

[0125] And the corresponding host's codon frequency can be calculated as:

$${p}_{0}^{k} = \frac{{θ}_{C , 0}^{k}}{{\sum }_{j = 1}^{21} [ {θ}_{A , 0}^{j} \times 1 \{ {α}^{j} = f ( {κ}^{k} ) \} ]} ∀ k ∈ \{ 1 , 2 , … , 64 \}$$

[0126] The ICU distributions can be written as vectors of 64 ICU frequencies, i.e. p₀ and p₁. Thus, the ICU fitness of the subject with respect to the host can be expressed as the negative of the Manhattan distance between p_{C}, and p₁:

$${Ψ}_{ICU} = - \frac{‖ {p}_{0} - {p}_{1} ‖}{64} = - \frac{{\sum }_{k = 1}^{64} \vert {p}_{0}^{k} - {p}_{1}^{k} \vert}{64}$$

### 1.4 Individual Codon Optimization (ICO)

[0127] By combining the mathematical expressions presented thus far, the ICU optimization problem can be formulated as follows:

$$max Z = {Ψ}_{ICU} \\ s . t . {S}_{A , 1} = {\{ {τ}_{i , 1} \}}_{i = 1}^{n} \\ {S}_{C , 1} = {\{ {λ}_{i , 1} \}}_{i = 1}^{n} \\ f ( {λ}_{i , 1} ) = {τ}_{i , 1} ∀ i ∈ \{ 1 , … , n \} \\ {θ}_{A , 1}^{j} = {\sum }_{i = 1}^{n} 1 \{ {τ}_{i , 1} = {α}^{j} \} ∀ j ∈ \{ 1 , 2 , … , 21 \} \\ {θ}_{C , 1}^{k} = {\sum }_{i = 1}^{n} 1 \{ {λ}_{i , 1} = {κ}^{k} \} ∀ k ∈ \{ 1 , 2 , … , 64 \} \\ {p}_{1}^{k} = \frac{{θ}_{C , 1}^{k}}{{\sum }_{j = 1}^{21} [ {θ}_{A , 1}^{j} \times 1 \{ {α}^{j} = f ( {κ}^{k} ) \} ]} ∀ k ∈ \{ 1 , 2 , … , 64 \} \\ {θ}_{A , 0}^{j} = {\sum }_{i = 1}^{{n}^{′}} 1 \{ {τ}_{i , 0} = {α}^{j} \} ∀ j ∈ \{ 1 , 2 , … , 21 \} \\ {θ}_{C , 0}^{k} = {\sum }_{i = 1}^{n} 1 \{ {λ}_{i , 0} = {κ}^{k} \} ∀ k ∈ \{ 1 , 2 , … , 64 \} \\ {p}_{0}^{k} = \frac{{θ}_{C , 0}^{k}}{{\sum }_{j = 1}^{21} [ {θ}_{A , 0}^{j} \times 1 \{ {α}^{j} = f ( {κ}^{k} ) \} ]} ∀ k ∈ \{ 1 , 2 , … , 64 \} \\ {Ψ}_{ICU} = - \frac{{\sum }_{k = 1}^{64} \vert {p}_{0}^{k} - {p}_{1}^{k} \vert}{64} \qquad ( P1 )$$

[0128] Due to the discrete codon variables and nonlinear fitness expression of Ψ_{ICU}, the above is a mixed-integer nonlinear programming (MINLP) problem. Nonetheless, the problem can be linearized using a similar strategy. By decomposing the nonlinear expression |p₀^{k}−p₁^{k}| into a series of linear constraints which consist of positive real and integer variables, the MINLP problem (P1) can be recast into a MILP problem. Although such an optimization problem can be solved using MILP solvers, there is a faster method for generating a subject with optimal ICU using the following steps:
[0129] I1. Calculate the host's individual codon usage distribution, p₀^{k}.
[0130] I2. Calculate the subject's amino acid counts, θ_{A,1}^{j}.
[0131] I3. Calculate the optimal codon counts for the subject:

$${θ}_{C , opt}^{k} = {p}_{0}^{k} \times {\sum }_{j = 1}^{21} [ {θ}_{A , 1}^{j} \times 1 \{ {α}^{j} = f ( {κ}^{k} ) \} ] ∀ k ∈ \{ 1 , 2 , … , 64 \}$$

[0132] I4. For each τᵢ in the subject's sequence, randomly assign a codon κ^{k} if θ_{C}^{k}>0, and decrement θ_{C,opt}^{k} by one.
[0133] I5. Repeat step 4 for all amino acids of the target protein from τ_{l,1} to τ_{n,1}.

### 1.5 Codon Context Optimization (CCO)

[0134] The formulation of CC optimization is similar to that of ICU optimization. In the context of CC, the target coding sequence is expressed as a sequence of codon pair variables:

S_{CC}={AUGAGA,AGAUUU,UUUCCU, . . . ,GGGGAC,GACAGA,AGAUGA}={γ_{i,1}}ᵢ₌₁ⁿ⁻¹

where γ_{i,1} refers to the codon variable in the i^{th} position of the target coding sequence S_{CC}. It is noted that the sequence S_{CC} is different from sequence S_{C} as the former set consists of n−1 codon pairs while the latter is made up of n codons. By defining a concatenation function g(a, b) to append the string b to right of string a, the relationship between λ_{i,1} and γ_{i,1} can be stated as γ_{i,1}=g(λ_{i,1}λ_{(i+1),1}). Every codon pair variable encodes for the corresponding amino acid pair, i.e. ƒ(γ_{i,1})=g(τ_{i,1},τ_{(i+1),1}), and they each belong to the unique sets of amino acid pairs and codon pairs defined as follows:

g(τ_{i,1},τ_{(i+1),1})εB={AA,AC,CA,AD,DA, . . . mW*,Y*}={β^{j}}ⱼ₌₁⁴²⁰∀iε{1, . . . ,n−1}

γ_{i,1}εP={AAAAAA,AAAAAC, . . . ,UUUUUU}={ρ^{k}}ₖ₌³⁹⁰⁴∀iε{1, . . . ,n−1}

[0135] Therefore, the counts and frequency can be expressed as follows:

[0136] Subject's count for amino acid pair j:

$${θ}_{AA , 1}^{j} = {\sum }_{i = 1}^{n - 1} 1 \{ g ( {τ}_{i , 1} , {τ}_{( i + 1 ) , 1} ) = {β}^{j} \} ∀ j ∈ \{ 1 , 2 , … , 420 \}$$

[0137] Subject's count for codon pair k:

$${θ}_{CC , 1}^{k} = {\sum }_{i = 1}^{n - 1} 1 \{ {γ}_{i , 1} = {ρ}^{k} \} ∀ k ∈ \{ 1 , 2 , … , 3904 \}$$

[0138] Subject's frequency of codon pair k:

$${q}_{1}^{k} = \frac{{θ}_{CC , 1}^{k}}{{\sum }_{j = 1}^{420} [ {θ}_{AA , 1}^{j} \times 1 \{ {β}^{j} = f ( {ρ}^{k} ) \} ]} ∀ k ∈ \{ 1 , 2 , … , 3904 \}$$

[0139] Host's count for amino acid pair j:

$${θ}_{AA , 0}^{j} = {\sum }_{i = 1}^{{n}^{′} - 1} 1 \{ g ( {τ}_{i , 0} , {τ}_{( i + 1 ) , 0} ) = {β}^{j} \} ∀ j ∈ \{ 1 , 2 , … , 420 \}$$

[0140] Host's count for codon pair k:

$${θ}_{CC , 1}^{k} = {\sum }_{i = 1}^{{n}^{′} - 1} 1 \{ {γ}_{i , 0} = {ρ}^{k} \} ∀ k ∈ \{ 1 , 2 , … , 3904 \}$$

[0141] Host's frequency of codon pair k:

$${q}_{0}^{k} = \frac{{θ}_{CC , 0}^{k}}{{\sum }_{j = 1}^{420} [ {θ}_{AA , 0}^{j} \times 1 \{ {β}^{j} = f ( {ρ}^{k} ) \} ]} ∀ k ∈ \{ 1 , 2 , … , 3904 \}$$

[0142] By denoting the CC distributions of the host and the subject as q₀ and q₁, the CC fitness of the subject is expressed as:

$${Ψ}_{CC} = - \frac{‖ {q}_{0} - {q}_{1} ‖}{3904} = - \frac{{\sum }_{k = 1}^{3904} \vert {q}_{0}^{k} - {q}_{1}^{k} \vert}{3904}$$

[0143] Consequently, the mathematical formulation of the CC optimization problem is as follows:

$$max Z = {Ψ}_{CC} \\ s . t . {S}_{A , 1} = {\{ {τ}_{i , 1} \}}_{i = 1}^{n} \\ {S}_{CC , 1} = {\{ {γ}_{i , 1} \}}_{i = 1}^{n} \\ f ( {γ}_{i , 1} ) = g ( {τ}_{i , 1} , {τ}_{( i + t ) , 1} ) ∀ i ∈ \{ 1 , … , n - 1 \} \\ {θ}_{AA , 0}^{j} = {\sum }_{i = 1}^{n - 1} 1 \{ g ( {τ}_{i , 1} , {τ}_{( i + 1 ) , 1} ) = {β}^{j} \} ∀ j ∈ \{ 1 , 2 , … , 420 \} \\ {θ}_{CC , 1}^{k} = {\sum }_{i = 1}^{n - 1} 1 \{ {γ}_{i , 1} = {ρ}^{k} \} ∀ k ∈ \{ 1 , 2 , … , 3904 \} \\ {q}_{1}^{k} = \frac{{θ}_{CC , 1}^{k}}{{\sum }_{j = 1}^{420} [ {θ}_{AAP , 1}^{j} \times 1 \{ {β}^{j} = f ( {ρ}^{k} ) \} ]} ∀ k ∈ \{ 1 , 2 , … , 3904 \} \\ {θ}_{AA , 0}^{j} = {\sum }_{i = 1}^{{n}^{′} - 1} 1 \{ g ( {τ}_{i , 0} , {τ}_{( i + 1 ) , 0} ) = {β}^{j} \} ∀ j ∈ \{ 1 , 2 , … , 420 \} \\ {θ}_{CC , 0}^{k} = {\sum }_{i = 1}^{{n}^{′} - 1} 1 \{ {γ}_{i , 0} = {ρ}^{k} \} ∀ k ∈ \{ 1 , 2 , … , 3904 \} \\ {q}_{0}^{k} = \frac{{θ}_{CC , 0}^{k}}{{\sum }_{j = 1}^{420} [ {θ}_{AA , 0}^{j} \times 1 \{ {β}^{j} = f ( {ρ}^{k} ) \} ]} ∀ k ∈ \{ 1 , 2 , … , 3904 \} \\ {Ψ}_{CC} = - \frac{{\sum }_{k = 1}^{3904} \vert {q}_{0}^{k} - {q}_{1}^{k} \vert}{3904} \qquad ( P 2 )$$

[0144] The above MINLP problem can also be recast into an MILP problem using the same strategy shown earlier in ICO to harness the more efficient MILP solvers to find an optimal sequence design. Due to the large discrete nonlinear search space, existing MILP solvers which use either branch-and-bound or branch-and-cut methods will still require huge amount of computational resources to find the optimum solution. Therefore, the genetic algorithm is used to solve (P2) as it provides an intuitive framework whereby codons are “evolved” towards optimal CC through techniques mimicking natural evolutionary processes such as selection, crossover or recombination and mutation.

[0145] The steps involved in the implementation of genetic algorithm for CC optimization is as follows:
[0146] C1. Randomly initialize a population of coding sequences for target protein.
[0147] C2. Evaluate the CC fitness of each sequence in the population.
[0148] C3. Rank the sequences by CC fitness and check termination criterion.
[0149] C4. If termination criterion is not satisfied, select the “fittest” sequences (top 50% of the population) as the parents for creation of offspring via recombination and mutation.
[0150] C5. Combine the parents and offspring to form a new population.
[0151] C6. Repeat steps 2 to 5 until termination criterion is satisfied.

[0152] In step 3, the termination criterion depends on the degree of improvement in best CC fitness values for consecutive generations of the genetic algorithm. If the improvement in CC fitness across many generations is not significant, the algorithm is said to have converged. In the present disclosure, the CC optimization algorithm will terminate when there is less than 0.5% increase in CC fitness across 100 generations, Ψ_{CC}^{(r+100)}/Ψ_{CC}^{(r)}<0.005 where r refers to the r^{th} generation of the genetic algorithm. When the termination criterion is not satisfied, the subsequent step 4 will perform an elitist selection such that the fittest 50% of the population are always selected for reproduction of offspring through recombination and mutation. During recombination, a pair of parents is chosen at random and a crossover is carried out at a randomly selected position in the parents' sequences to create 2 new individuals as offspring. The offspring subsequently undergo a random point mutation before they are combined with the parents to form the new generation.

[0153] Unlike traditional implementations of genetic algorithm where individuals in the population are represented as 0-1 bit strings, the presented CC optimization algorithm represents each individual as a sequential list of character triplets indicating the respective codons. Therefore, the codons can be manipulated directly with reference to a hash table which defines the synonymous codons for each amino acid. As a result, the protein encoded by the coding sequences is always the same in the genetic algorithm since crossovers only occur at the boundary of the codon triplets and mutation is always performed with reference to the hash table of synonymous codons for each respective amino acid. The hash table is constructed according to Table-3. The CCO algorithm is implemented whereby the codon fitness values of a population of sequence candidates are improved through selection, recombination and mutation (see FIGS. 6A and 6B). Unlike conventional genetic algorithm (GA) representation of individuals as 0-1 bit string, CCO represents the individuals as a string of characters which directly depicts the codons used for each amino acid. Therefore, for the evaluation of codon context fitness, the individual sequences are processed to calculate the respective codon context frequencies before it is compared with the host's. During selection, only top 50% of the fittest individuals are selected as parents for reproduction while the rest are discarded.

[0154] These parents are then randomly paired up for crossover at random points along the coding sequence to generate offspring that replace the discarded individuals. Random point mutation is then performed on each offspring individual to create diversity. It is noted that during crossover, special care is taken that the crossover point lies exactly on the boundary of two adjacent codons such that the resultant protein sequence will not be altered. Furthermore, duplicates are removed at each iteration to ensure that the population is not dominated by a particular sequence which can lead to the algorithm being stuck with a suboptimal solution. By specifically using the codon context distribution of the host's high-expressed genes as input parameter, the CCO algorithm can generate sequences similar to the native genes, thus capable of high expression levels.

### 1.6 Multi-Objective Codon Optimization (MOCO)

[0155] Based on the formulations for ICU and CC optimization, the MOCO problem can be mathematically formulated as follows:

$$max Z = ( {Ψ}_{ICU} , {Ψ}_{CC} ) \\ s . t . {S}_{A , 1} = {\{ {τ}_{i , 1} \}}_{i = 1}^{n} \\ {S}_{C , 1} = {\{ {λ}_{i , 1} \}}_{i = 1}^{n} \\ {S}_{CC , 1} = {\{ {γ}_{i , 1} \}}_{i = 1}^{n - 1} \\ f ( {λ}_{i , 1} ) = {τ}_{i , 1} ∀ i ∈ \{ 1 , … , n \} \\ f ( {γ}_{i , 1} ) = g ( {τ}_{i , 1} , {τ}_{( i + t ) , 1} ) ∀ i ∈ \{ 1 , … , n - 1 \} \\ {θ}_{A , 1}^{j} = {\sum }_{i = 1}^{n} 1 \{ {τ}_{i , 1} = {α}^{j} \} ∀ j ∈ \{ 1 , 2 , … , 21 \} \\ {θ}_{C , 1}^{k} = {\sum }_{i = 1}^{n} 1 \{ {γ}_{i , 1} = {κ}^{k} \} ∀ k ∈ \{ 1 , 2 , … , 64 \} \\ {p}_{1}^{k} = \frac{{θ}_{C , 1}^{k}}{{\sum }_{j = 1}^{21} [ {θ}_{A , 1}^{j} \times 1 \{ {α}^{j} = f ( {κ}^{k} ) \} ]} ∀ k ∈ \{ 1 , 2 , … , 64 \} \\ {θ}_{A , 0}^{j} = {\sum }_{i = 1}^{{n}^{′}} 1 \{ {τ}_{i , 0} = {α}^{j} \} ∀ j ∈ \{ 1 , 2 , … , 21 \} \\ {θ}_{C , 0}^{k} = {\sum }_{i = 1}^{n} 1 \{ {λ}_{i , 0} = {κ}^{k} \} ∀ k ∈ \{ 1 , 2 , … , 64 \} \\ {p}_{0}^{k} = \frac{{θ}_{C , 0}^{k}}{{\sum }_{j = 1}^{21} [ {θ}_{A , 0}^{j} \times 1 \{ {α}^{j} = f ( {κ}^{k} ) \} ]} ∀ k ∈ \{ 1 , 2 , … , 64 \} \\ {θ}_{AA , 1}^{j} = {\sum }_{i = 1}^{n - 1} 1 \{ g ( {τ}_{i , 1} , {τ}_{( i + 1 ) , 1} ) = {β}^{j} \} ∀ j ∈ \{ 1 , 2 , … , 420 \} \\ {θ}_{CC , 1}^{k} = {\sum }_{i = 1}^{n - 1} 1 \{ {γ}_{i , 1} = {ρ}^{k} \} ∀ k ∈ \{ 1 , 2 , … , 3904 \} \\ {q}_{1}^{k} = \frac{{θ}_{CC , 1}^{k}}{{\sum }_{j = 1}^{420} [ {θ}_{AA , 1}^{j} \times 1 \{ {β}^{j} = f ( {ρ}^{k} ) \} ]} ∀ k ∈ \{ 1 , 2 , … , 3904 \} \\ {θ}_{AA , 0}^{j} = {\sum }_{i = 1}^{{n}^{′} - 1} 1 \{ g ( {τ}_{i , 0} , {τ}_{( i + 1 ) , 0} ) = {β}^{j} \} ∀ j ∈ \{ 1 , 2 , … , 420 \} \\ {θ}_{CC , 0}^{k} = {\sum }_{i = 1}^{{n}^{′} - 1} 1 \{ {γ}_{i , 0} = {ρ}^{k} \} ∀ k ∈ \{ 1 , 2 , … , 3904 \} \\ {q}_{0}^{k} = \frac{{θ}_{CC , 0}^{k}}{{\sum }_{j = 1}^{420} [ {θ}_{AA , 0}^{j} \times 1 \{ {β}^{j} = f ( {ρ}^{k} ) \} ]} ∀ k ∈ \{ 1 , 2 , … , 3904 \} \\ {Ψ}_{ICU} = - \frac{{\sum }_{k = 1}^{64} \vert {p}_{0}^{k} - {p}_{1}^{k} \vert}{64} \\ {Ψ}_{CC} = - \frac{{\sum }_{k = 1}^{3904} \vert {q}_{0}^{k} - {q}_{1}^{k} \vert}{3904} \qquad ( P6 )$$

[0156] Due to the complexity attributed to CC optimization, solution to (P6) will also require a heuristic method. In this case, the nondominated sorting genetic algorithm-II (NSGA-II) is used to solve the nonlinear multi-objective optimization problem. The procedure for NSGA-II is similar to that presented for CC optimization except for additional steps required to identify the nondominated solution sets and the ranking of these sets to identify the pareto optimum front. The NSGA-II procedure for solving the MOCO problem is as follows:
[0157] M1. Randomly initialize a population of coding sequences for target protein.
[0158] M2. Evaluate ICU and CC fitness of each sequence in the population.
[0159] M3. Group the sequences into nondominated sets and rank the sets.
[0160] M4. Check termination criterion.
[0161] M5. If termination criterion is not satisfied, select the “fittest” sequences (top 50% of the population) as the parents for creation of offspring via recombination and mutation.
[0162] M6. Combine the parents and offspring to form a new population.
[0163] M7. Repeat steps 2 to 5 until termination criterion is satisfied.

[0164] The identification and ranking of nondominated sets in step 3 is performed via pair-wise comparison of the sequences' ICU and CC fitness. For a given pair of sequences with fitness values expressed as (Ψ_{ICU}¹, Ψ_{ICU}¹) and Ψ_{ICU}², Ψ_{ICU}²), the domination status can be evaluated as follows:
[0165] If (Ψ_{ICU}¹>Ψ_{ICU}²) and (Ψ_{ICU}¹≧Ψ_{ICU}²), sequence 1 dominates sequence 2.
[0166] If (Ψ_{ICU}¹≧Ψ_{ICU}²) and (Ψ_{ICU}¹>Ψ_{ICU}²), sequence 1 dominates sequence 2.
[0167] If (Ψ_{ICU}¹<Ψ_{ICU}²) and (Ψ_{ICU}¹≦Ψ_{ICU}²), sequence 2 dominates sequence 1.
   [0168] If (Ψ_{ICU}¹≦Ψ_{ICU}²) and (Ψ_{ICU}¹<Ψ_{ICU}²), sequence 2 dominates sequence 1.

[0169] Whenever a particular sequence is found to be dominated by another sequence, the domination rank of the former sequence is lowered. As such, the grouping and sorting of the nondominated sets are performed simultaneously in step 3 using the pseudo code:

Initialize domination ranks of all individuals to zero;
For every individual i where i loops from 1 to (n−1),

For every individual j where j loops from i to n,

If individual i dominates individual j,

Increment domination value of j;

Else if individual j dominates individual I,

Increment domination value of i;

Sort individuals based on domination ranks;

[0170] In the original nondominated sorting algorithm, the set of individuals that is dominated by every individual is stored in the memory. Therefore, for a total population of n, the total storage requirement is O(n²). However, for the abovementioned algorithm, only O(n) storage is required for storing the domination value of each individual. In terms of computational complexity, both the original and modified algorithm requires at most O(mn²) computations for m objective values since all the n individuals have to be compared pair-wise for every objective to be optimized. Therefore, the nondominated sorting algorithm presented in the present disclosure is superior on the whole, especially with regards to computational storage requirement which can become an important issue when dealing with long coding sequences.

### Example 2

### Codon Optimization of Another Set of High-Expression Genes in E. coli

[0171] ICO, CCO and MOCO were carried out using the set of high-expression genes to evaluate the relative performance of the methods.

[0172] A list of 27 high-expression genes (Table 4) has been used to establish a correlation between codon usage bias and gene expression. Note, Table 4A provides a full description of the sequences according to the instant subject matter. Using these genes, the in silico leave-one-out cross validation was performed to evaluate the performance of ICO, CCO and MOCO methods. Results showed that CCO generally produces sequences that best matches the wild-type highly expressed sequences, followed by the MOCO and ICO methods (FIG. 7). The optimized sequences are compared pairwise in a tournament style based on their percentage of matching codons with the respective wild-type sequences to generate the tournament matrix (Table 5). It was observed that CCO performed better than ICO and MOCO in at least 70% of the instances. This result is consistent with that presented in the main manuscript, indicating that CC fitness is a more important design criterion than ICU fitness for gene optimization.

TABLE 4
List of high-expression genes

| Gene | Locus tag | Product |
|---|---|---|
| rpsU | b3065 | 30S ribosomal subunit protein S21 |
| rpsJ | b3321 | 30S ribosomal subunit protein S10 |
| rpsL | b3342 | 30S ribosomal subunit protein S12 |
| rpsT | b0023 | 30S ribosomal subunit protein S20 |
| rpsA | b0911 | 30S ribosomal subunit protein S1 |
| rpsB | b0169 | 30S ribosomal subunit protein S2 |
| rpsO | b3165 | 30S ribosomal subunit protein S15 |
| rpsG | b3341 | 30S ribosomal subunit protein S7 |
| rpmB | b3637 | 50S ribosomal subunit protein L28 |
| rpmG | b3636 | 50S ribosomal subunit protein L33 |
| rpmH | b3703 | 50S ribosomal subunit protein L34 |
| rplK | b3983 | 50S ribosomal subunit protein L11 |
| rplJ | b3985 | 50S ribosomal subunit protein L10 |
| rplA | b3984 | 50S ribosomal subunit protein L1 |
| rplL | b3986 | 50S ribosomal subunit protein L7/L12 |
| rplQ | b3294 | 50S ribosomal subunit protein L17 |
| rplC | b3320 | 50S ribosomal subunit protein L3 |
| lpp | b1677 | murein lipoprotein |
| ompA | b0957 | outer membrane protein A (3a; II*; G;d) |
| ompC | b2215 | outer membrane porin protein C |
| ompF | b0929 | outer membrane porin 1a (Ia; b; F) |
| tufA | b3339 | protein chain elongation factor EF-Tu (duplicate |
| | | of tufB) |
| tufB | b3980 | protein chain elongation factor EF-Tu (duplicate |
| | | of tufA) |
| tsf | b0170 | protein chain elongation factor EF-Ts |
| fusA | b3340 | protein chain elongation factor EF-G, GTP- |
| | | binding |
| recA | b2699 | DNA strand exchange and recombination protein |
| | | with protease and nuclease activity |
| dnaK | b0014 | chaperone Hsp70, co-chaperone with DnaJ |

TABLE 4A
Descriptions of Sequence Listings

SEQ ID NO. 1 to SEQ ID NO. 180:
High expression genes with Locus Tag of b0008, b0014, b0095, b0114, b0115, b0116,
b0126, b0169, b0170, b0179, b0197, b0220, b0407, b0474, b0525, b0565, b0605,
b0623, b0727, b0728, b0741, b0742, b0755, b0811, b0812, b0814, b0880, b0884,
b0889, b0903, b0911, b0912, b0928, b0929, b0953, b0957, b1051, b1088, b1089,
b1091, b1092, b1093, b1094, b1101, b1136, b1237, b1243, b1324, b1480, b1583,
b1603, b1641, b1656, b1677, b1712, b1713, b1716, b1717, b1719, b1761, b1779,
b1818, b1823, b1824, b1920, b2007, b2029, b2093, b2094, b2095, b2096, b2175,
b2185, b2215, b2285, b2296, b2323, b2414, b2415, b2416, b2417, b2478, b2528,
b2572, b2597, b2606, b2607, b2608, b2609, b2696, b2697, b2741, b2742, b2779,
b2780, b2891, b2904, b2913, b2926, b3065, b3097, b3098, b3169, b3186, b3212,
b3213, b3230, b3231, b3236, b3255, b3261, b3294, b3295, b3296, b3297, b3299,
b3300, b3301, b3302, b3303, b3304, b3305, b3306, b3307, b3308, b3309, b3310,
b3311, b3312, b3313, b3314, b3315, b3316, b3317, b3318, b3319, b3320, b3321,
b3340, b3341, b3342, b3357, b3433, b3460, b3495, b3510, b3610, b3636, b3637,
b3649, b3672, b3703, b3730, b3733, b3734, b3735, b3737, b3738, b3751, b3766,
b3781, b3829, b3936, b3983, b3984, b3985, b3986, b3987, b4000, b4014, b4015,
b4142, b4171, b4172, b4200, b4201, b4202, b4243, b4245, b4255,
in Escherichia coli correspondingly.
SEQ ID NO. 181 to SEQ ID NO. 349:
Low expression genes with Locus Tag of b0136, b0278, b0279, b0295, b0303, b0326,
b0375, b0517, b0531, b0535, b0544, b0554, b0558, b0564, b0566, b0603, b0645,
b0647, b0702, b0716, b0769, b1001, b1007, b1023, b1024, b1043, b1058, b1121,
b1137, b1139, b1140, b1159, b1161, b1167, b1168, b1309, b1346, b1347, b1351,
b1352, b1353, b1357, b1363, b1409, b1445, b1455, b1470, b1497, b1499, b1502,
b1503, b1527, b1549, b1551, b1552, b1555, b1557, b1575, b1580, b1581, b1673,
b1690, b1691, b1696, b1730, b1788, b1968, b2055, b2056, b2108, b2110, b2111,
b2190, b2273, b2274, b2275, b2334, b2339, b2345, b2363, b2367, b2370, b2376,
b2448, b2483, b2623, b2625, b2626, b2642, b2646, b2778, b2846, b2847, b2849,
b2850, b2851, b2852, b2853, b2854, b2858, b2870, b2934, b3014, b3027, b3047,
b3048, b3119, b3120, b3121, b3138, b3144, b3215, b3264, b3442, b3443, b3482,
b3483, b3488, b3504, b3563, b3577, b3578, b3587, b3593, b3594, b3596, b3720,
b3721, b3723, b3817, b3818, b3875, b3876, b3896, b4017, b4038, b4047, b4048,
b4066, b4120, b4128, b4133, b4181, b4204, b4215, b4253, b4257, b4268, b4279,
b4311, b4365, b4494, b4519, b4524, b4526, b4533, b4541, b4559, b4586, b4588,
b4589, b4590, b4593, b4601, b4604, b4612, b4621, b4655, b4660,
in Escherichia coli correspondingly.
SEQ ID NO.350 to SEQ ID NO. 544:
High expression genes with Locus Tag of acmA, acmB, acmD, acpA, adhE, ahpC,
aldB, als, amyL, apl, arcD1, arcT, aroH, bar, bcaT, bmpA, choS,
citC, citD, citE, citF, cmk, codZ, comGD, cpsM, cspE, ctrA,
ctsR, cysS, dacA, dacB, dltC, dnaH, dpsA, efp, enoA, folC, frdC,
ftsE, fusA, gapB, gidA, glnR, gltD, grpE, gyrA, hsdS, icaA, ileS,
ilvC, ilvN, infA, kdgK, kinC, leuB, leuC, leuD, mtlD, mtsA, obgL,
oppB, optA, optD, pabB, pacL, pepT, pi115, pi116, pi125, pi129, pi135,
pi218, pi231, pi237, pi245, pi246, pi303, pi318, pi319, pi330, pi331, pi338,
pmpA, potB, potD, ppiB, prfA, proS, ps219, ptnC, ptsH, pyk, rbsD,
rcfA, recM, rgpE, rheA, rliB, rluB, rmaH, rmeA, rmlC, rnc, rnhA,
rnhB, rnpA, rplQ, rplT, rplV, rpmE, rpmH, rpmJ, rpoA, rpoE, rpsA,
rpsF, rpsI, rpsJ, rpsN, rpsO, rpsQ, rpsS, rpsU, serA, serB, serC,
thiE, tra905, trpD, tuf, usp45, ybaA, ybcG, ybeF, ybjD, ycdC, ycgD,
ychE, yddC, ydgC, ydhB, ydiD, ydjB, yedA, yhgD, yhjA, yhjE, yiiG,
yjaJ, yjfI, yjjB, ykbA, ykdB, ykjA, yliD, ymbC, ymcC, ymeB, yogL,
yohD, yoiB, ypdD, yphH, ypiA, ypjA, yraA, yrbB, yrbD, yrbF, yrcB,
yrjE, ysdB, ysdC, ysfG, ysxL, ytdA, ytdB, ytdF, ytgC, ytgG, ytgH,
yuaE, yueC, yueE, yuhC, yvcA, yvcC, yvdB, yvdF, yveC, yveH, ywdB,
ywfH, ywhA, yxbC,
in Lactococcus lactis correspondingly.
SEQ ID NO.545 to SEQ ID NO. 751:
Low expression genes with Locus Tag of aldC, cdd, ceo, chiA, coiA, comC,
comFC, copB, fabG2, fbp, glpT, hisZ, hprT, lmrA, menD, menE,
metB1, metB2, metE, metF, mleR, mtlF, mtlR, noxE, oppA, pbuX, pdc,
phnC, pi109, pi130, pi138, pi143, pi147, pi203, pi204, pi205, pi207, pi209,
pi210, pi211, pi215, pi216, pi223, pi225, pi229, pi235, pi240, pi241, pi248,
pi301, pi316, pi321, pi341, pi345, pi347, pi354, plpA, plpC, ps111, ps211,
ps307, ps309, ps311, ps312, ps314, ptcA, purK, pyrR, rbsB, rlrC, rmaD,
rplC, rplF, rplJ, rplK, rplL, rpmGA, rpmGC, sigX, ssbA,
sugE, tagB, tagF, tagR, tagY, trpE, trxB2, udk, uxuA, uxuB, xpt,
xylB, xylH, xynB, yabA, yaiI, yajB, ybcC, ybdG, ybhD, ybiI, ycdF,
yceG, yceJ, ycfI, ycgB, yciF, ycjG, ydaF, ydiG, yeaB, yebA, yeeD,
yeeG, yeiF, yejC, yfbB, yfbI, yfbK, yfcA, yfcD, yfdC, yfgC, yfgQ,
yfhC, yfhF, yfhL, yfiA, yfiD, yfiG, yfjE, yfjG, yfjH, ygdD, ygdF,
ygfC, ygfE, yhbE, yhdA, yhdC, yhjB, yhjG, yieF, yigC, yihB, yihD,
yiiD, yijF, yjdi, yjfB, ykaE, ykcB, ykhE, ykhJ, ykhK, ykjC, ylgB,
yliC, yliF, yljC, yljD, yljH, ymaB, ymbG, ymfD, yneE, yniI, ynjD,
ynjF, yohH, yoiC, ypaG, ypbB, yphK, ypiE, ypiH, ypiK, yqbH, yqbI,
yqbJ, yqcB, yqcD, yqfC, yqfG, yqhA, yqjA, yqjE, yrbE, yrbH, yrgE,
yseA, yseC, yseE, ysgA, yshA, ytbA, yteD, yteE, ytjD, yveD, yvfB,
ywaC, ywfB, ywiC, yxbF, yxdE, zitS,
in Lactococcus lactis correspondingly
SEQ ID NO. 752 to SEQ ID NO. 1002:
High expression genes with Locus Tag of
PAS_c131_0011, PAS_c131_0017, PAS_chr1-1_0002, PAS_chr1-
1_0008, PAS_chr1-1_0030, PAS_chr1-1_0037, PAS_chr1-1_0072, PAS_chr1-
1_0107, PAS_chr1-1_0118, PAS_chr1-1_0171, PAS_chr1-1_0180, PAS_chr1-
1_0183, PAS_chr1-1_0200, PAS_chr1-1_0216, PAS_chr1-1_0218, PAS_chr1-1_0226,
PAS_chr1-1_0257, PAS_chr1-1_0283, PAS_chr1-1_0302, PAS_chr1-1_0307,
PAS_chr1-1_0315, PAS_chr1-1_0319, PAS_chr1-1_0378, PAS_chr1-1_0407,
PAS_chr1-1_0417, PAS_chr1-1_0432, PAS_chr1-1_0433, PAS_chr1-1_0448,
PAS_chr1-1_0475, PAS_chr1-3_0034, PAS_chr1-3_0059, PAS_chr1-3_0102,
PAS_chr1-3_0104, PAS_chr1-3_0115, PAS_chr1-3_0172, PAS_chr1-3_0191,
PAS_chr1-3_0202, PAS_chr1-3_0229, PAS_chr1-3_0253, PAS_chr1-4_0003,
PAS_chr1-4_0027, PAS_chr1-4_0042, PAS_chr1-4_0043, PAS_chr1-4_0049,
PAS_chr1-4_0063, PAS_chr1-4_0090, PAS_chr1-4_0130, PAS_chr1-4_0239,
PAS_chr1-4_0249, PAS_chr1-4_0264, PAS_chr1-4_0275, PAS_chr1-4_0292,
PAS_chr1-4_0294, PAS_chr1-4_0303, PAS_chr1-4_0339, PAS_chr1-4_0352,
PAS_chr1-4_0367, PAS_chr1-4_0412, PAS_chr1-4_0422, PAS_chr1-4_0426,
PAS_chr1-4_0465, PAS_chr1-4_0481, PAS_chr1-4_0491, PAS_chr1-4_0504,
PAS_chr1-4_0516, PAS_chr1-4_0546, PAS_chr1-4_0547, PAS_chr1-4_0569,
PAS_chr1-4_0570, PAS_chr1-4_0586, PAS_chr1-4_0589, PAS_chr1-4_0659,
PAS_chr1-4_0699, PAS_chr2-1_0022, PAS_chr2-1_0023, PAS_chr2-1_0072,
PAS_chr2-1_0136, PAS_chr2-1_0210, PAS_chr2-1_0218, PAS_chr2-1_0238,
PAS_chr2-1_0254, PAS_chr2-1_0308, PAS_chr2-1_0313, PAS_chr2-1_0324,
PAS_chr2-1_0362, PAS_chr2-1_0363, PAS_chr2-1_0365, PAS_chr2-1_0376,
PAS_chr2-1_0428, PAS_chr2-1_0429, PAS_chr2-1_0437, PAS_chr2-1_0454,
PAS_chr2-1_0472, PAS_chr2-1_0481, PAS_chr2-1_0483, PAS_chr2-1_0486,
PAS_chr2-1_0489, PAS_chr2-1_0502, PAS_chr2-1_0522, PAS_chr2-1_0543,
PAS_chr2-1_0584, PAS_chr2-1_0624, PAS_chr2-1_0661, PAS_chr2-1_0701,
PAS_chr2-1_0728, PAS_chr2-1_0748, PAS_chr2-1_0758, PAS_chr2-1_0769,
PAS_chr2-1_0785, PAS_chr2-1_0809, PAS_chr2-1_0812, PAS_chr2-1_0853,
PAS_chr2-1_0887, PAS_chr2-2_0019, PAS_chr2-2_0048, PAS_chr2-2_0054,
PAS_chr2-2_0059, PAS_chr2-2_0062, PAS_chr2-2_0064, PAS_chr2-2_0109,
PAS_chr2-2_0127, PAS_chr2-2_0131, PAS_chr2-2_0148, PAS_chr2-2_0165,
PAS_chr2-2_0186, PAS_chr2-2_0199, PAS_chr2-2_0200, PAS_chr2-2_0220,
PAS_chr2-2_0266, PAS_chr2-2_0267, PAS_chr2-2_0301, PAS_chr2-2_0326,
PAS_chr2-2_0337, PAS_chr2-2_0380, PAS_chr2-2_0419, PAS_chr3_0040,
PAS_chr3_0054, PAS_chr3_0059, PAS_chr3_0082, PAS_chr3_0091,
PAS_chr3_0099, PAS_chr3_0167, PAS_chr3_0188, PAS_chr3_0227,
PAS_chr3_0230, PAS_chr3_0277, PAS_chr3_0287, PAS_chr3_0361,
PAS_chr3_0362, PAS_chr3_0372, PAS_chr3_0374, PAS_chr3_0393,
PAS_chr3_0408, PAS_chr3_0456, PAS_chr3_0494, PAS_chr3_0505,
PAS_chr3_0528, PAS_chr3_0535, PAS_chr3_0567, PAS_chr3_0576,
PAS_chr3_0595, PAS_chr3_0640, PAS_chr3_0648, PAS_chr3_0694,
PAS_chr3_0722, PAS_chr3_0731, PAS_chr3_0744, PAS_chr3_0762,
PAS_chr3_0808, PAS_chr3_0815, PAS_chr3_0836, PAS_chr3_0837,
PAS_chr3_0841, PAS_chr3_0868, PAS_chr3_0870, PAS_chr3_0932,
PAS_chr3_0951, PAS_chr3_0955, PAS_chr3_0957, PAS_chr3_0965,
PAS_chr3_1028, PAS_chr3_1057, PAS_chr3_1071, PAS_chr3_1087,
PAS_chr3_1111, PAS_chr3_1162, PAS_chr3_1167, PAS_chr3_1169,
PAS_chr3_1199, PAS_chr3_1200, PAS_chr3_1209, PAS_chr4_0018,
PAS_chr4_0043, PAS_chr4_0080, PAS_chr4_0102, PAS_chr4_0139,
PAS_chr4_0151, PAS_chr4_0164, PAS_chr4_0180, PAS_chr4_0185,
PAS_chr4_0210, PAS_chr4_0246, PAS_chr4_0248, PAS_chr4_0255,
PAS_chr4_0284, PAS_chr4_0287, PAS_chr4_0292, PAS_chr4_0330,
PAS_chr4_0342, PAS_chr4_0348, PAS_chr4_0405, PAS_chr4_0412,
PAS_chr4_0414, PAS_chr4_0431, PAS_chr4_0433, PAS_chr4_0456,
PAS_chr4_0488, PAS_chr4_0516, PAS_chr4_0524, PAS_chr4_0550,
PAS_chr4_0552, PAS_chr4_0578, PAS_chr4_0624, PAS_chr4_0627,
PAS_chr4_0680, PAS_chr4_0684, PAS_chr4_0688, PAS_chr4_0720,
PAS_chr4_0733, PAS_chr4_0762, PAS_chr4_0783, PAS_chr4_0785,
PAS_chr4_0786, PAS_chr4_0815, PAS_chr4_0828, PAS_chr4_0832,
PAS_chr4_0840, PAS_chr4_0842, PAS_chr4_0883, PAS_chr4_0943,
PAS_chr4_0947, PAS_chr4_0953, PAS_chr4_0981, PAS_FragB_0052,
PAS_FragB_0061, PAS_FragB_0064, PAS_FragB_0065, PAS_FragB_0074,
PAS_FragD_0013, PAS_FragD_0014, PAS_FragD_0026,
in Pichia pastoris correspondingly
SEQ ID NO.1003 to SEQ ID NO. 1253:
Low expression genes with Locus Tag of
PAS_c121_0014, PAS_c121_0016, PAS_chr1-1_0021, PAS_chr1-
1_0026, PAS_chr1-1_0047, PAS_chr1-1_0068, PAS_chr1-1_0082, PAS_chr1-
1_0093, PAS_chr1-1_0126, PAS_chr1-1_0149, PAS_chr1-1_0178, PAS_chr1-
1_0207, PAS_chr1-1_0210, PAS_chr1-1_0228, PAS_chr1-1_0242, PAS_chr1-
1_0251, PAS_chr1-1_0256, PAS_chr1-1_0261, PAS_chr1-1_0263, PAS_chr1-
1_0288, PAS_chr1-1_0306, PAS_chr1-1_0325, PAS_chr1-1_0334, PAS_chr1-
1_0347, PAS_chr1-1_0365, PAS_chr1-1_0379, PAS_chr1-1_0386, PAS_chr1-
1_0437, PAS_chr1-1_0477, PAS_chr1-1_0483, PAS_chr1-1_0492, PAS_chr1-
3_0003, PAS_chr1-3_0021, PAS_chr1-3_0058, PAS_chr1-3_0073, PAS_chr1-
3_0091, PAS_chr1-3_0120, PAS_chr1-3_0129, PAS_chr1-3_0146, PAS_chr1-
3_0213, PAS_chr1-3_0247, PAS_chr1-3_0278, PAS_chr1-3_0290, PAS_chr1-
3_0303, PAS_chr1-3_0304, PAS_chr1-3_0308, PAS_chr1-3_0311, PAS_chr1-
4_0001, PAS_chr1-4_0076, PAS_chr1-4_0097, PAS_chr1-4_0129, PAS_chr1-
4_0143, PAS_chr1-4_0157, PAS_chr1-4_0189, PAS_chr1-4_0216, PAS_chr1-
4_0228, PAS_chr1-4_0251, PAS_chr1-4_0272, PAS_chr1-4_0301, PAS_chr1-
4_0373, PAS_chr1-4_0374, PAS_chr1-4_0377, PAS_chr1-4_0388, PAS_chr1-
4_0402, PAS_chr1-4_0444, PAS_chr1-4_0473, PAS_chr1-4_0483, PAS_chr1-
4_0495, PAS_chr1-4_0520, PAS_chr1-4_0521, PAS_chr1-4_0525, PAS_chr1-
4_0554, PAS_chr1-4_0568, PAS_chr1-4_0578, PAS_chr1-4_0581, PAS_chr1-
4_0582, PAS_chr1-4_0583, PAS_chr1-4_0665, PAS_chr1-4_0673, PAS_chr1-
4_0680, PAS_chr1-4_0687, PAS_chr1-4_0690, PAS_chr2-1_0004, PAS_chr2-
1_0010, PAS_chr2-1_0012, PAS_chr2-1_0020, PAS_chr2-1_0035, PAS_chr2-
1_0084, PAS_chr2-1_0148, PAS_chr2-1_0179, PAS_chr2-1_0195, PAS_chr2-
1_0198, PAS_chr2-1_0224, PAS_chr2-1_0252, PAS_chr2-1_0268, PAS_chr2-
1_0275, PAS_chr2-1_0296, PAS_chr2-1_0306, PAS_chr2-1_0312, PAS_chr2-
1_0317, PAS_chr2-1_0328, PAS_chr2-1_0332, PAS_chr2-1_0334, PAS_chr2-
1_0364, PAS_chr2-1_0381, PAS_chr2-1_0382, PAS_chr2-1_0386, PAS_chr2-
1_0420, PAS_chr2-1_0441, PAS_chr2-1_0443, PAS_chr2-1_0452, PAS_chr2-
1_0462, PAS_chr2-1_0471, PAS_chr2-1_0474, PAS_chr2-1_0493, PAS_chr2-
1_0515, PAS_chr2-1_0579, PAS_chr2-1_0586, PAS_chr2-1_0587, PAS_chr2-
1_0607, PAS_chr2-1_0618, PAS_chr2-1_0632, PAS_chr2-1_0653, PAS_chr2-
1_0654, PAS_chr2-1_0686, PAS_chr2-1_0822, PAS_chr2-1_0860, PAS_chr2-
1_0883, PAS_chr2-2_0003, PAS_chr2-2_0010, PAS_chr2-2_0012, PAS_chr2-
2_0031, PAS_chr2-2_0098, PAS_chr2-2_0180, PAS_chr2-2_0190, PAS_chr2-
2_0194, PAS_chr2-2_0224, PAS_chr2-2_0255, PAS_chr2-2_0308, PAS_chr2-
2_0336, PAS_chr2-2_0351, PAS_chr2-2_0376, PAS_chr2-2_0408,
PAS_chr3_0001, PAS_chr3_0005, PAS_chr3_0018, PAS_chr3_0025,
PAS_chr3_0049, PAS_chr3_0101, PAS_chr3_0138, PAS_chr3_0146,
PAS_chr3_0164, PAS_chr3_0171, PAS_chr3_0179, PAS_chr3_0184,
PAS_chr3_0185, PAS_chr3_0192, PAS_chr3_0198, PAS_chr3_0219,
PAS_chr3_0229, PAS_chr3_0247, PAS_chr3_0272, PAS_chr3_0302,
PAS_chr3_0315, PAS_chr3_0326, PAS_chr3_0338, PAS_chr3_0351,
PAS_chr3_0429, PAS_chr3_0446, PAS_chr3_0455, PAS_chr3_0470,
PAS_chr3_0476, PAS_chr3_0492, PAS_chr3_0496, PAS_chr3_0501,
PAS_chr3_0560, PAS_chr3_0563, PAS_chr3_0588, PAS_chr3_0601,
PAS_chr3_0639, PAS_chr3_0759, PAS_chr3_0794, PAS_chr3_0860,
PAS_chr3_0864, PAS_chr3_0872, PAS_chr3_0889, PAS_chr3_0902,
PAS_chr3_1000, PAS_chr3_1082, PAS_chr3_1128, PAS_chr3_1214,
PAS_chr3_1237, PAS_chr4_0003, PAS_chr4_0028, PAS_chr4_0039,
PAS_chr4_0048, PAS_chr4_0051, PAS_chr4_0062, PAS_chr4_0079,
PAS_chr4_0104, PAS_chr4_0117, PAS_chr4_0132, PAS_chr4_0133,
PAS_chr4_0145, PAS_chr4_0155, PAS_chr4_0159, PAS_chr4_0166,
PAS_chr4_0170, PAS_chr4_0230, PAS_chr4_0244, PAS_chr4_0286,
PAS_chr4_0296, PAS_chr4_0299, PAS_chr4_0304, PAS_chr4_0353,
PAS_chr4_0357, PAS_chr4_0358, PAS_chr4_0360, PAS_chr4_0365,
PAS_chr4_0385, PAS_chr4_0397, PAS_chr4_0417, PAS_chr4_0452,
PAS_chr4_0467, PAS_chr4_0477, PAS_chr4_0480, PAS_chr4_0481,
PAS_chr4_0502, PAS_chr4_0538, PAS_chr4_0556, PAS_chr4_0588,
PAS_chr4_0611, PAS_chr4_0620, PAS_chr4_0638, PAS_chr4_0676,
PAS_chr4_0691, PAS_chr4_0696, PAS_chr4_0718, PAS_chr4_0735,
PAS_chr4_0752, PAS_chr4_0878, PAS_chr4_0914, PAS_chr4_0919,
PAS_chr4_0929, PAS_chr4_0949, PAS_chr4_0957, PAS_chr4_0959,
PAS_chr4_0975, PAS_chr4_0995, PAS_FragB_0026, PAS_FragB_0032,
in Pichia pastoris correspondingly
SEQ ID NO. 1254 to SEQ ID NO. 1528:
High expression genes with Locus Tag of
YAL003W, YAL005C, YAL038W, YAL044C, YBL003C, YBL027W,
YBL072C, YBL087C, YBL092W, YBR010W, YBR011C,
YBR039W, YBR048W, YBR067C, YBR078W, YBR082C,
YBR106W, YBR191W, YBR196C, YBR286W, YCL018W, YCL030C,
YCL035C, YCL040W, YCL043C, YCR012W, YDL055C, YDL061C,
YDL067C, YDL075W, YDL081C, YDL082W, YDL125C,
YDL130W, YDL130W-A, YDL137W, YDL182W, YDL191W,
YDL192W, YDL208W, YDR012W, YDR032C, YDR033W, YDR050C,
YDR064W, YDR077W, YDR155C, YDR177W, YDR178W, YDR224C,
YDR225W, YDR226W, YDR233C, YDR276C, YDR322C-A, YDR341C,
YDR342C, YDR343C, YDR382W, YDR418W, YDR454C,
YDR471W, YDR497C, YDR500C, YDR529C, YEL009C, YEL017C-
A, YEL024W, YEL027W, YEL034W, YEL054C, YER011W, YER056C-
A, YER074W, YER091C, YER094C, YER177W, YFL014W, YFL038C,
YFL039C, YFL045C, YFR031C-A, YFR032C-A, YFR053C, YGL008C,
YGL030W, YGL031C, YGL037C, YGL055W, YGL076C,
YGL103W, YGL123W, YGL148W, YGL189C, YGL200C, YGR037C,
YGR060W, YGR085C, YGR118W, YGR148C, YGR180C, YGR183C,
YGR192C, YGR204W, YGR214W, YGR254W, YGR279C, YGR282C,
YHL015W, YHL033C, YHR007C, YHR018C, YHR021C, YHR053C,
YHR143W, YHR162W, YHR174W, YHR183W, YHR193C, YIL043C,
YIL052C, YIL133C, YIL177C, YJL034W, YJL052W, YJL079C,
YJL130C, YJL136C, YJL138C, YJL151C, YJL177W, YJL189W,
YJL190C, YJR009C, YJR016C, YJR025C, YJR077C, YJR085C,
YJR094W-A, YJR104C, YJR105W, YJR123W, YJR139C, YJR145C,
YKL001C, YKL006W, YKL056C, YKL060C, YKL085W,
YKL141W, YKL152C, YKL156W, YKL164C, YKL180W,
YKL181W, YKR042W, YKR057W, YLL024C, YLL041C, YLL045C,
YLL050C, YLL066C, YLR038C, YLR043C, YLR044C,
YLR056W, YLR060W, YLR061W, YLR075W, YLR109W, YLR110C,
YLR150W, YLR155C, YLR167W, YLR185W, YLR249W, YLR259C,
YLR264W, YLR286C, YLR287C-A, YLR303W, YLR304C, YLR325C,
YLR340W, YLR342W, YLR344W, YLR355C, YLR388W, YLR395C,
YLR406C, YLR441C, YLR448W, YML008C, YML012W,
YML024W, YML026C, YML028W, YML063W, YML073C,
YML081C-A, YMR116C, YMR122W-A, YMR142C, YMR186W,
YMR194W, YMR202W, YMR205C, YMR226C, YMR242C,
YMR251W-A, YMR256C, YMR295C, YMR307W, YNL031C,
YNL055C, YNL064C, YNL069C, YNL071W, YNL104C, YNL135C,
YNL145W, YNL162W, YNL178W, YNL208W, YNL209W,
YNL220W, YNL301C, YNL302C, YNL305C, YNL336W, YNR001C,
YNR016C, YOL038W, YOL039W, YOL040C, YOL058W, YOL086C,
YOL109W, YOL120C, YOL127W, YOR020C, YOR045W,
YOR063W, YOR096W, YOR122C, YOR133W, YOR136W, YOR182C,
YOR230W, YOR234C, YOR247W, YOR270C, YOR285W,
YOR293W, YOR303W, YOR332W, YOR369C, YOR375C, YPL028W,
YPL037C, YPL079W, YPL090C, YPL131W, YPL143W, YPL154C,
YPL220W, YPR035W, YPR043W, YPR080W, YPR102C,
YPR103W, YPR132W, YPR149W, YPR165W, YPR204W,
in Saccharomyces cerevisiae correspondingly
SEQ ID NO. 1529 to SEQ ID NO. 1802:
Low expression genes with Locus Tag of
YAL037C-A, YAL047C, YAL048C, YAL064C-A, YAL064W, YAL065C,
YAL067C, YAR031W, YBL013W, YBL026W, YBL044W,
YBL059W, YBL063W, YBL097W, YBR013C, YBR020W,
YBR076W, YBR093C, YBR098W, YBR114W, YBR132C, YBR138C,
YBR148W, YBR152W, YBR180W, YBR184W, YBR186W,
YBR203W, YCL001W-A, YCL048W, YCL064C, YCL066W,
YCR020W-B, YCR045C, YCR050C, YCR091W, YCR092C, YCR095C,
YCR097W, YCR101C, YCR106W, YDL037C, YDL105W,
YDL186W, YDR020C, YDR034C, YDR038C, YDR039C, YDR042C,
YDR106W, YDR114C, YDR125C, YDR131C, YDR217C, YDR218C,
YDR240C, YDR259C, YDR285W, YDR295C, YDR314C,
YDR371W, YDR374C, YDR386W, YDR421W, YDR446W, YDR470C,
YDR501W, YDR522C, YDR523C, YDR532C, YEL019C,
YEL033W, YEL061C, YER038C, YER044C-A, YER078C, YER085C,
YER111C, YFL003C, YFL011W, YFL012W, YFL024C, YFL040W,
YFL056C, YFL067W, YFR012W, YFR035C, YFR057W,
YGL006W-A, YGL015C, YGL033W, YGL089C, YGL090W, YGL138C,
YGL158W, YGL168W, YGL170C, YGL175C, YGL183C,
YGL192W, YGL194C, YGL230C, YGL232W, YGL235W,
YGL249W, YGL251C, YGL258W, YGR006W, YGR016W,
YGR059W, YGR081C, YGR089W, YGR109C, YGR126W,
YGR153W, YGR212W, YGR218W, YGR225W, YGR273C, YHL009C,
YHL010C, YHL012W, YHL022C, YHL044W, YHL047C,
YHL048W, YHR014W, YHR021W-A, YHR022C, YHR044C,
YHR073W, YHR079C-A, YHR118C, YHR123W, YHR153C, YHR160C,
YHR185C, YIL029C, YIL060W, YIL072W, YIL073C, YIL084C,
YIL095W, YIL102C, YIL139C, YIL144W, YIL150C, YIL159W,
YJL038C, YJL058C, YJL106W, YJL107C, YJL127C, YJL165C,
YJL216C, YJR043C, YJR053W, YJR079W, YJR108W, YJR153W,
YKL070W, YKR015C, YKR041W, YKR103W, YKR105C,
YKR106W, YLL010C, YLL013C, YLL063C, YLR012C,
YLR013W, YLR039C, YLR047C, YLR148W, YLR287C,
YLR318W, YLR329W, YLR341W, YLR385C, YLR393W, YLR415C,
YLR445W, YML003W, YML047C, YML066C, YMR018W,
YMR052W, YMR066W, YMR070W, YMR084W, YMR094W,
YMR101C, YMR117C, YMR133W, YMR137C, YMR159C,
YMR192W, YMR230W, YMR251W, YMR268C, YMR299C,
YMR317W, YNL020C, YNL033W, YNL093W, YNL126W, YNL196C,
YNL204C, YNL210W, YNL234W, YNL249C, YNL260C, YNL318C,
YNR004W, YNR019W, YNR047W, YNR062C, YNR063W, YNR064C,
YNR066C, YNR069C, YNR070W, YNR071C, YNR074C,
YOL013W-A, YOL017W, YOL024W, YOL047C, YOL057W,
YOL069W, YOL104C, YOL131W, YOL141W, YOL165C,
YOR008C-A, YOR022C, YOR030W, YOR049C, YOR180C,
YOR183W, YOR195W, YOR214C, YOR255W, YOR295W,
YOR298W, YOR339C, YOR349W, YOR351C, YOR365C,
YOR378W, YOR384W, YOR387C, YOR394W, YPL018W, YPL021W,
YPL033C, YPL068C, YPL121C, YPL130W, YPL165C, YPL166W,
YPL200W, YPL216W, YPL253C, YPL277C, YPR027C, YPR045C,
YPR054W, YPR089W, YPR116W, YPR156C,
YPR186C, YPR200C, YPR201W,
in Saccharomyces cerevisiae correspondingly

[0173] SEQ ID NO. 1803 to SEQ ID NO. 1982: optimized genes corresponding to the native genes in SEQ ID NO. 1 to SEQ ID NO. 180, the corresponding native gene is selected from the entire set of high-expression genes in Escherichia coli (i.e. SEQ ID NO. 1 to SEQ ID NO. 180) for optimization using “codon context optimization (CCO)” approach in this invention while the rest of the genes are used as the training set.
[0174] SEQ ID NO. 1983 to SEQ ID NO. 2162: optimized genes corresponding to the native genes in SEQ ID NO. 1 to SEQ ID NO. 180, the corresponding native gene is selected from the entire set of high-expression genes in Escherichia coli (i.e. SEQ ID NO. 1 to SEQ ID NO. 180) for optimization using “individual codon usage optimization (ICO)” approach in this invention while the rest of the genes are used as the training set.
[0175] SEQ ID NO. 2163 to SEQ ID NO. 2342: optimized genes corresponding to the native genes in SEQ ID NO. 1 to SEQ ID NO. 180, the corresponding native gene is selected from the entire set of high-expression genes in Escherichia coli (i.e. SEQ ID NO. 1 to SEQ ID NO. 180) for optimization using “multi-objective codon optimization (MOCO)” approach in this invention while the rest of the genes are used as the training set.
[0176] SEQ ID NO. 2343 to SEQ ID NO. 2522: optimized genes corresponding to the native genes in SEQ ID NO. 1 to SEQ ID NO. 180, the corresponding native gene is selected from the entire set of high-expression genes in Escherichia coli (i.e. SEQ ID NO. 1 to SEQ ID NO. 180) for optimization using “random codon assignment (RCA)” approach.
[0177] SEQ ID NO. 2523 to SEQ ID NO. 2717: optimized genes corresponding to the native genes in SEQ ID NO. 350 to SEQ ID NO. 544, the corresponding native gene is selected from the entire set of high-expression genes in Lactococcus lactis (i.e. SEQ ID NO. 350 to SEQ ID NO. 544) for optimization using “codon context optimization (CCO)” approach in this invention while the rest of the genes are used as the training set.
[0178] SEQ ID NO. 2718 to SEQ ID NO. 2912: optimized genes corresponding to the native genes in SEQ ID NO. 350 to SEQ ID NO. 544, the corresponding native gene is selected from the entire set of high-expression genes in Lactococcus lactis (i.e. SEQ ID NO. 350 to SEQ ID NO. 544) for optimization using “individual codon usage optimization (ICO)” approach in this invention while the rest of the genes are used as the training set.
[0179] SEQ ID NO. 2913 to SEQ ID NO. 3107: optimized genes corresponding to the native genes in SEQ ID NO. 350 to SEQ ID NO. 544, the corresponding native gene is selected from the entire set of high-expression genes in Lactococcus lactis (i.e. SEQ ID NO. 350 to SEQ ID NO. 544) for optimization using “multi-objective codon optimization (MOCO)” approach in this invention while the rest of the genes are used as the training set.
[0180] SEQ ID NO. 3108 to SEQ ID NO. 3302: optimized genes corresponding to the native genes in SEQ ID NO. 350 to SEQ ID NO. 544, the corresponding native gene is selected from the entire set of high-expression genes in Lactococcus lactis (i.e. SEQ ID NO. 350 to SEQ ID NO. 544) for optimization using “random codon assignment (RCA)” approach.
[0181] SEQ ID NO. 3303 to SEQ ID NO. 3553: optimized genes corresponding to the native genes in SEQ ID NO. 752 to SEQ ID NO. 1002, the corresponding native gene is selected from the entire set of high-expression genes in Pichia pastoris (i.e. SEQ ID NO. 752 to SEQ ID NO. 1002) for optimization using “codon context optimization (CCO)” approach in this invention while the rest of the genes are used as the training set.
[0182] SEQ ID NO. 3554 to SEQ ID NO. 3804: optimized genes corresponding to the native genes in SEQ ID NO. 752 to SEQ ID NO. 1002, the corresponding native gene is selected from the entire set of high-expression genes in Pichia pastoris (i.e. SEQ ID NO. 752 to SEQ ID NO. 1002) for optimization using “individual codon usage optimization (ICO)” approach in this invention while the rest of the genes are used as the training set.
[0183] SEQ ID NO. 3805 to SEQ ID NO. 4055: optimized genes corresponding to the native genes in SEQ ID NO. 752 to SEQ ID NO. 1002, the corresponding native gene is selected from the entire set of high-expression genes in Pichia pastoris (i.e. SEQ ID NO. 752 to SEQ ID NO. 1002) for optimization using “multi-objective codon optimization (MOCO)” approach in this invention while the rest of the genes are used as the training set.
[0184] SEQ ID NO. 4056 to SEQ ID NO. 4306: optimized genes corresponding to the native genes in SEQ ID NO. 752 to SEQ ID NO. 1002, the corresponding native gene is selected from the entire set of high-expression genes in Pichia pastoris (i.e. SEQ ID NO. 752 to SEQ ID NO. 1002) for optimization using “random codon assignment (RCA)” approach.
[0185] SEQ ID NO. 4307 to SEQ ID NO. 4581: optimized genes corresponding to the native genes in SEQ ID NO. 1254 to SEQ ID NO. 1528, the corresponding native gene is selected from the entire set of high-expression genes in Saccharomyces cerevisiae (i.e. SEQ ID NO. 1254 to SEQ ID NO. 1528) for optimization using “codon context optimization (CCO)” approach in this invention while the rest of the genes are used as the training set.
[0186] SEQ ID NO. 4582 to SEQ ID NO. 4856: optimized genes corresponding to the native genes in SEQ ID NO. 1254 to SEQ ID NO. 1528, the corresponding native gene is selected from the entire set of high-expression genes in Saccharomyces cerevisiae (i.e. SEQ ID NO. 1254 to SEQ ID NO. 1528) for optimization using “individual codon usage optimization (ICO)” approach in this invention while the rest of the genes are used as the training set.
[0187] SEQ ID NO. 4857 to SEQ ID NO. 5131: optimized genes corresponding to the native genes in SEQ ID NO. 1254 to SEQ ID NO. 1528, the corresponding native gene is selected from the entire set of high-expression genes in Saccharomyces cerevisiae (i.e. SEQ ID NO. 1254 to SEQ ID NO. 1528) for optimization using “multi-objective codon optimization (MOCO)” approach in this invention while the rest of the genes are used as the training set.
[0188] SEQ ID NO. 5132 to SEQ ID NO. 5406: optimized genes corresponding to the native genes in SEQ ID NO. 1254 to SEQ ID NO. 1528, the corresponding native gene is selected from the entire set of high-expression genes in Saccharomyces cerevisiae (i.e. SEQ ID NO. 1254 to SEQ ID NO. 1528) for optimization using “random codon assignment (RCA)” approach.
[0189] SEQ ID NO. 5407: native IFN-γ genes.
[0190] SEQ ID NO. 5408: codon context optimized (CCO) coding sequences using the protein sequence of human IFN-γ as the input for the codon optimization algorithms with respect to the highly-expressed genes of Chinese hamster ovary (CHO) cells.
[0191] SEQ ID NO. 5409: codon context optimized (CCO) coding sequences using the protein sequence of human IFN-γ as the input for the codon optimization algorithms with respect to the lowly-expressed genes of Chinese hamster ovary (CHO) cells.
[0192] SEQ ID NO. 5410: codon context optimized (CCO) coding sequences using the protein sequence of human IFN-γ as the input for the codon optimization algorithms with respect to the moderately-expressed genes of Chinese hamster ovary (CHO) cells.
[0193] SEQ ID NO. 5411: Individual codon usage optimized (ICO) coding sequences using the protein sequence of human IFN-γ as the input for the codon optimization algorithms with respect to the highly-expressed genes of Chinese hamster ovary (CHO) cells.
[0194] SEQ ID NO. 5412: Individual codon usage optimized (ICO) coding sequences using the protein sequence of human IFN-γ as the input for the codon optimization algorithms with respect to the lowly-expressed genes of Chinese hamster ovary (CHO) cells.
[0195] SEQ ID NO. 5413: Individual codon usage optimized (ICO) coding sequences using the protein sequence of human IFN-γ as the input for the codon optimization algorithms with respect to the moderately-expressed genes of Chinese hamster ovary (CHO) cells.
[0196] SEQ ID NO. 5414 to SEQ ID NO. 5417: coding sequences with different minor mutation to SEQ ID NO. 5411.

TABLE 5
Tournament matrix

| | ICO | CCO | MOCO |
|---|---|---|---|
| ICO | | 3 | 2 |
| CCO | 23 | | 19 |
| MOCO | 25 | 7 | |

[0197] Each cell indicates the number of wins by the method in the leftmost column over a total of 27 tournaments. Whenever the numbers of wins and losses (i.e. cells diagonally opposite of each other) do not sum up to 27, the shortfall will be equal to the number of draws.

### Example 3

### Enhanced Expression of Codon Optimized Interferon Gamma in CHO Cells

[0198] The human interferon-gamma (IFN-γ) is a potential drug candidate for treating various diseases due to its immunomodulatory properties. The efficient production of this protein can be achieved through a popular industrial host, Chinese hamster ovary (CHO) cells. However, recombinant expression of foreign proteins is typically suboptimal possibly due to the usage of non-native codon patterns within the coding sequence. Therefore, the application of the developed codon optimization approach in the present disclosure to design synthetic IFN-γ coding sequences for enhanced heterologous expression in CHO cells is demonstrated in the present example. For codon optimization, earlier studies suggested to establish the target usage distribution pattern in terms of selected design parameters such as individual codon usage (ICU) and codon context (CC), mainly based on the host's highly expressed genes. However, the RNA-Seq based transcriptome profiling indicated that the ICU and CC distribution patterns of different gene expression classes in CHO cell are relatively similar, unlike other microbial expression hosts, E. coli and S. cerevisiae. This finding was further corroborated through the in vivo expression of various ICU and CC optimized IFN-γ in CHO cells. Interestingly, the CC-optimized genes exhibited at least 13-fold increase in expression level compared to the wild-type IFN-γ while a maximum of 10-fold increase was observed for the ICU-optimized genes. Although design criteria based on individual codons, such as ICU, have been widely used for gene optimization, the results in the present example suggested that codon context is relatively more effective parameter for improving recombinant IFN-γ expression in CHO cells.

[0199] Interferon-gamma (IFN-γ) is a cytokine with diverse roles in the regulation of innate and adaptive immunity. It has been explored as an immunomodulatory drug for the clinical application due to its pleiotropic effects on the immune system. In addition, IFN-γ has been studied as a potential drug candidate for treating many diseases such as cancer, hepatitis and tuberculosis. Notably, a bioengineered form of IFN-γ, known as IFN-γ-1b or Actimmune, has been licensed by Intermune and approved by FDA for the treatment of chronic granulomatous disease and severe malignant osteopetrosis. Although Actimmune has been commercially produced in the unglycosylated form using the Escherichia coli expression host, the glycosylation of IFN-γ was experimentally shown to exhibit higher protease resistance allowing the protein to remain in the bloodstream for a longer period of time. Indeed, the production of IFN-γ using a mammalian expression host can potentially improve the drug's therapeutic efficacy through human-like glycosylation of the protein. Thus, developing technologies for efficient recombinant production of glycoproteins in mammalian cell lines, especially the industrially relevant Chinese hamster ovary (CHO) cells, is an important area of biotechnology research.

[0200] However, the bottleneck at protein translation has been recognized as an important issue in the design of heterologous gene for recombinant expression. The poor translation of heterologous protein may be due to the difference in codon usage bias between the expression host and recombinant gene. As a result of random mutation and selection pressure, different organisms may have evolved to utilize the synonymous codons with disparate frequencies. Accordingly, when attempting to express a foreign gene (e.g. human IFN-γ) in a particular host organism (e.g. CHO cell), the differences in codon bias can hinder the protein translation process in a manner whereby the host is unable to efficiently translate the rare codons that may occur frequently in the recombinant gene. As such, coding sequence re-design via codon optimization has been practically employed to adapt the foreign gene for efficient heterologous expression. Previous studies have demonstrated that the correlation between expression level and codon usage patterns implicates the existence of an optimal codon bias for achieving high protein expression. The coding sequences of highly expressed genes, which were reported to exhibit a distinct codon usage bias or distribution pattern compared to the other genes, are selectively used to calculate this “preferred” codon usage as a reference for codon optimization in microbial cells. In this respect, it is relevant to examine if such distinct codon biases are also observed among high-, moderate- and low-expression genes in CHO cells. To do so, the RNA-Seq based transcriptome data of CHO cells has been profiled to examine the relationship between codon distribution patterns and gene expressivity.

[0201] It is recognized that recombinant protein expression can be collectively affected by several factors such as transcriptional regulation, mRNA stability and translation initiation. In the present example, it is assumed that the only determinant of natural protein expression levels is translational elongation as determined by codon choice. Although the codon adaptation index (CAI) has been considered to characterize codon usage bias, optimizing CAI to obtain a “one amino acid-one codon” design may not improve heterologous expression. This is presumably due to the rapid depletion of certain tRNA species, potentially leading to tRNA pool imbalance and increased translational error. To avoid these problems, a computational algorithm is used to perform codon optimization of IFN-γ genes on the basis of two design parameters, individual codon usage (ICU) and codon pair usage, also known as codon context (CC). In synthetic gene design, there is a trade-off between ICU and CC fitness as shown in the present disclosure. Therefore, the relative importance of ICU and CC fitness of IFN-γ synthetic genes for expression in CHO cells is examined.

3.1 Material and methods

### 3.1.1 Calculation of Codon Distributions

[0202] The ICU distribution refers to a vector of occurrence frequency values for all the 64 codons. Each codon frequency can be calculated using the following expression:

$${p}^{k} = \frac{{θ}_{C}^{k}}{{θ}_{A}^{j ( k )}} ∀ k ∈ \{ 1 , 2 , … , 64 \}$$

where p^{k} is the frequency of codon k calculated as the total number of occurrences of codon k, θ_{C}^{k}, divided by the total number occurrences of amino acid j that is encoded by codon k, denoted as θ_{A}^{j(k)}. Since amino acid j can be encoded by two or more codons, the range of codon frequency is 0≦p^{k}≦1. Similarly, the codon pair frequency for the 3,904 possible combinations of codon pairs can be computed as follows:

$${q}^{k} = \frac{{θ}_{CC}^{k}}{{θ}_{AA}^{j ( k )}} ∀ k ∈ \{ 1 , 2 , … , 3904 \}$$

[0203] For codon pair frequency, k and j(k) denote codon pair and the corresponding amino acid, respectively. The resulting vectors p=(p¹, p¹, . . . , p⁶⁴)^{T} and q=(q¹, q², . . . , q³⁹⁰⁴)^{T} indicate the ICU and CC distributions respectively. Apart from CHO, the vectors p and q are also calculated for other species including E. coli and S. cerevisiae to examine the differences in codon usage bias for various organisms. Principal component analysis (PCA) are performed on the p and q vectors to illustrate the differences in ICU and CC distributions for all the genes in the phylogenetically distinct expression hosts.

### 3.1.2 Coding Sequence Design by Codon Optimization

[0204] The codon optimized sequences can be designed by maximizing the ICU and CC fitness values, which are evaluated as follows:

$$ICU fitness \text{:} {Ψ}_{ICU} = - \frac{{\sum }_{{k}_{1} = 1}^{64} \vert {p}_{0}^{{k}_{1}} - {p}_{1}^{{k}_{1}} \vert}{64}$$

$$CC fitness \text{:} {Ψ}_{CC} = - \frac{{\sum }_{{k}_{2} = 1}^{3904} \vert {q}_{0}^{{k}_{2}} - {q}_{1}^{{k}_{2}} \vert}{3904}$$

[0205] In the above expressions, fitness values are formulated as the negative of the Manhattan distance of the ICU and CC distributions between the host (subscript 0) and the recombinant gene (subscript 1) normalized with the total number of codon and codon pair combinations. By computationally maximizing the above objective functions, coding sequences that are ICU- and CC-optimized can be generated. Due to the discrete and nonlinear nature of the CC optimization problem, complex nonlinear optimization algorithms are required to obtain a solution. In order to get a reasonably good solution for CC optimization within a moderate amount of computational time, the naturally inspired metaheuristic method of genetic algorithm has been used. On the other hand, the ICU optimization problem can be solved by assigning relevant codons to the coding sequence according to the optimal ICU distribution. The computational implementation of ICU and CC optimization has been shown in the present disclosure.

### 3.1.3 Characterization of CHO Gene Expression Using RNA-Seq

[0206] Suspension-adapted CHO K1 cells were grown in protein-free media comprising of 50% HyQ PF-CHO (HyClone) and 50% CD CHO (Life Technologies, Carlsbad, Calif.), supplemented with 1 g/L sodium bicarbonate, 6 mM L-glutamine and 0.05% Pluronic F-68 (Invitrogen). The cells were grown at 37° C. in 8% CO₂, subcultured every 3-4 days and harvested during the exponential phase. Total RNA was isolated using Trizol reagent (Invitrogen) and quantified using Nanodrop ND-2000 (Thermo Scientific). RNA quality was assessed using the Agilent 2100 Bioanalyzer. RNA-Seq sequencing was performed using pair-end Illumina sequencing. More than 9 Gbp of sequences was generated for this sample. A custom software pipeline was used to remove low quality reads before gene expression analysis was performed. Annotations of genes for the reference CHO-K1 genome were obtained from http://www.ncbi.nlm.nih.gov/Taxonomy/Browser/wwwtax.cgi?id=10029. Only those genes that were present in the reference annotation were considered for gene expression analysis. The Cufflinks software package was used to calculate absolute gene expression for genes expressed in the CHO-K1 sample.

### 3.1.4 Plasmid Construction

[0207] Genes encoding the wild type (WT) and codon optimized IFN-γ were synthesized by GenScript (Piscataway, N.J.). They were inserted into the pcDNA3.1 (+) vector (Life Technologies) using NotI and XhoI sites. Restriction enzymes for NotI and XhoI were purchased from New England Biolabs (Ipswitch, Mass., USA).

### 3.1.5 Transient Expression of IFN-γ in CHO Cells

[0208] The expression level of WT and codon optimized IFN-γ sequences were compared in transient transfections in adherent CHO K1 cells (ATCC, VA). CHO K1 cells were routinely maintained in the Dulbecco's modified Eagle's medium (DMEM)+GlutaMax™ (Life Technologies) supplemented with 10% fetal bovine serum (Sigma, St. Louis, Mo.). Transient transfections were carried out using Fugene 6 transfection reagent (Roche, Ind.) in 6-well tissue culture plates (NUNC™, Nalge Nunc International, Roskilde, Denmark). One day prior to transfection, 2 mL of exponentially growing cells at a cell density of 3×105 cells/mL were seeded into each well of the 6-well plates. Each culture was co-transfected with 2.0 μg of the appropriate IFN-γ vector and 0.2 μg of a pMax-GFP vector (Lonza) by using 6 μL of Fugene 6. Co-transfection of the pMax-GFP vector expressing green fluorescence protein (GFP) was to normalize the transfection efficiency. Transfection of each plasmid was done in duplicates and repeated once by using independently prepared plasmids and cultures. At 48 hour post-transfection, supernatant from 6-well plate cultures was collected and analyzed for IFN-γ concentration using an Enzyme-linked immunosorbent assay (ELISA) kit (Hycult Biotechnology, Uden, Netherlands). In parallel, the cell pellet was also collected for analysis of GFP expression using a FACS Calibur (Becton Dickinson, Mass.). The expression levels of optimized IFN-γ were presented as the IFN-γ concentration normalized with respect to the GFP expression and relative to the control, WT IFN-γ.

### 3.2 Results & Discussion

### 3.2.1 RNA-Seq-Based Gene Expression Profiling in CHO Cells

[0209] Prior to implementing the codon optimization, the desirable reference codon usage patterns for CHO cells needs to established first. In earlier studies, highly expressed genes were typically used to calculate the reference codon patterns as they have been reported to exhibit a distinct codon usage bias compared to the other genes. Furthermore, the correlation between expression level and the use of selective codons implicates the existence of an optimal codon usage for achieving high protein expression, which is based on the codon patterns of the host's highly expressed genes. In this aspect, the analysis of genomic and transcriptomic data can help to elucidate the codon patterns of highly expressed genes. Moreover, to directly assess translational efficiency, translatome and proteome profiling will also be relevant to measure the degree of ribosome association to mRNA and the concentration of proteins. Interestingly, earlier CHO codon optimization studies only considered the codon usage of highly expressed genes from human and yeast as the reference for codon optimization of recombinant genes in CHO cells. Although not explicitly clarified, the reason for not using the more relevant highly expressed CHO genes is most likely due to the unavailability of CHO genomic and transcriptomic data at that time.

[0210] Incidentally, the CHO genome sequence was recently published. Following the genome sequencing, the transcriptome of CHO can now be characterized through either microarray or RNA-Seq experiments. Therefore, in the present example, the CHO genomic and transcriptomic data is used as the basis for calculating the reference codon patterns for codon optimization. For transcriptome analysis, the expression levels of CHO genes using RNA-Seq has been profiled rather than microarray experiments because the former has been reported to provide better estimates of absolute transcript levels than the latter method. The sequencing was performed on a parental untransfected CHO-K1 cell line and a list of gene expression values was obtained using the Cufflinks software. Out of the approximately 25,000 genes present in the CHO-K1 annotation the inventors were able to detect expression of 10,067 genes. Based on the RNA-Seq reads, the CHO genes can be sorted in a descending order such that the gene with highest transcript abundance are placed at the top and the lowest at the bottom. Classifying the sorted list of CHO genes into highly-expressed (H), moderately-expressed (M) and lowly-expressed (L) genes is followed by establishing the reference codon distribution patterns for subsequent codon optimization. In the present example, the H and L genes constitute the top 10% and bottom 10% of the sorted list respectively while the rest of the genes is considered M genes.

### 3.2.2 Comparison of Codon Distributions

[0211] Many of the earlier studies selected the codon patterns of high-expression genes, instead of all the host's native genes, as the reference for codon optimization: the codon usage bias of high-expression genes has been shown to be different from low-expression genes in various organisms. Nonetheless, this step of selecting high-expression genes to identify preferred codon patterns may not be necessary if the codon usage bias is similar for all genes. In order to explore this hypothesis in CHO cells, the codon patterns of H, M and L genes were quantified and compared using the ICU and CC distribution calculations. Since ICU and CC distributions are vectors with high dimensions of 64 and 3904, the principal component analysis (PCA) method was used to visualize their differences. Since PCA is a statistical method that can capture the largest possible variance among the multidimensional variables and map them into a lower dimensional space for easy visualization, the variation in ICU and CC distributions of the different expression genes can be illustrated on a two-dimensional plot. In the present example, the ICU and CC distributions of H, M and L genes in CHO cells were compared with those in well-studied microbial expression hosts, E. coli and S. cerevisiae to evaluate the differences in codon usage bias among different genes (FIGS. 8 and 9). The PCA plots show that the degree of overlap between H and L genes was the greatest for CHO, followed by S. cerevisiae and E. coli, indicating that the differences in codon usage bias between H and L genes were more significant in the S. cerevisiae and E. coli. The average ICU and CC distributions of the H, M and L genes for all the expression hosts were also calculated and analyzed. The resultant PCA plot clearly illustrated the differences in codon usage patterns among the different classes of genes for three expression hosts (FIGS. 8 and 9). Interestingly, the H, M and L genes of CHO were found to exhibit rather similar ICU and CC profiles, indicated by their close proximities on the plot, in contrast to the genes from E. coli and S. cerevisiae. This suggests that using the ICU and CC distributions of either H, M or L genes as the reference for codon optimization in CHO cells will most likely give rise to genes with similar in vivo expression capabilities. To ascertain the validity of this hypothesis, ICU and CC optimization was applied using these different codon distributions as references to design the human IFN-γ synthetic genes for heterologous expression in CHO.

### 3.2.3 Expression of Codon Optimized IFN-γ

[0212] The expression of CC optimized interferon genes in Chinese hamster ovary (CHO) cells, indicating that sequences designed by CCO are likely to be exhibit high protein expression levels.

[0213] The wild-type interferon (WT IFN) and CC optimized Interferon γ (Opti IFN) were compared for expression level in transient transfections in CHO K1 cells (ATCC, VA). CHO K1 cells were routinely maintained in the Dulbecco's modified Eagle's medium (DMEM)+GlutaMax™ (Invitrogen, Carlsbad, Calif.) supplemented with 10% fetal bovine serum (Sigma, St. Louis, Mo.). The WT IFN and Opti IFN cDNAs were inserted into pcDNA3.1(+) vector (Invitrogen, Carlsbad, Calif.) using NotI and XhoI sites. The Opti IFN cDNA was synthesized by GeneScript (Vendor). Transient transfections were carried out using Fugene 6 transfection reagent (Roche, Ind.) in 6-well tissue culture plates (NUNC™, Nalge Nunc International, Roskilde, Denmark). One day prior to transfection, 2 mL of exponentially growing cells at a cell density of 3×10⁵ cells/mL were seeded into each well of the 6-well plates. Each culture was co-transfected with 2.0 μg of the appropriate IFN vector and 0.2 μg of a pMax-GFP vector (Lonza) by using 6 μL of Fugene 6. Co-transfection of the pMax-GFP vector expressing green fluorescence protein (GFP) was to normalize the transfection efficiency. Transfection of each plasmid was done in duplicates and repeated once by using independently prepared plasmids and cultures. At 48 hour post-transfection, supernatant from 6-well plate cultures was collected and analyzed for IFN concentration using an ELISA kit (Hycult Biotechnology, Uden, Netherlands). In parallel, the cell pellet was also collected for analysis of GFP expression using FACS. The expression level of Opti IFN and WT IFN, presented as the IFN concentration normalized to the GFP expression (FIG. 10), clearly shows about six-fold improvement in heterologous expression as a consequence of CC optimization.

[0214] The protein sequence of human IFN-γ was used as the input for the codon optimization algorithms where various codon distributions calculated from the previous section were set as the target reference to obtain the ICU-optimized (IFN_ICO) and CC-optimized (IFN_CCO) coding sequences. The IFN-γ synthetic genes were labeled as “IFN_ICO_H” (or “IFN_CCO_H”), “IFN_ICO_M” (or “IFN_CCO_M”) or “IFN_ICO_L” (or “IFN_CCO_L”) depending on whether they were ICU-optimized (or CCO-optimized) with respect to the H, M or L genes respectively. The nucleotide sequences of these genes can be found in the sequence list 9 and FIGS. 11A-11C. Then, the codon optimized synthetic genes and wild-type IFN-γ genes were expressed transiently in CHO cells. In order to investigate the effects of using H, M or L genes as the reference for codon optimization, the expression activity of the recombinant human IFN-γ synthesized by the various genes were compared. Remarkably, results from ELISA showed that the CC optimized genes (IFN_CCO) produced the best performance with at least 13-fold improvement in protein expression compared to wild-type (IFN_WT) (FIGS. 11A-11C). The differences in expression level among the CC optimized genes are comparable. This corroborates the similar codon patterns of the H, M and L genes, indicating that the selection of H genes to establish the reference codon usage pattern is not necessary applicable to CHO cells. The IFN_ICO_M and IFN_ICO_L genes also showed improved protein expression on an average of 9-fold higher than IFN_WT (FIGS. 11A-11C). Surprisingly, the protein expression of IFN_ICO_H was lower than IFN_WT even though its sequence properties are very similar to those for IFN_ICO_M and IFN_ICO_L (Table 6). It is also found that even after single nucleotide mutations the expression level of the IFN_ICO_H gene still remains low, indicating that the expression of IFN_ICO_H is not sensitive to minor alterations of the coding sequence (see sequence list 10). This anomaly of IFN_ICO_H's in vivo expression can be understood by examining the potential ICU optimized sequence candidates. FIGS. 12A and 12B suggests two possible candidates sharing the same optimal ICU fitness via the interchange of synonymous codons within the sequence. For the entire IFN-γ sequence, there can be more than 100 optimal ICU fitness candidates, of which current IFN_ICO_H may contain undesirable codon context, thus significantly hindering recombinant expression. As such, the IFN_ICO_M and IFN_ICO_L sequences could coincidentally be one of the better ICU optimal sequences while IFN_ICO_H remains poorer recombinant expression. This clearly highlights the major disadvantage of using individual codon-based design parameters such as ICU fitness and CAI.

### Sequence Properties

[0215] The fitness and CAI values are calculated using the respective classes of genes as the reference for the host's ICU and CC distributions.

TABLE 6
Sequence properties

| | | ICU | CC | | G + |
|---|---|---|---|---|---|
| Gene | Reference | fitness | fitness | CAI | C (%) |
| IFNG_WT | H | −0.173 | −0.151 | 0.762 | 38.7 |
| | M | −0.177 | −0.151 | 0.754 | |
| | L | −0.189 | −0.151 | 0.670 | |
| IFNG_ICO_H | H | −0.059 | −0.148 | 0.825 | 43.3 |
| IFNG_ICO_M | M | −0.054 | −0.149 | 0.809 | 43.1 |
| IFNG_ICO_L | L | −0.064 | −0.144 | 0.769 | 45.3 |
| IFNG_CCO_H | H | −0.193 | −0.129 | 0.949 | 48.7 |
| IFNG_CCO_M | M | −0.185 | −0.129 | 0.941 | 49.3 |
| IFNG_CCO_L | L | −0.177 | −0.123 | 0.911 | 51.1 |

### 3.3 Conclusions

[0216] A practical application of gene optimization to enhance the expression of IFN-γ, a potential immunomodulatory drug, in CHO cells which are widely used in the biopharmaceutical industry for producing therapeutic proteins has been demonstrated in this example. Through the computation of ICU and CC distributions, it is found that the highly, moderately and lowly expressed genes in CHO cells exhibit similar codon usage patterns, unlike the E. coli and S. cerevisiae microbial hosts. This finding was further confirmed by experimental expression of IFN-γ genes optimized with three different classes of genes based on CC fitness. In general, CC-optimized genes exhibit the highest expression levels of at least 13-fold higher than the wild-type IFN-γ, while ICU-optimized genes can only achieve a maximum of 10-fold improvement. Interestingly, one of the ICU-optimized genes had even lower expression than the wild-type IFN-γ, highlighting the drawback of the ICU optimization approach as well as the advantage of using CC fitness as the primary design criterion. Of several factors affecting heterologous protein expression, the recoding of DNA sequence through CC optimization may presumably remove RNA cleavage sites and/or improve mRNA stability, thus giving rise to enhanced recombinant protein expression. Hence, further refinement of the codon optimization technique based on CC fitness can lead to better gene design strategies for efficient heterologous protein expression, which is especially relevant to the field of synthetic biology.

### Normalized Expression of IFN_ICO_H Variants

[0217] The entire experiment is repeated together with the IFN_ICO_H variants. Similar to the experiment presented in the present disclosure, the expression levels were normalized with respect to the wild-type IFN-gamma.

TABLE 7
Normalized expression of IFN_ICO_H variants

| Gene | Normalized expression | Standard deviation |
|---|---|---|
| IFNG_WT | 1.000 | 0.241 |
| IFNG_CCO_H | 14.418 | 0.457 |
| IFNG_CCO_M | 12.032 | 0.849 |
| IFNG_CCO_L | 14.515 | 1.021 |
| IFNG_ICO_H | 0.407 | 0.177 |
| IFNG_ICO_H_v1 | 0.466 | 0.068 |
| IFNG_ICO_H_v2 | 0.646 | 0.000 |
| IFNG_ICO_H_v3 | 0.529 | 0.038 |
| IFNG_ICO_H_v4 | 0.435 | 0.028 |
| IFNG_ICO_M | 9.064 | 1.876 |
| IFNG_ICO_L | 12.323 | 0.085 |

### Example 4

### Comparison of Relative Importance of Codon Usage and Codon-Pair Context as Gene Design Parameters for Improving Protein Expression in Pichia pastoris

[0218] Codon optimization has been considered as an effective strategy to improve the levels of heterologous protein production in organisms. Two important parameters (individual codon usage (ICU) and codon-pair context (CC)) have been proposed as design parameters for codon optimization. In the present example, the relative importance of ICU and CC toward designing gene sequences for codon optimization was investigated, using Saccharomyces cerevisiae-derived mating factor α prepro-leader sequence (MFLS) as a model system.

[0219] Three variant MFLSs were designed with respect to ICU and CC distribution of the highly expressed genes found in Pichia pastoris: MFLS_{ICO} for ICU-optimum, MFLS_{CCO} for CC-optimum and MFLS_{MOCO} for both ICU-/CC-optimum. The effects of three variants on secretory production of Candida antarctica-derived lipase B (CalB) as reporter from P. pastoris were compared. All codon-optimized MFLS variants markedly improved secretory production of CalB as a reporter in P. pastoris, compared with the wild-type MFLS. However, MFLS_{CCO} improved the secretary production of CalB in P. pastoris to 1.7-fold that of MFLS_{ICO}.

[0220] These results could indicate that CC fitness may be a more relevant design parameter for optimizing the sequence for improvement of heterologous protein expression than ICU fitness, which has been adopted as a key element of the conventional practice for codon optimization.

[0221] Codon preferences in organisms have been generally acknowledged to reflect a balance between the action of mutation, selection, and gentry drift for translational optimization. It has been demonstrated that codon usage correlates to gene expression level, especially in fast-growing microorganisms. Consequently, codon optimization has been considered as an effective strategy to improve the levels of heterologous protein production in organisms.

[0222] Two typical gene primary structure features have been proposed as design parameters for codon optimization: the first one is the individual codon usage (ICU) bias, which refers to the difference in the frequency of occurrence of synonymous codons in individual genes, and the second one is the codon-pair context (CC) bias, which implicates some rules for organizing neighboring codons as a result of potential tRNA-tRNA steric interactions within the ribosomes. An ICU-based codon optimization (ICO) algorithm has been implemented in many of the sequence design software tools, such as Codon optimizer, Gene Designer and OPTIMIZER. ICO has been applied to the codon optimization of numerous genes, leading to enhanced protein expression levels in many cases. It has also been demonstrated in synthetic attenuated virus engineering that the manipulation of CC bias affects the translation elongation rate such that the usage of rare codon pairs decreased protein translation rates. This suggests that CC-based codon optimization (CCO) can be a promising approach to design synthetic genes for recombinant expression.

[0223] A multi-objective codon optimization (MOCO) method which simultaneously considers both ICU and CC is introduced in the present disclosure. The relative importance of ICO, CCO, and MOCO strategies is evaluated in enhancing protein expression in four different microbial hosts: Escherichia coli, Lactobacillus lactis, Pichia pastoris and Saccharomyces cerevisiae, using novel computational procedures. The in silico validation of the optimized genes suggested that CC is a more relevant design criterion than ICU, contrary to much speculation. Furthermore, the consideration of ICU in addition to CC is detrimental to the sequence design, since the MOCO sequence has a lower performance than the CCO sequence.

[0224] In the present example, to experimentally investigate the relative importance of ICU and CC towards designing sequences for improved protein expression, Saccharomyces cerevisiae-derived mating factor α prepro-leader sequence (MFLS), widely used for secretion of correctly folded heterologous proteins to the fermentation medium in yeast species, was codon-optimized by Pichia pastoris-preferred ICU, CC and MOCO strategies. The effects of the three variants on secretory heterologous protein expression from P. pastoris were then compared.

### 4.1 Three Alternative Strategies for Codon Optimization of MFLS

[0225] To compare the relative importance of ICU and CC towards gene design for improving protein expression, S. cerevisiae-derived mating factor α prepro-leader sequence (MFLS) was chosen as a model system. Three alternative strategies for codon optimization were applied to P. pastoris, designing MFLS by three computational procedures: the individual codon usage optimization (ICO) method for ICU-optimal sequence; the codon context optimization (CCO) method for CC-optimal sequence; and the multi-objective codon optimization (MOCO) method for ICU-/CC-optimal sequence. The ICU and CC were optimized with respect to the ICU and CC distribution of the highly expressed genes found in P. pastoris expression host.

### 4.2 Codon-Optimized Sequences of MFLS

[0226] Among sequences in the pareto optimum front generated by the strategies applied in the present example, the MFLS_{ICO} sequence has the best ICU fitness, but the worst CC fitness; the MFLS_{MOCO} sequence has median ICU fitness and median CC fitness; the MFLS_{CCO} has the best CC fitness but has the worst ICU fitness (FIG. 15). A comparison of the codon usage patterns of the wild-type and three codon-optimized MFLS variants are shown in FIG. 16.

### 4.3 Comparison of Effects of Codon-Optimized MFLS on Protein Expression Level

[0227] To examine the effect of the applied codon optimization strategies on protein expression in P. pastoris, wild-type and three codon-optimized MFLS variants were fused to the N-terminus of CalB as a reporter, and were placed under the control of the constitutive P_{TEF}. Each constructed expression vector was transformed into P. pastoris GS115 and the lipase activities in the culture supernatant of two corresponding transformants were then analyzed. As shown in Table 8, all codon-optimized MFLS variants markedly improved the secretory production of CalB from P. pastoris compared to that of the wild-type MFLS (MFLS_{WT}). However, MFLS_{CCO} increased the secretory production of CalB by 3.95-fold, while MFLS_{CCO} increased it by 2.32-fold, as the lowest observed increase of any variant. These results suggest that sequences with higher CC fitness are more likely to exhibit higher in vivo expression than sequences with higher ICU fitness.

TABLE 8
Comparison of secreted lipase activity of the variants of MFLS

| | Cell density¹ | CalB activity² | Normalized |
|---|---|---|---|
| Sequence | (A600) | (U/mL) | activity (%) |
| Wild-type | 12.2 ± 0.4 | 3.03 ± 0.20 | 100 |
| MFLS_{ICO} | 11.9 ± 0.5 | 7.02 ± 1.08 | 232 |
| MFLS_{MOCO} | 12.4 ± 0.2 | 10.33 ± 0.20 | 341 |
| MFLS_{CCO} | 11.9 ± 0.3 | 11.97 ± 0.09 | 395 |

^{1,2}Cell density and CalB activity were measured at the end of culture (48 h).

[0228] At the mRNA translation level, ICU and CC are expected to be under selective pressure, because it has been demonstrated that they affect mRNA decoding speed and accuracy. However, there have been no studies which compare the relative importance of ICU and CC as the gene design parameter for codon optimization, used to achieve optimum expression of a foreign gene based on the specific nature of the host system, although it is evaluated through in silico validation of highly expressed genes in four microbial hosts with novel computational procedures. Nevertheless, ICU has been considered to be a key parameter of the conventional practice for codon optimization of many heterologous genes. In the present example, to experimentally investigate their relative importance, MFLS genes are chosen as a model due to their wide use as signal sequences for protein secretion in heterologous yeast species, as well as the suspected improved secretory production of heterologous proteins due to its codon-optimization.

[0229] Three variants were designed and synthesized to evaluate the effect of three gene design strategies (ICO, CCO and MOCO) on the secretory production of a heterologous protein in P. pastoris. In all cases, the sequences created using three codon optimization strategies provided significantly more protein than the non-optimized sequence. However, the comparison of three codon-optimized strategies on the protein expression level demonstrated that CCO produced a 1.7-fold greater increase in protein expression than ICO. Also, it was observed that consideration of both ICU and CC fitness did not synergistically improve the protein expression levels. To further examine the correlation between various coding sequence properties and gene expressivity, the G+C content, codon adaptation index (CAI) and mRNA folding energy is also evaluated. G+C contents showed almost the same values in three variants (43.92% for MFLS_{CCO} and 44.71% for MFLS_{ICO} and MFLS_{MOCO}). CAI values have been considered as a design parameter for codon optimization in earlier studies. Although a positive relationship between CAI and gene expressivity can be observed for MFLS_{CCO}, MFLS_{ICO} and MFLS_{MOCO}, this correlation fails when considering the CAI of wild-type MFLS which is similar to that of MFLS_{MOCO} (FIGS. 17A and 17B). The mRNA folding energy predicted by the mfold web server indicated that the potential secondary structures of the codon optimized sequences are more stable that the wild-type MFLS (FIG. 17D). This suggests that the inhibition of translation attributed to more stable mRNA secondary structures may be negligible in these gene variants. Therefore, only CC fitness in MFLS variants correlated well to gene expressivity (FIGS. 17A-17D). These results are consistent with previous in silico validation, through implementation of ICO and CCO with high-expression genes of four microbial hosts. Thus, the present example supports the previous suggestion, that contrary to the conventional practice which adopts ICU optimization as a key element of gene design, CC fitness is a more relevant design parameter for optimizing sequences for improvement of heterologous protein expression.

[0230] Additionally, it should be noted that, codon optimized signal peptides can enhance the overall expression of heterologous protein in P. pastoris several-fold. It is thought that the MFLS_{CCO} designed in the present example will be useful in the secretory production of heterologous proteins in P. pastoris. Furthermore, the present example provides valuable information towards the understanding of the mode of translational selection of protein coding genes, as well as gene design for codon optimization.

[0231] Three alternative strategies (ICO, CCO and MOCO) for codon optimization were compared in P. pastoris, using MFLS as a model system. By determining the relative importance of the three strategies using the secretary production of CalB as a reporter, CC fitness was determined to be a more relevant design parameter for optimizing the sequence improvement in heterologous protein expression, than ICU fitness, which has been adopted as a key element in the conventional practice for codon optimization. The present example provides valuable information towards the understanding of the mode of translational selection of protein coding genes, as well as gene design for codon optimization.

### 4.4 Methods

### 4.4.1 Microorganisms

[0232] E. coli DH5α [F⁻, endA1, hsdR17 (r_{K}⁻ m_{K}⁻), supE44, thi-l, λ⁻, recA1, gyrA96, 80d lacZDM15] was used as a host strain for the cloning and maintenance of plasmids. P. pastoris GS115 [his4] (Invitrogen, USA) was used as host strain for secretory heterologous protein expression.

### 4.4.2 Codon Optimization, Gene Synthesis and Cloning

[0233] Three variants of MFLSs were designed with respect to ICU and CC distribution of the highly expressed genes found in Pichia pastoris, using previously presented computational codon optimization program, and they were synthesized by Bioneer corp. (Republic of Korea). To verify and characterize three variant MFLSs, a lipase gene, a variant (CALB14) of lipase B from Candida antarctica (CALB), was used as a reporter. The CALB14 structural gene was previously synthesized according to the preferred codon usage of P. pastoris (data not shown). The wild-type and three codon-optimized MFLSs, the strong constitutive TEF promoter (P_{TEF}) and CALB14 were amplified by PCR with the corresponding templates and primers which are listed in Table 9, respectively. Then, overlapping PCRs were performed to generate a fragment sequentially containing the P_{TEF}, MFLS and CALB14. Each aligned gene was inserted into the SmaI/NotI-digested pPIC9 (Invitrogen, USA) by infusion kit (In-Fusion® Advantage PCR Cloning Kit, Clontech, USA). In each constructed plasmid, the CALB14 structural gene, fused to the MFLS, was placed under the control of P_{TEF}.

TABLE 9
Primers used in the present example

| Target | | |
|---|---|---|
| gene | Primer Sequence (F: forward, R: reverse) | Template |
| P_{TEF} | F: 5′- [symbol] ATAACTGTCGCCTCTTTTATC-3′ | pTEF-AM- |
| | R: 5′-GTAAAGATAGATGGGAATCTCATGTTGGCGAATAACTAAAATG-3′ | CLLip |
| | (for fusion of MFLS_{CCO} and MFLS_{MOCO}) | |
| | 5′-GTAAAGATAGATGGGAATCTCATGTTGGCGAATAACTAAAATG-3′ | |
| | (for fusion of MFLS_{ICU}) | |
| MFLS | F: 5′-CATTTTAGTTATTCGCCAACATGAGATTCCCATCTATCTTTAC-3′ | The MFLSs |
| | (for MFLS_{CCO} and MFLS_{MOCO}), | synthesized in |
| | 5′-CATTTTAGTTATTCGCCAACATGAGATTCCCAAGCATATTTAC-3′ | the present |
| | (for MFLS_{ICU}) | disclosure |
| | R: 5′-GAAAGCTGGGTCGGAACCGGATGGCAATCTCTTGTCCAAAGAAACACC-3′ | |
| CALB14 | F: 5′-GTGTTTCTTTGGACAAGAGATTGCCATCCGGTTCCGACCCAGCTTTC-3′ | pGAL-MFa- |
| | R: 5′-CATGTCTAAGGCGAATTAATTC [symbol] TTATGGAGTAACGATACCGGA- | CALB14 |
| | 3′ | |

4.4.3 Expression of CalB as a Reporter in P. pastoris

[0234] The constructed plasmids were linearized by StuI which digests the sole restriction site present in the HIS4 gene, and the linearized plasmids were integrated into the genome of the P. pastoris GS115 using a lithium chloride transformation method (Invitrogen, USA). Selection of transformants was performed using His⁻ agar plates containing (per liter): 20 g of glycerol, 6.7 g of yeast nitrogen base without amino acids, 0.77 g of His⁻ DO supplement (BD Biosciences, USA), and 20 g of agar. A single colony of each transformant grown on a His⁻ agar plate was inoculated into 10 mL of YPD medium in a 250 ml baffled flask, and was incubated for 14 h at 30° C. Five ml of the culture was transferred to a 500 mL baffled flask containing 100 mL of YPD broth and was incubated overnight at 30° C. for 48 h. The growth of yeast cells was monitored by measuring the optical density at 600 nm (OD₆₀₀) (UVICON930, Switzerland). The lipase activities of the culture supernatants were determined by measuring the release of p-nitrophenol by the action of an enzyme on the substrate p-nitrophenyl palmitate (pNPP). One unit of lipase activity was defined as the amount of enzyme releasing one μmole of p-nitrophenol per min.

### 4.4.4 Calculation of ICU and CC Fitness

[0235] The host's ICU frequency of codon k₁ (p₀^{k}^{₁}) and CC frequency of codon pair k₂ (q₀^{k}^{₂}) are calculated as follows:

$${p}_{0}^{{k}_{1}} = \frac{{θ}_{C , 0}^{{k}_{1}}}{{θ}_{A , 0}^{{j}_{1}}} ∀ {k}_{1} ∈ \{ 1 , 2 , … , 64 \} ; {k}_{1} \to {j}_{1}$$

$${q}_{0}^{{k}_{1}} = \frac{{θ}_{CC , 0}^{{k}_{2}}}{{θ}_{AA , 0}^{{j}_{2}}} ∀ {k}_{2} ∈ \{ 1 , 2 , … , 3904 \} ; {k}_{2} \to {j}_{2}$$

[0236] The symbols θ_{C,0}^{K}^{₁} and θ_{CC,0}^{k}^{₂} refer to the numbers of occurrences of codon k₁ and codon pair k₂, respectively. θ_{A,0}^{j}^{₁} and θ_{AA,0}^{j}^{₂} indicate the number of occurrences of the corresponding amino acid and amino acid pairs encoded by k₁ and k₂, respectively. In the above mathematical expression, k₁→j₁ and k₂→j₂ indicates that codon k₁ codes for amino acid j₁ and codon pair k₂ codes for amino acid pair j₂. The subscript 0 indicates that the frequencies are calculated based on the expression host's wild-type gene sequences. On the other hand, subscript 1 was used to indicate the recombinant gene's frequencies. Based on the above quantification of codon frequencies, the ICU and CC fitness values were computed by taking the normalized Manhattan distance between the host's frequencies (p₀^{k}^{₁} and q₀^{k}^{₂}) and the recombinant gene's frequencies (p₁^{k}^{₁} and q₁^{k}^{₂}) as follows:

$$ICU fitness \text{:} {Ψ}_{ICU} = - \frac{{\sum }_{{k}_{1} = 1}^{64} \vert {p}_{0}^{{k}_{1}} - {p}_{1}^{{k}_{1}} \vert}{64}$$

$$CC fitness \text{:} {Ψ}_{CC} = - \frac{{\sum }_{{k}_{2} = 1}^{3904} \vert {q}_{0}^{{k}_{2}} - {q}_{1}^{{k}_{2}} \vert}{3904}$$

[0237] The multi-objective optimization of ICU and CC fitness was performed using the non-dominated sorting genetic algorithm (NSGA-II). The detailed implementation of the algorithm has been described in an earlier paper.

[0238] While various aspects and embodiments have been disclosed herein, it will be apparent that various other modifications and adaptations of the invention will be apparent to the person skilled in the art after reading the foregoing disclosure without departing from the spirit and scope of the invention and it is intended that all such modifications and adaptations come within the scope of the appended claims. The various aspects and embodiments disclosed herein are for purposes of illustration and are not intended to be limiting, with the true scope and spirit of the invention being indicated by the appended claims.

1. A computer implemented method of optimization of a nucleotide coding sequence coding for a predetermined amino acid sequence, wherein the nucleotide coding sequence is optimized for expression in a predetermined host cell, the method comprising:
automatically generating at least two initial nucleotide coding sequences coding for the predetermined amino acid sequence to form a first population of initial nucleotide coding sequences coding for the predetermined amino acid sequence; and
automatically dividing the first population of initial nucleotide coding sequences.

2. The method of claim 1, further comprising:
automatically determining a fitness value for each of the initial nucleotide coding sequences of the first population using a fitness function that determines codon context fitness for the predetermined host cell.

3. The method claim 2, further comprising:
automatically ranking each of the initial nucleotide coding sequences of the first population according to the fitness value of each of the initial nucleotide coding sequences of the first population.

4. The method of claim 3,
wherein the dividing comprises automatically dividing the first population of initial nucleotide coding sequences according to the fitness value ranking of each of the initial nucleotide coding sequences of the first population, wherein the top fifty percent of the initial nucleotide coding sequences having the highest fitness value ranking are selected as first parent nucleotide coding sequences.

5. The method of claim 4, further comprising:
automatically producing first offspring nucleotide coding sequences via recombination and/or mutation of the first parent nucleotide coding sequences.

6. The method of claim 5, further comprising:
automatically combining the first offspring nucleotide coding sequences and the first parent nucleotide coding sequences to form a second population of nucleotide coding sequences.

7. The method of claim 6, further comprising:
automatically determining a fitness value for each of the nucleotide coding sequences of the second population using a fitness function that determines codon context fitness for the predetermined host cell;
automatically ranking each of the nucleotide coding sequences of the second population according to the fitness value of each of the nucleotide coding sequences of the second population;
automatically dividing the second population of nucleotide coding sequences according to the fitness value ranking of each of the nucleotide coding sequences of the second population, wherein the top fifty percent of the nucleotide coding sequences of the second population having the highest fitness value ranking are selected as a second parent nucleotide coding sequences;
automatically producing second offspring nucleotide coding sequences via recombination and/or mutation of the second parent nucleotide coding sequences; and
automatically combining the second offspring nucleotide coding sequences and the second parent nucleotide coding sequences to form a third population of nucleotide coding sequences.

8. The method of claim 7, wherein the optimization of the nucleotide coding sequence coding for the predetermined amino acid sequence is automatically repeated until a predetermined termination criterion is met.

9. A system comprising:
a processing unit;
a memory unit comprising an optimizing module, wherein the optimizing module comprises a set of program instructions executable by the processing unit;
wherein execution of the set of program instructions causes the processing unit to optimize a nucleotide coding sequence coding for a predetermined amino acid sequence, wherein the nucleotide coding sequence is optimized for expression in a predetermined host cell, the optimization comprising:
automatically generating at least two initial nucleotide coding sequences coding for the predetermined amino acid sequence to form a first population of initial nucleotide coding sequences coding for the predetermined amino acid sequence; and
automatically dividing the first population of initial nucleotide coding sequences.

10. The system of claim 9, wherein the optimization further comprises:
automatically determining a fitness value for each of the initial nucleotide coding sequences of the first population using a fitness function that determines codon context fitness for the predetermined host cell.

11. The system of claim 10, wherein the optimization further comprises:
automatically ranking each of the initial nucleotide coding sequences of the first population according to the fitness value of each of the initial nucleotide coding sequences of the first population.

12. The system of claim 11, wherein the optimization further comprises:
wherein the dividing comprises automatically dividing the first population of initial nucleotide coding sequences according to the fitness value ranking of each of the initial nucleotide coding sequences of the first population, wherein the top fifty percent of the initial nucleotide coding sequences having the highest fitness value ranking are selected as first parent nucleotide coding sequences.

13. The system of claim 12, wherein the optimization further comprises:
automatically producing first offspring nucleotide coding sequences via recombination and/or mutation of the first parent nucleotide coding sequences.

14. The system of claim 13, wherein the optimization further comprises:
automatically combining the first offspring nucleotide coding sequences and the first parent nucleotide coding sequences to form a second population of nucleotide coding sequences.

15. The system of claim 14, wherein the optimization further comprises:
automatically determining a fitness value for each of the nucleotide coding sequences of the second population using a fitness function that determines codon context fitness for the predetermined host cell;
automatically ranking each of the nucleotide coding sequences of the second population according to the fitness value of each of the nucleotide coding sequences of the second population;
automatically dividing the second population of nucleotide coding sequences according to the fitness value ranking of each of the nucleotide coding sequences of the second population, wherein the top fifty percent of the nucleotide coding sequences of the second population having the highest fitness value ranking are selected as a second parent nucleotide coding sequences;
automatically producing second offspring nucleotide coding sequences via recombination and/or mutation of the second parent nucleotide coding sequences; and
automatically combining the second offspring nucleotide coding sequences and the second parent nucleotide coding sequences to form a third population of nucleotide coding sequences.

16. The system of claim 15, wherein the optimization of the nucleotide coding sequence coding for the predetermined amino acid sequence is automatically repeated until a predetermined termination criterion is met.

The application's sequence listing, which the Patent Office published only in electronic form, follows.

SEQUENCE LISTING (5417 sequences)

SEQ ID NO: 1 - DNA, 954 bp, Escherichia coli
atgacggacaaattgacctcccttcgtcagtacaccaccgtagtggccgacactggggacatcgcggcaatgaagctgtatcaaccgcaggatgccacaaccaacccttctctcattcttaacgcagcgcagattccggaataccgtaagttgattgatgatgctgtcgcctgggcgaaacagcagagcaacgatcgcgcgcagcagatcgtggacgcgaccgacaaactggcagtaaatattggtctggaaatcctgaaactggttccgggccgtatctcaactgaagttgatgcgcgtctttcctatgacaccgaagcgtcaattgcgaaagcaaaacgcctgatcaaactctacaacgatgctggtattagcaacgatcgtattctgatcaaactggcttctacctggcagggtatccgtgctgcagaacagctggaaaaagaaggcatcaactgtaacctgaccctgctgttctccttcgctcaggctcgtgcttgtgcggaagcgggcgtgttcctgatctcgccgtttgttggccgtattcttgactggtacaaagcgaataccgataagaaagagtacgctccggcagaagatccgggcgtggtttctgtatctgaaatctaccagtactacaaagagcacggttatgaaaccgtggttatgggcgcaagcttccgtaacatcggcgaaattctggaactggcaggctgcgaccgtctgaccatcgcaccggcactgctgaaagagctggcggagagcgaaggggctatcgaacgtaaactgtcttacaccggcgaagtgaaagcgcgtccggcgcgtatcactgagtccgagttcctgtggcagcacaaccaggatccaatggcagtagataaactggcggaaggtatccgtaagtttgctattgaccaggaaaaactggaaaaaatgatcggcgatctgctgtaa

SEQ ID NO: 2 - DNA, 1917 bp, Escherichia coli
atgggtaaaataattggtatcgacctgggtactaccaactcttgtgtagcgattatggatggcaccactcctcgcgtgctggagaacgccgaaggcgatcgcaccacgccttctatcattgcctatacccaggatggtgaaactctagttggtcagccggctaaacgtcaggcagtgacgaacccgcaaaacactctgtttgcgattaaacgcctgattggtcgccgcttccaggacgaagaagtacagcgtgatgtttccatcatgccgttcaaaattattgctgctgataacggcgacgcatgggtcgaagttaaaggccagaaaatggcaccgccgcagatttctgctgaagtgctgaaaaaaatgaagaaaaccgctgaagattacctgggtgaaccggtaactgaagctgttatcaccgtaccggcatactttaacgatgctcagcgtcaggcaaccaaagacgcaggccgtatcgctggtctggaagtaaaacgtatcatcaacgaaccgaccgcagctgcgctggcttacggtctggacaaaggcactggcaaccgtactatcgcggtttatgacctgggtggtggtactttcgatatttctattatcgaaatcgacgaagttgacggcgaaaaaaccttcgaagttctggcaaccaacggtgatacccacctggggggtgaagacttcgacagccgtctgatcaactatctggttgaagaattcaagaaagatcagggcattgacctgcgcaacgatccgctggcaatgcagcgcctgaaagaagcggcagaaaaagcgaaaatcgaactgtcttccgctcagcagaccgacgttaacctgccatacatcactgcagacgcgaccggtccgaaacacatgaacatcaaagtgactcgtgcgaaactggaaagcctggttgaagatctggtaaaccgttccattgagccgctgaaagttgcactgcaggacgctggcctgtccgtatctgatatcgacgacgttatcctcgttggtggtcagactcgtatgccaatggttcagaagaaagttgctgagttctttggtaaagagccgcgtaaagacgttaacccggacgaagctgtagcaatcggtgctgctgttcagggtggtgttctgactggtgacgtaaaagacgtactgctgctggacgttaccccgctgtctctgggtatcgaaaccatgggcggtgtgatgacgacgctgatcgcgaaaaacaccactatcccgaccaagcacagccaggtgttctctaccgctgaagacaaccagtctgcggtaaccatccatgtgctgcagggtgaacgtaaacgtgcggctgataacaaatctctgggtcagttcaacctagatggtatcaacccggcaccgcgcggcatgccgcagatcgaagttaccttcgatatcgatgctgacggtatcctgcacgtttccgcgaaagataaaaacagcggtaaagagcagaagatcaccatcaaggcttcttctggtctgaacgaagatgaaatccagaaaatggtacgcgacgcagaagctaacgccgaagctgaccgtaagtttgaagagctggtacagactcgcaaccagggcgaccatctgctgcacagcacccgtaagcaggttgaagaagcaggcgacaaactgccggctgacgacaaaactgctatcgagtctgcgctgactgcactggaaactgctctgaaaggtgaagacaaagccgctatcgaagcgaaaatgcaggaactggcacaggtttcccagaaactgatggaaatcgcccagcagcaacatgcccagcagcagactgccggtgctgatgcttctgcaaacaacgcgaaagatgacgatgttgtcgacgctgaatttgaagaagtcaaagacaaaaaataa

SEQ ID NO: 3 - DNA, 1152 bp, Escherichia coli
atgtttgaaccaatggaacttaccaatgacgcggtgattaaagtcatcggcgtcggcggcggcggcggtaatgctgttgaacacatggtgcgcgagcgcattgaaggtgttgaattcttcgcggtaaataccgatgcacaagcgctgcgtaaaacagcggttggacagacgattcaaatcggtagcggtatcaccaaaggactgggcgctggcgctaatccagaagttggccgcaatgcggctgatgaggatcgcgatgcattgcgtgcggcgctggaaggtgcagacatggtctttattgctgcgggtatgggtggtggtaccggtacaggtgcagcaccagtcgtcgctgaagtggcaaaagatttgggtatcctgaccgttgctgtcgtcactaagcctttcaactttgaaggcaagaagcgtatggcattcgcggagcaggggatcactgaactgtccaagcatgtggactctctgatcactatcccgaacgacaaactgctgaaagttctgggccgcggtatctccctgctggatgcgtttggcgcagcgaacgatgtactgaaaggcgctgtgcaaggtatcgctgaactgattactcgtccgggtttgatgaacgtggactttgcagacgtacgcaccgtaatgtctgagatgggctacgcaatgatgggttctggcgtggcgagcggtgaagaccgtgcggaagaagctgctgaaatggctatctcttctccgctgctggaagatatcgacctgtctggcgcgcgcggcgtgctggttaacatcacggcgggcttcgacctgcgtctggatgagttcgaaacggtaggtaacaccatccgtgcatttgcttccgacaacgcgactgtggttatcggtacttctcttgacccggatatgaatgacgagctgcgcgtaaccgttgttgcgacaggtatcggcatggacaaacgtcctgaaatcactctggtgaccaataagcaggttcagcagccagtgatggatcgctaccagcagcatgggatggctccgctgacccaggagcagaagccggttgctaaagtcgtgaatgacaatgcgccgcaaactgcgaaagagccggattatctggatatcccagcattcctgcgtaagcaagctgattaa

SEQ ID NO: 4 - DNA, 2664 bp, Escherichia coli
atgtcagaacgtttcccaaatgacgtggatccgatcgaaactcgcgactggctccaggcgatcgaatcggtcatccgtgaagaaggtgttgagcgtgctcagtatctgatcgaccaactgcttgctgaagcccgcaaaggcggtgtaaacgtagccgcaggcacaggtatcagcaactacatcaacaccatccccgttgaagaacaaccggagtatccgggtaatctggaactggaacgccgtattcgttcagctatccgctggaacgccatcatgacggtgctgcgtgcgtcgaaaaaagacctcgaactgggcggccatatggcgtccttccagtcttccgcaaccatttatgatgtgtgctttaaccacttcttccgtgcacgcaacgagcaggatggcggcgacctggtttacttccagggccacatctccccgggcgtgtacgctcgtgctttcctggaaggtcgtctgactcaggagcagctggataacttccgtcaggaagttcacggcaatggcctctcttcctatccgcacccgaaactgatgccggaattctggcagttcccgaccgtatctatgggtctgggtccgattggtgctatttaccaggctaaattcctgaaatatctggaacaccgtggcctgaaagatacctctaaacaaaccgtttacgcgttcctcggtgacggtgaaatggacgaaccggaatccaaaggtgcgatcaccatcgctacccgtgaaaaactggataacctggtcttcgttatcaactgtaacctgcagcgtcttgacggcccggtcaccggtaacggcaagatcatcaacgaactggaaggcatcttcgaaggtgctggctggaacgtgatcaaagtgatgtggggtagccgttgggatgaactgctgcgtaaggataccagcggtaaactgatccagctgatgaacgaaaccgttgacggcgactaccagaccttcaaatcgaaagatggtgcgtacgttcgtgaacacttcttcggtaaatatcctgaaaccgcagcactggttgcagactggactgacgagcagatctgggcactgaaccgtggtggtcacgatccgaagaaaatctacgctgcattcaagaaagcgcaggaaaccaaaggcaaagcgacagtaatccttgctcataccattaaaggttacggcatgggcgacgcggctgaaggtaaaaacatcgcgcaccaggttaagaaaatgaacatggacggtgtgcgtcatatccgcgaccgtttcaatgtgccggtgtctgatgcagatatcgaaaaactgccgtacatcaccttcccggaaggttctgaagagcatacctatctgcacgctcagcgtcagaaactgcacggttatctgccaagccgtcagccgaacttcaccgagaagcttgagctgccgagcctgcaagacttcggcgcgctgttggaagagcagagcaaagagatctctaccactatcgctttcgttcgtgctctgaacgtgatgctgaagaacaagtcgatcaaagatcgtctggtaccgatcatcgccgacgaagcgcgtactttcggtatggaaggtctgttccgtcagattggtatttacagcccgaacggtcagcagtacaccccgcaggaccgcgagcaggttgcttactataaagaagacgagaaaggtcagattctgcaggaagggatcaacgagctgggcgcaggttgttcctggctggcagcggcgacctcttacagcaccaacaatctgccgatgatcccgttctacatctattactcgatgttcggcttccagcgtattggcgatctgtgctgggcggctggcgaccagcaagcgcgtggcttcctgatcggcggtacttccggtcgtaccaccctgaacggcgaaggtctgcagcacgaagatggtcacagccacattcagtcgctgactatcccgaactgtatctcttacgacccggcttacgcttacgaagttgctgtcatcatgcatgacggtctggagcgtatgtacggtgaaaaacaagagaacgtttactactacatcactacgctgaacgaaaactaccacatgccggcaatgccggaaggtgctgaggaaggtatccgtaaaggtatctacaaactcgaaactattgaaggtagcaaaggtaaagttcagctgctcggctccggttctatcctgcgtcacgtccgtgaagcagctgagatcctggcgaaagattacggcgtaggttctgacgtttatagcgtgacctccttcaccgagctggcgcgtgatggtcaggattgtgaacgctggaacatgctgcacccgctggaaactccgcgcgttccgtatatcgctcaggtgatgaacgacgctccggcagtggcatctaccgactatatgaaactgttcgctgagcaggtccgtacttacgtaccggctgacgactaccgcgtactgggtactgatggcttcggtcgttccgacagccgtgagaacctgcgtcaccacttcgaagttgatgcttcttatgtcgtggttgcggcgctgggcgaactggctaaacgtggcgaaatcgataagaaagtggttgctgacgcaatcgccaaattcaacatcgatgcagataaagttaacccgcgtctggcgtaa

SEQ ID NO: 5 - DNA, 1893 bp, Escherichia coli
atggctatcgaaatcaaagtaccggacatcggggctgatgaagttgaaatcaccgagatcctggtcaaagtgggcgacaaagttgaagccgaacagtcgctgatcaccgtagaaggcgacaaagcctctatggaagttccgtctccgcaggcgggtatcgttaaagagatcaaagtctctgttggcgataaaacccagaccggcgcactgattatgattttcgattccgccgacggtgcagcagacgctgcacctgctcaggcagaagagaagaaagaagcagctccggcagcagcaccagcggctgcggcggcaaaagacgttaacgttccggatatcggcagcgacgaagttgaagtgaccgaaatcctggtgaaagttggcgataaagttgaagctgaacagtcgctgatcaccgtagaaggcgacaaggcttctatggaagttccggctccgtttgctggcaccgtgaaagagatcaaagtgaacgtgggtgacaaagtgtctaccggctcgctgattatggtcttcgaagtcgcgggtgaagcaggcgcggcagctccggccgctaaacaggaagcagctccggcagcggcccctgcaccagcggctggcgtgaaagaagttaacgttccggatatcggcggtgacgaagttgaagtgactgaagtgatggtgaaagtgggcgacaaagttgccgctgaacagtcactgatcaccgtagaaggcgacaaagcttctatggaagttccggcgccgtttgcaggcgtcgtgaaggaactgaaagtcaacgttggcgataaagtgaaaactggctcgctgattatgatcttcgaagttgaaggcgcagcgcctgcggcagctcctgcgaaacaggaagcggcagcgccggcaccggcagcaaaagctgaagccccggcagcagcaccagctgcgaaagcggaaggcaaatctgaatttgctgaaaacgacgcttatgttcacgcgactccgctgatccgccgtctggcacgcgagtttggtgttaaccttgcgaaagtgaagggcactggccgtaaaggtcgtatcctgcgcgaagacgttcaggcttacgtgaaagaagctatcaaacgtgcagaagcagctccggcagcgactggcggtggtatccctggcatgctgccgtggccgaaggtggacttcagcaagtttggtgaaatcgaagaagtggaactgggccgcatccagaaaatctctggtgcgaacctgagccgtaactgggtaatgatcccgcatgttactcacttcgacaaaaccgatatcaccgagttggaagcgttccgtaaacagcagaacgaagaagcggcgaaacgtaagctggatgtgaagatcaccccggttgtcttcatcatgaaagccgttgctgcagctcttgagcagatgcctcgcttcaatagttcgctgtcggaagacggtcagcgtctgaccctgaagaaatacatcaacatcggtgtggcggtggataccccgaacggtctggttgttccggtattcaaagacgtcaacaagaaaggcatcatcgagctgtctcgcgagctgatgactatttctaagaaagcgcgtgacggtaagctgactgcgggcgaaatgcagggcggttgcttcaccatctccagcatcggcggcctgggtactacccacttcgcgccgattgtgaacgcgccggaagtggctatcctcggcgtttccaagtccgcgatggagccggtgtggaatggtaaagagttcgtgccgcgtctgatgctgccgatttctctctccttcgaccaccgcgtgatcgacggtgctgatggtgcccgtttcattaccatcattaacaacacgctgtctgacattcgccgtctggtgatgtaa

SEQ ID NO: 6 - DNA, 1425 bp, Escherichia coli
atgagtactgaaatcaaaactcaggtcgtggtacttggggcaggccccgcaggttactccgctgccttccgttgcgctgatttaggtctggaaaccgtaatcgtagaacgttacaacacccttggcggtgtttgcctgaacgtcggctgtatcccttctaaagcactgctgcacgtagcaaaagttatcgaagaagccaaagcgctggctgaacacggtatcgtcttcggcgaaccgaaaaccgatatcgacaagattcgtacctggaaagagaaagtgatcaatcagctgaccggtggtctggctggtatggcgaaaggccgcaaagtcaaagtggtcaacggtctgggtaaattcaccggggctaacaccctggaagttgaaggtgagaacggcaaaaccgtgatcaacttcgacaacgcgatcattgcagcgggttctcgcccgatccaactgccgtttattccgcatgaagatccgcgtatctgggactccactgacgcgctggaactgaaagaagtaccagaacgcctgctggtaatgggtggcggtatcatcggtctggaaatgggcaccgtttaccacgcgctgggttcacagattgacgtggttgaaatgttcgaccaggttatcccggcagctgacaaagacatcgttaaagtcttcaccaagcgtatcagcaagaaattcaacctgatgctggaaaccaaagttaccgccgttgaagcgaaagaagacggcatttatgtgacgatggaaggcaaaaaagcacccgctgaaccgcagcgttacgacgccgtgctggtagcgattggtcgtgtgccgaacggtaaaaacctcgacgcaggcaaagcaggcgtggaagttgacgaccgtggtttcatccgcgttgacaaacagctgcgtaccaacgtaccgcacatctttgctatcggcgatatcgtcggtcaaccgatgctggcacacaaaggtgttcacgaaggtcacgttgccgctgaagttatcgccggtaagaaacactacttcgatccgaaagttatcccgtccatcgcctataccgaaccagaagttgcatgggtgggtctgactgagaaagaagcgaaagagaaaggcatcagctatgaaaccgccaccttcccgtgggctgcttctggtcgtgctatcgcttccgactgcgcagacggtatgaccaagctgattttcgacaaagaatctcaccgtgtgatcggtggtgcgattgtcggtactaacggcggcgagctgctgggtgaaatcggcctggcaatcgaaatgggttgtgatgctgaagacatcgcactgaccatccacgcgcacccgactctgcacgagtctgtgggcctggcggcagaagtgttcgaaggtagcattaccgacctgccgaacccgaaagcgaagaagaagtaa

SEQ ID NO: 7 - DNA, 663 bp, Escherichia coli
atgaaagacatagatacactcatcagcaacaatgcactatggtcaaaaatgctggtggaagaggatcccgggttttttgagaaactggcacaagcgcaaaaaccgcgctttctatggattggatgttccgacagtcgcgttcctgcagaacgtttaaccggtcttgagccgggcgaactctttgttcaccgtaatgttgctaacctggtcattcacactgacctgaactgcctttccgtggttcagtatgcagtggatgtactcgaagttgaacacattattatctgtggccactacggttgcggcggcgtacaagccgcagttgaaaacccggaactggggcttatcaacaactggctgctgcatatccgcgatatctggttcaaacatagctcattgctcggcgaaatgccgcaagagcgccgtctggataccttgtgtgaactgaacgtcatggaacaggtgtataacctgggccactccaccattatgcaatcagcgtggaaacgcgggcagaaagttaccattcacggctgggcctacggcattcacgacggcttgctgcgtgatctggatgttaccgccaccaaccgcgaaacccttgagcaacgttaccgtcacgggatttccaacctcaagctgaaacacgccaaccacaaataa

SEQ ID NO: 8 - DNA, 726 bp, Escherichia coli
atggcaactgtttccatgcgcgacatgctcaaggctggtgttcacttcggtcaccagacccgttactggaacccgaaaatgaagccgttcatcttcggtgcgcgtaacaaagttcacatcatcaaccttgagaaaactgtaccgatgttcaacgaagctctggctgaactgaacaagattgcttctcgcaaaggtaaaatccttttcgttggtactaaacgcgctgcaagcgaagcggtgaaagacgctgctctgagctgcgaccagttcttcgtgaaccatcgctggctgggcggtatgctgactaactggaaaaccgttcgtcagtccatcaaacgtctgaaagacctggaaactcagtctcaggacggtactttcgacaagctgaccaagaaagaagcgctgatgcgcactcgtgagctggagaaactggaaaacagcctgggcggtatcaaagacatgggcggtctgccggacgctctgtttgtaatcgatgctgaccacgaacacattgctatcaaagaagcaaacaacctgggtattccggtatttgctatcgttgataccaactctgatccggacggtgttgacttcgttatcccgggtaacgacgacgcaatccgtgctgtgaccctgtacctgggcgctgttgctgcaaccgtacgtgaaggccgttctcaggatctggcttcccaggcggaagaaagcttcgtagaagctgagtaa

SEQ ID NO: 9 - DNA, 852 bp, Escherichia coli
atggctgaaattaccgcatccctggtaaaagagctgcgtgagcgtactggcgcaggcatgatggattgcaaaaaagcactgactgaagctaacggcgacatcgagctggcaatcgaaaacatgcgtaagtccggtgctattaaagcagcgaaaaaagcaggcaacgttgctgctgacggcgtgatcaaaaccaaaatcgacggcaactacggcatcattctggaagttaactgccagactgacttcgttgcaaaagacgctggtttccaggcgttcgcagacaaagttctggacgcagctgttgctggcaaaatcactgacgttgaagttctgaaagcacagttcgaagaagaacgtgttgcgctggtagcgaaaattggtgaaaacatcaacattcgccgcgttgctgcgctggaaggcgacgttctgggttcttatcagcacggtgcgcgtatcggcgttctggttgctgctaaaggcgctgacgaagagctggttaaacacatcgctatgcacgttgctgcaagcaagccagaattcatcaaaccggaagacgtatccgctgaagtggtagaaaaagaataccaggtacagctggatatcgcgatgcagtctggtaagccgaaagaaatcgcagagaaaatggttgaaggccgcatgaagaaattcaccggcgaagtttctctgaccggtcagccgttcgttatggaaccaagcaaaactgttggtcagctgctgaaagagcataacgctgaagtgactggcttcatccgcttcgaagtgggtgaaggcatcgagaaagttgagactgactttgcagcagaagttgctgcgatgtccaagcagtcttaa

SEQ ID NO: 10 - DNA, 1026 bp, Escherichia coli
atgccttcaattcgactggctgatttagcgcagcagttggatgcagaactacacggtgatggcgatatcgtcatcaccggcgttgcgtccatgcaatctgcacaaacaggtcacattacgttcatggttaacccaaaataccgtgagcatttaggcttgtgccaggcgtccgcggttgtcatgacccaggacgatcttcctttcgcgaaaagtgccgcactggtagtgaagaatccctacctgacttacgcgcgcatggcgcaaattttagataccacgccgcagcccgcgcagaacattgcacccagtgcggtgatcgacgcgacggcgaagctgggtaacaacgtatcgattggcgctaacgcggtgattgagtccggcgttgaactgggcgataacgtgattatcggtgccggttgcttcgtaggtaaaaacagcaaaatcggtgcaggttcgcgtctctgggcgaacgtaaccatttaccatgagatccagatcggtcagaattgcctgatccagtccggaacagtggtaggcgcagacggctttggttatgccaacgatcgtggtaactgggtgaagatcccacagattggtcgcgtaattattggcgatcgcgtggagatcggtgcctgcacaaccatcgatcgcggcgcgctggatgacactattattggcaatggcgtgatcattgataaccagtgccagattgcacataacgtcgtgattggcgacaatacggcggttgccggtggcgtcattatggcgggcagcctgaaaattggtcgttactgcatgatcggcggagccagcgtaatcaacgggcatatggaaatatgcgacaaagtgacggttacgggcatgggtatggtgatgcgtcccatcactgaaccaggcgtctattcctcaggcattccgctgcaacccaacaaagtctggcgcaaaaccgctgcactggtgatgaacattgatgacatgagcaagcgtctgaaatcgcttgagcgcaaggttaatcaacaagactaa

SEQ ID NO: 11 - DNA, 816 bp, Escherichia coli
atggcgttcaaattcaaaacctttgcggcagtgggagccctgatcggatcactggcactggtaggctgcggtcaggatgaaaaagatccaaaccacattaaagtcggcgtgattgttggtgccgaacagcaggttgcagaagtcgcgcagaaagttgcgaaagacaaatatggcctggacgttgagctggtaaccttcaacgactatgttctgccaaacgaagcattgagcaaaggcgatatcgacgccaacgccttccagcataaaccgtaccttgatcagcaactgaaagatcgtggctacaaactggtcgcagtaggcaacacttttgtttatccgattgctggttactccaagaaaatcaaatcactggatgaactgcaggatggttcgcaggttgccgtgccaaacgacccaactaaccttggtcgttcactgctgctgctgcaaaaagtgggcttgatcaaactgaaagatggcgttggcctgctgccgaccgttcttgatgttgttgagaaccccaaaaatctgaaaattgttgaactggaagcaccgcaactgccgcgttctctggacgacgcgcaaatcgctctggcagttatcaataccacctatgccagccagattggcctgactccggcgaaagacggtatctttgttgaagataaagagtccccgtacgtaaacctgatcgtgacgcgtgaagataacaaagacgccgagaacgtgaagaaattcgtccaggcttatcagtctgacgaagtttacgaagcagcaaacaaagtgtttaacggcggagctgttaaaggctggtaa

SEQ ID NO: 12 - DNA, 474 bp, Escherichia coli
atgggcaggataagctcgggaggaatgatgtttaaggcaataacgacagtcgccgctctggtcatcgccaccagtgcaatggcgcaggatgatttaaccattagcagccttgcaaagggcgaaaccaccaaagctgcatttaatcagatggtacaagggcataagctgcctgcctgggtgatgaaaggcggtacttatactcccgcacaaaccgtaacgttgggagatgagacgtatcaggtgatgagcgcgtgcaaaccgcatgactgtggctcgcaacgtatcgctgtgatgtggtccgagaaatctaatcagatgacggggctgttctcgactattgatgagaaaacgtcgcaagagaaactcacctggctgaatgtgaacgatgcgctttcgattgatggtaaaacggtgttgttcgcggcgttgaccggcagcctggaaaaccatccggatggctttaattttaaataa

SEQ ID NO: 13 - DNA, 333 bp, Escherichia coli
atgagcttttttatttctgatgcggtagcggcaacgggtgcaccggcgcaaggtagcccgatgtctttgattttgatgctggtggtattcggtctgattttctatttcatgatcctgcgtccacagcagaagcgcaccaaagaacacaaaaagctgatggactccattgccaaaggtgatgaagttctgacgaacggtggcctggttggtcgcgtaaccaaagtagcggaaaacggctacattgctatcgcgctgaatgacaccactgaagtagttattaaacgtgacttcgtagctgccgtcctgccgaaaggcaccatgaaggcgctgtaa

SEQ ID NO: 14 - DNA, 645 bp, Escherichia coli
atgcgtatcattctgcttggcgctccgggcgcggggaaagggactcaggctcagttcatcatggagaaatatggtattccgcaaatctccactggcgatatgctgcgtgctgcggtcaaatctggctccgagctgggtaaacaagcaaaagacattatggatgctggcaaactggtcaccgacgaactggtgatcgcgctggttaaagagcgcattgctcaggaagactgccgtaatggtttcctgttggacggcttcccgcgtaccattccgcaggcagacgcgatgaaagaagcgggcatcaatgttgattacgttctggaattcgacgtaccggacgaactgatcgttgaccgtatcgtcggtcgccgcgttcatgcgccgtctggtcgtgtttatcacgttaaattcaatccgccgaaagtagaaggcaaagacgacgttaccggtgaagaactgactacccgtaaagatgatcaggaagagaccgtacgtaaacgtctggttgaataccatcagatgacagcaccgctgatcggctactactccaaagaagcagaagcgggtaataccaaatacgcgaaagttgacggcaccaagccggttgctgaagttcgcgctgatctggaaaaaatcctcggctaa

SEQ ID NO: 15 - DNA, 495 bp, Escherichia coli
atggttactttccacaccaatcacggcgatattgtcatcaaaacttttgacgataaagcacctgaaacagttaaaaacttcctggactactgccgcgaaggtttttacaacaacaccattttccaccgtgttatcaacggctttatgattcagggcggcggttttgaaccgggcatgaaacaaaaagccaccaaagaaccgatcaaaaacgaagccaacaacggcctgaaaaatacccgtggtacgctggcaatggcacgtactcaggctccgcactctgcaactgcacagttcttcatcaacgtggttgataacgacttcctgaacttctctggcgaaagcctgcaaggttggggctactgcgtgtttgctgaagtggttgacggcatggacgtggtagacaaaatcaaaggtgttgcaaccggtcgtagcggtatgcaccaggacgtgccaaaagaagacgttatcattgaaagcgtgaccgttagcgagtaa

SEQ ID NO: 16 - DNA, 954 bp, Escherichia coli
atgcgggcgaaacttctgggaatagtcctgacaacccctattgcgatcagctcttttgcttctaccgagactttatcgtttactcctgacaacataaatgcggacattagtcttggaactctgagcggaaaaacaaaagagcgtgtttatctagccgaagaaggaggccgaaaagtcagtcaactcgactggaaattcaataacgctgcaattattaaaggtgcaattaattgggatttgatgccccagatatctatcggggctgctggctggacaactctcggcagccgaggtggcaatatggtcgatcaggactggatggattccagtaaccccggaacctggacggatgaaagtagacaccctgatacacaactcaattatgccaacgaatttgatctgaatatcaaaggctggctcctcaacgaacccaattaccgcctgggactcatggccggatatcaggaaagccgttatagctttacagccagaggtggttcctatatctacagttctgaggagggattcagagatgatatcggctccttcccgaatggagaaagagcaatcggctacaaacaacgttttaaaatgccctacattggcttgactggaagttatcgttatgaagattttgaactcggtggcacatttaaatacagcggctgggtggaatcatctgataacgatgaacactatgacccgggaaaaagaatcacttatcgcagtaaggtcaaagaccaaaattactattctgttgcagtcaatgcaggttattacgtcacacctaacgcaaaagtttatgttgaaggcgcatggaatcgggttacgaataaaaaaggtaatacttcactttatgatcacaataataacacttcagactacagcaaaaatggagcaggtatagaaaactataacttcatcactactgctggtcttaagtacacattttaa

SEQ ID NO: 17 - DNA, 564 bp, Escherichia coli
atgtccttgattaacaccaaaattaaaccttttaaaaaccaggcattcaaaaacggcgaattcatcgaaatcaccgaaaaagataccgaaggccgctggagcgtcttcttcttctacccggctgactttactttcgtatgcccgaccgaactgggtgacgttgctgaccactacgaagaactgcagaaactgggcgtagacgtatacgcagtatctaccgatactcacttcacccacaaagcatggcacagcagctctgaaaccatcgctaaaatcaaatatgcgatgatcggcgacccgactggcgccctgacccgtaacttcgacaacatgcgtgaagatgaaggtctggctgaccgtgcgaccttcgttgttgacccgcagggtatcatccaggcaatcgaagttaccgctgaaggcattggccgtgacgcgtctgacctgctgcgtaaaatcaaagcagcacagtacgtagcttctcacccaggtgaagtttgcccggctaaatggaaagaaggtgaagcaactctggctccgtctctggacctggttggtaaaatctaa

SEQ ID NO: 18 - DNA, 210 bp, Escherichia coli
atgtctaagattaaaggtaacgttaagtggtttaatgagtccaaaggattcggtttcattactccggaagacggcagcaaagacgtgttcgtacacttctctgcaatccagactaatggttttaaaactcttgctgaaggtcagcgcgtagagttcgaaatcactaacggtgccaaaggcccttctgctgcaaacgtaatcgctctgtaa

SEQ ID NO: 19 - DNA, 1218 bp, Escherichia coli
atgagtagcgtagatattctggtccctgacctgcctgaatccgtagccgatgccaccgtcgcaacctggcataaaaaacccggcgacgcagtcgtacgtgatgaagtgctggtagaaatcgaaactgacaaagtggtactggaagtaccggcatcagcagacggcattctggatgcggttctggaagatgaaggtacaacggtaacgtctcgtcagatccttggtcgcctgcgtgaaggcaacagcgccggtaaagaaaccagcgccaaatctgaagagaaagcgtccactccggcgcaacgccagcaggcgtctctggaagagcaaaacaacgatgcgttaagcccggcgatccgtcgcctgctggctgaacacaatctcgacgccagcgccattaaaggcaccggtgtgggtggtcgtctgactcgtgaagatgtggaaaaacatctggcgaaagccccggcgaaagagtctgctccggcagcggctgctccggcggcgcaaccggctctggctgcacgtagtgaaaaacgtgtcccgatgactcgcctgcgtaagcgtgtggcagagcgtctgctggaagcgaaaaactccaccgccatgctgaccacgttcaacgaagtcaacatgaagccgattatggatctgcgtaagcagtacggtgaagcgtttgaaaaacgccacggcatccgtctgggctttatgtccttctacgtgaaagcggtggttgaagccctgaaacgttacccggaagtgaacgcttctatcgacggcgatgacgtggtttaccacaactatttcgacgtcagcatggcggtttctacgccgcgcggcctggtgacgccggttctgcgtgatgtcgataccctcggcatggcagacatcgagaagaaaatcaaagagctggcagtcaaaggccgtgacggcaagctgaccgttgaagatctgaccggtggtaacttcaccatcaccaacggtggtgtgttcggttccctgatgtctacgccgatcatcaacccgccgcagagcgcaattctgggtatgcacgctatcaaagatcgtccgatggcggtgaatggtcaggttgagatcctgccgatgatgtacctggcgctgtcctacgatcaccgtctgatcgatggtcgcgaatccgtgggcttcctggtaacgatcaaagagttgctggaagatccgacgcgtctgctgctggacgtgtag

SEQ ID NO: 20 - DNA, 1167 bp, Escherichia coli
atgaacttacatgaatatcaggcaaaacaactttttgcccgctatggcttaccagcaccggtgggttatgcctgtactactccgcgcgaagcagaagaagccgcttcaaaaatcggtgccggtccgtgggtagtgaaatgtcaggttcacgctggtggccgcggtaaagcgggcggtgtgaaagttgtaaacagcaaagaagacatccgtgcttttgcagaaaactggctgggcaagcgtctggtaacgtatcaaacagatgccaatggccaaccggttaaccagattctggttgaagcagcgaccgatatcgctaaagagctgtatctcggtgccgttgttgaccgtagttcccgtcgtgtggtctttatggcctccaccgaaggcggcgtggaaatcgaaaaagtggcggaagaaactccgcacctgatccataaagttgcgcttgatccgctgactggcccgatgccgtatcagggacgcgagctggcgttcaaactgggtctggaaggtaaactggttcagcagttcaccaaaatcttcatgggcctggcgaccattttcctggagcgcgacctggcgttgatcgaaatcaacccgctggtcatcaccaaacagggcgatctgatttgcctcgacggcaaactgggcgctgacggcaacgcactgttccgccagcctgatctgcgcgaaatgcgtgaccagtcgcaggaagatccgcgtgaagcacaggctgcacagtgggaactgaactacgttgcgctggacggtaacatcggttgtatggttaacggcgcaggtctggcgatgggtacgatggacatcgttaaactgcacggcggcgaaccggctaacttccttgacgttggcggcggcgcaaccaaagaacgtgtaaccgaagcgttcaaaatcatcctctctgacgacaaagtgaaagccgttctggttaacatcttcggcggtatcgttcgttgcgacctgatcgctgacggtatcatcggcgcggtagcagaagtgggtgttaacgtaccggtcgtggtacgtctggaaggtaacaacgccgaactcggcgcgaagaaactggctgacagcggcctgaatattattgcagcaaaaggtctgacggatgcagctcagcaggttgttgccgcagtggaggggaaataa

SEQ ID NO: 21 - DNA, 522 bp, Escherichia coli
atgcaactgaacaaagtgctgaaagggctgatgattgctctgcctgttatggcaattgcggcatgttcttccaacaagaacgccagcaatgacggcagcgaaggcatgctgggtgccggcactggtatggatgcgaacggcggcaacggcaacatgtcttccgaagagcaggctcgtctgcaaatgcaacagctgcagcagaacaacatcgtttacttcgatctggacaagtacgatatccgttctgacttcgctcaaatgctggatgcacatgcaaacttcctgcgtagcaacccgtcttacaaagtcaccgtagaaggtcacgcggacgaacgtggtactccggaatacaacatctccctgggtgaacgtcgtgcgaacgccgttaagatgtacctgcagggtaaaggcgtttctgcagaccagatctccatcgtttcttacggtaaagaaaaacctgcagtactgggtcatgacgaagcggcatactccaaaaaccgtcgtgcggtactggtttactaa

SEQ ID NO: 22 - DNA, 792 bp, Escherichia coli
atgagcagtaacttcagacatcaactattgagtctgtcgttactggttggtatagcggccccctgggccgcttttgctcaggcaccaatcagtagtgtcggctcaggctcggtcgaagaccgcgtcactcaacttgagcgtatttctaatgctcacagccagcttttaacccaactccagcaacaactttctgataatcaatccgatattgattccctgcgtggtcagattcaggaaaatcagtatcaactgaatcaggtcgtggagcggcaaaagcagatcctgttgcagatcgacagcctcagcagcggtggtgcagcggcgcaatcaaccagcggcgatcaaagcggtgcggcggcatcaacgacgccgacagctgatgctggtactgcgaatgctggcgcgccggtgaaaagcggtaatgcaaacacggattacaatgcagctattgcgctggtgcaggataaatcccgccaggatgacgcaatggtggcatttcagaatttcatcaaaaattaccctgattcaacttacctgccaaacgccaattattggctgggtcagttaaactacaacaagggtaaaaaagatgatgcggcgtactattttgcttcggtagtgaaaaactatccgaagtcaccaaaggctgcagatgcgatgtttaaagtcggcgtcatcatgcaggacaaaggtgacaccgcaaaagcgaaagccgtataccagcaggttatcagtaaataccctggtactgatggcgctaaacaggcacaaaaacgtctgaacgcgatgtaa

SEQ ID NO: 23 - DNA, 753 bp, Escherichia coli
atggctgtaactaagctggttctggttcgtcatggcgaaagtcagtggaacaaagaaaaccgtttcaccggttggtacgacgtggatctgtctgagaaaggcgtaagcgaagcaaaagcagcaggtaagctgctgaaagaggaaggttacagctttgactttgcttacacttctgtgctgaaacgcgctatccataccctgtggaatgtgctggacgaactggatcaggcatggctgcccgttgagaaatcctggaaactgaacgaacgtcactacggtgcgttgcagggtctgaacaaagcggaaactgctgaaaagtatggcgacgagcaggtgaaacagtggcgtcgtggttttgcagtgactccgccggaactgactaaagatgatgagcgttatccgggtcacgatccgcgttacgcgaaactgagcgagaaagaactgccgctgacggaaagcctggcgctgaccattgaccgcgtgatcccttactggaatgaaactattctgccgcgtatgaagagcggtgagcgcgtgatcatcgctgcacacggtaactctttacgtgcgctggtgaaatatcttgataacatgagcgaagaagagattcttgagcttaatatcccgactggcgtgccgctggtgtatgagttcgacgagaatttcaaaccgctgaaacgctattatctgggtaatgctgacgagatcgcagcgaaagcagcggcggttgcaaaccagggtaaagcgaagtaa

SEQ ID NO: 24 - DNA, 747 bp, Escherichia coli
atgaagtctgtattaaaagtttcactggctgcactgaccctggcttttgcggtttcttctcatgccgcggataaaaaattagttgtcgcgacggataccgccttcgttccgtttgaatttaaacagggcgataaatatgtgggctttgacgttgatctgtgggctgccatcgctaaagagctgaagctggattacgaactgaagccgatggatttcagtgggatcattccggcactgcaaaccaaaaacgtcgatctggcgctggcgggcattaccatcaccgacgagcgtaaaaaagcgatcgatttctctgacggctactacaaaagcggcctgttagtgatggtgaaagctaacaataacgatgtgaaaagcgtgaaagatctcgacgggaaagtggttgctgtgaagagcggtactggctccgttgattacgcgaaagcaaacatcaaaactaaagatctgcgtcagttcccgaacatcgataacgcctatatggaactgggcaccaaccgcgcagacgccgttctgcacgatacgccaaacattctgtacttcatcaaaaccgccggtaacggtcagttcaaagcggtaggtgactctctggaagcgcagcaatacggtattgcgttcccgaaaggtagcgacgagctgcgtgacaaagtcaacggcgcgttgaaaaccctgcgcgagaacggaacttacaacgaaatctacaaaaaatggttcggtactgaaccgaaataa

SEQ ID NO: 25 - DNA, 504 bp, Escherichia coli
atgagtaccgctaaattagttaaatcaaaagcgaccaatctgctttatacccgcaacgatgtctccgacagcgagaaaaaagcaacagtagagttgctgaatcgccaggttatccagtttattgatctttctttgattaccaaacaagcgcactggaacatgcgcggcgctaacttcattgccgtacatgaaatgctggatggcttccgcaccgcactgatcgatcatctggataccatggcagaacgtgcagtgcagctgggcggtgtagctctggggaccactcaagttatcaacagcaaaaccccgctgaaaagttacccgctggacatccacaacgttcaggatcacctgaaagaactggctgaccgttacgcaatcgtcgctaatgacgtacgcaaagcgattggcgaagcgaaagatgacgacaccgcagatatcctgaccgccgcgtctcgcgacctggataaattcctgtggtttatcgagtctaacatcgaataa

SEQ ID NO: 26 - DNA, 516 bp, Escherichia coli
atgaaaaaaattgcatgtctttcagcactggccgcagttctggctttcaccgcaggtacttccgtagctgcgacttctactgtaactggcggttacgcacagagcgacgctcagggccaaatgaacaaaatgggcggtttcaacctgaaataccgctatgaagaagacaacagcccgctgggtgtgatcggttctttcacttacaccgagaaaagccgtactgcaagctctggtgactacaacaaaaaccagtactacggcatcactgctggtccggcttaccgcattaacgactgggcaagcatctacggtgtagtgggtgtgggttatggtaaattccagaccactgaatacccgacctacaaacacgacaccagcgactacggtttctcctacggtgcgggtctgcagttcaacccgatggaaaacgttgctctggacttctcttacgagcagagccgtattcgtagcgttgacgtaggcacctggattgccggtgttggttaccgcttctaa

SEQ ID NO: 27 - DNA, 225 bp, Escherichia coli
atggaaaagggtactgttaagtggttcaacaatgccaaagggtttggtttcatctgccctgaaggcggcggcgaagatattttcgctcattattccaccattcagatggatggttacagaacgctaaaagctggacaatccgttcagtttgatgtccaccaggggccaaaaggcaatcacgccagtgttattgtgcccgtcgaagtagaagcggcagtcgcatag

SEQ ID NO: 28 - DNA, 219 bp, Escherichia coli
atggccaaagaagacaatattgaaatgcaaggtaccgttcttgaaacgttgcctaataccatgttccgcgtagagttagaaaacggtcacgtggttactgcacacatctccggtaaaatgcgcaaaaactacatccgcatcctgacgggcgacaaagtgactgttgaactgaccccgtacgacctgagcaaaggccgcattgtcttccgtagtcgctga

SEQ ID NO: 29 - DNA, 495 bp, Escherichia coli
atggtagatagcaagaagcgccctggcaaagatctcgaccgtatcgatcgtaacattcttaatgagttgcaaaaggatgggcgtatttctaacgtcgagctttctaaacgtgtgggactttccccaacgccgtgccttgagcgtgtgcgtcggctggaaagacaagggtttattcagggctatacggcgctgcttaacccccattatctggatgcatcacttctggtattcgttgagattactctgaatcgtggcgcaccggatgtgtttgaacaattcaataccgctgtacaaaaacttgaagaaattcaggagtgtcatttagtatccggtgatttcgactacctgttgaaaacacgcgtgccggatatgtcagcctaccgtaagttgctgggggaaaccctgctgcgtctgcctggcgtcaatgacacacggacatacgttgttatggaagaagtcaagcagagtaatcgtctggttattaagacgcgctaa

SEQ ID NO: 30 - DNA, 2283 bp, Escherichia coli
atgtccgagcttaatgaaaagttagccacagcctgggaaggttttaccaaaggtgactggcagaatgaagtaaacgtccgtgacttcattcagaaaaactacactccgtacgagggtgacgagtccttcctggctggcgctactgaagcgaccaccaccctgtgggacaaagtaatggaaggcgttaaactggaaaaccgcactcacgcgccagttgactttgacaccgctgttgcttccaccatcacctctcacgacgctggctacatcaacaagcagcttgagaaaatcgttggtctgcagactgaagctccgctgaaacgtgctcttatcccgttcggtggtatcaaaatgatcgaaggttcctgcaaagcgtacaaccgcgaactggatccgatgatcaaaaaaatcttcactgaataccgtaaaactcacaaccagggcgtgttcgacgtttacactccggacatcctgcgttgccgtaaatctggtgttctgaccggtctgccagatgcatatggccgtggccgtatcatcggtgactaccgtcgcgttgcgctgtacggtatcgactacctgatgaaagacaaactggcacagttcacttctctgcaggctgatctggaaaacggcgtaaacctggaacagactatccgtctgcgcgaagaaatcgctgaacagcaccgcgctctgggtcagatgaaagaaatggctgcgaaatacggctacgacatctctggtccggctaccaacgctcaggaagctatccagtggacttacttcggctacctggctgctgttaagtctcagaacggtgctgcaatgtccttcggtcgtacctccaccttcctggatgtgtacatcgaacgtgacctgaaagctggcaagatcaccgaacaagaagcgcaggaaatggttgaccacctggtcatgaaactgcgtatggttcgcttcctgcgtactccggaatacgatgaactgttctctggcgacccgatctgggcaaccgaatctatcggtggtatgggcctcgacggtcgtaccctggttaccaaaaacagcttccgtttcctgaacaccctgtacaccatgggtccgtctccggaaccgaacatgaccattctgtggtctgaaaaactgccgctgaacttcaagaaattcgccgctaaagtgtccatcgacacctcttctctgcagtatgagaacgatgacctgatgcgtccggacttcaacaacgatgactacgctattgcttgctgcgtaagcccgatgatcgttggtaaacaaatgcagttcttcggtgcgcgtgcaaacctggcgaaaaccatgctgtacgcaatcaacggcggcgttgacgaaaaactgaaaatgcaggttggtccgaagtctgaaccgatcaaaggcgatgtcctgaactatgatgaagtgatggagcgcatggatcacttcatggactggctggctaaacagtacatcactgcactgaacatcatccactacatgcacgacaagtacagctacgaagcctctctgatggcgctgcacgaccgtgacgttatccgcaccatggcgtgtggtatcgctggtctgtccgttgctgctgactccctgtctgcaatcaaatatgcgaaagttaaaccgattcgtgacgaagacggtctggctatcgacttcgaaatcgaaggcgaatacccgcagtttggtaacaatgatccgcgtgtagatgacctggctgttgacctggtagaacgtttcatgaagaaaattcagaaactgcacacctaccgtgacgctatcccgactcagtctgttctgaccatcacttctaacgttgtgtatggtaagaaaacgggtaacaccccagacggtcgtcgtgctggcgcgccgttcggaccgggtgctaacccgatgcacggtcgtgaccagaaaggtgcagtagcctctctgacttccgttgctaaactgccgtttgcttacgctaaagatggtatctcctacaccttctctatcgttccgaacgcactgggtaaagacgacgaagttcgtaagaccaacctggctggtctgatggatggttacttccaccacgaagcatccatcgaaggtggtcagcacctgaacgttaacgtgatgaaccgtgaaatgctgctcgacgcgatggaaaacccggaaaaatatccgcagctgaccatccgtgtatctggctacgcagtacgtttcaactcgctgactaaagaacagcagcaggacgttattactcgtaccttcactcaatctatgtaa

SEQ ID NO: 31 - DNA, 1674 bp, Escherichia coli
atgactgaatcttttgctcaactctttgaagagtccttaaaagaaatcgaaacccgcccgggttctatcgttcgtggcgttgttgttgctatcgacaaagacgtagtactggttgacgctggtctgaaatctgagtccgccatcccggctgagcagttcaaaaacgcccagggcgagctggaaatccaggtaggtgacgaagttgacgttgctctggacgcagtagaagacggcttcggtgaaactctgctgtcccgtgagaaagctaaacgtcacgaagcctggatcacgctggaaaaagcttacgaagatgctgaaactgttaccggtgttatcaacggcaaagttaagggcggcttcactgttgagctgaacggtattcgtgcgttcctgccaggttctctggtagacgttcgtccggtgcgtgacactctgcacctggaaggcaaagagcttgaatttaaagtaatcaagctggatcagaagcgcaacaacgttgttgtttctcgtcgtgccgttatcgaatccgaaaacagcgcagagcgcgatcagctgctggaaaacctgcaggaaggcatggaagttaaaggtatcgttaagaacctcactgactacggtgcattcgttgatctgggcggcgttgacggcctgctgcacatcactgacatggcctggaaacgcgttaagcatccgagcgaaatcgtcaacgtgggcgacgaaatcactgttaaagtgctgaagttcgaccgcgaacgtacccgtgtatccctgggcctgaaacagctgggcgaagatccgtgggtagctatcgctaaacgttatccggaaggtaccaaactgactggtcgcgtgaccaacctgaccgactacggctgcttcgttgaaatcgaagaaggcgttgaaggcctggtacacgtttccgaaatggactggaccaacaaaaacatccacccgtccaaagttgttaacgttggcgatgtagtggaagttatggttctggatatcgacgaagaacgtcgtcgtatctccctgggtctgaaacagtgcaaagctaacccgtggcagcagttcgcggaaacccacaacaagggcgaccgtgttgaaggtaaaatcaagtctatcactgacttcggtatcttcatcggcttggacggcggcatcgacggcctggttcacctgtctgacatctcctggaacgttgcaggcgaagaagcagttcgtgaatacaaaaaaggcgacgaaatcgctgcagttgttctgcaggttgacgcagaacgtgaacgtatctccctgggcgttaaacagctcgcagaagatccgttcaacaactgggttgctctgaacaagaaaggcgctatcgtaaccggtaaagtaactgcagttgacgctaaaggcgcaaccgtagaactggctgacggcgttgaaggttacctgcgtgcttctgaagcatcccgtgaccgcgttgaagacgctaccctggttctgagcgttggcgacgaagttgaagctaaattcaccggcgttgatcgtaaaaaccgcgcaatcagcctgtctgttcgtgcgaaagacgaagctgacgagaaagatgcaatcgcaactgttaacaaacaggaagatgcaaacttctccaacaacgcaatggctgaagctttcaaagcagctaaaggcgagtaa

SEQ ID NO: 32 - DNA, 285 bp, Escherichia coli
atgaccaagtcagaattgatagaaagacttgccacccagcaatcgcacattcccgccaagacggttgaagatgcagtaaaagagatgctggagcatatggcctcgactcttgcgcagggcgagcgtattgaaatccgcggtttcggcagtttctctttgcactaccgcgcaccacgtaccggacgtaatccgaagactggcgataaagtagaactggaaggaaaatacgttcctcactttaaacctggtaaagaactgcgcgatcgcgccaatatttacggttaa

SEQ ID NO: 33 - DNA, 1191 bp, Escherichia coli
atgtttgagaacattaccgccgctcctgccgacccgattctgggcctggccgatctgtttcgtgccgatgaacgtcccggcaaaattaacctcgggattggtgtctataaagatgagacgggcaaaaccccggtactgaccagcgtgaaaaaggctgaacagtatctgctcgaaaatgaaaccaccaaaaattacctcggcattgacggcatccctgaatttggtcgctgcactcaggaactgctgtttggtaaaggtagcgccctgatcaatgacaaacgtgctcgcacggcacagactccggggggcactggcgcactacgcgtggctgccgatttcctggcaaaaaataccagcgttaagcgtgtgtgggtgagcaacccaagctggccgaaccataagagcgtctttaactctgcaggtctggaagttcgtgaatacgcttattatgatgcggaaaatcacactcttgacttcgatgcactgattaacagcctgaatgaagctcaggctggcgacgtagtgctgttccatggctgctgccataacccaaccggtatcgaccctacgctggaacaatggcaaacactggcacaactctccgttgagaaaggctggttaccgctgtttgacttcgcttaccagggttttgcccgtggtctggaagaagatgctgaaggactgcgcgctttcgcggctatgcataaagagctgattgttgccagttcctactctaaaaactttggcctgtacaacgagcgtgttggcgcttgtactctggttgctgccgacagtgaaaccgttgatcgcgcattcagccaaatgaaagcggcgattcgcgctaactactctaacccaccagcacacggcgcttctgttgttgccaccatcctgagcaacgatgcgttacgtgcgatttgggaacaagagctgactgatatgcgccagcgtattcagcgtatgcgtcagttgttcgtcaatacgctgcaggaaaaaggcgcaaaccgcgacttcagctttatcatcaaacagaacggcatgttctccttcagtggcctgacaaaagaacaagtgctgcgtctgcgcgaagagtttggcgtatatgcggttgcttctggtcgcgtaaatgtggccgggatgacaccagataacatggctccgctgtgcgaagcgattgtggcagtgctgtaa

SEQ ID NO: 34 - DNA, 1089 bp, Escherichia coli
atgatgaagcgcaatattctggcagtgatcgtccctgctctgttagtagcaggtactgcaaacgctgcagaaatctataacaaagatggcaacaaagtagatctgtacggtaaagctgttggtctgcattatttttccaagggtaacggtgaaaacagttacggtggcaatggcgacatgacctatgcccgtcttggttttaaaggggaaactcaaatcaattccgatctgaccggttatggtcagtgggaatataacttccagggtaacaactctgaaggcgctgacgctcaaactggtaacaaaacgcgtctggcattcgcgggtcttaaatacgctgacgttggttctttcgattacggccgtaactacggtgtggtttatgatgcactgggttacaccgatatgctgccagaatttggtggtgatactgcatacagcgatgacttcttcgttggtcgtgttggcggcgttgctacctatcgtaactccaacttctttggtctggttgatggcctgaacttcgctgttcagtacctgggtaaaaacgagcgtgacactgcacgccgttctaacggcgacggtgttggcggttctatcagctacgaatacgaaggctttggtatcgttggtgcttatggtgcagctgaccgtaccaacctgcaagaagctcaacctcttggcaacggtaaaaaagctgaacagtgggctactggtctgaagtacgacgcgaacaacatctacctggcagcgaactacggtgaaacccgtaacgctacgccgatcactaataaatttacaaacaccagcggcttcgccaacaaaacgcaagacgttctgttagttgcgcaataccagttcgatttcggtctgcgtccgtccatcgcttacaccaaatctaaagcgaaagacgtagaaggtatcggtgatgttgatctggtgaactactttgaagtgggcgcaacctactacttcaacaaaaacatgtccacctatgttgactacatcatcaaccagatcgattctgacaacaaactgggcgtaggttcagacgacaccgttgctgtgggtatcgtttaccagttctaa

SEQ ID NO: 35 - DNA, 168 bp, Escherichia coli
atgaagagacaaaaacgagatcgcctggaacgggcacatcaacgtggttatcaggccggcatcgccggacgctcaaaagaaatgtgtccctatcagacgctgaatcaaaggtcacaatggctgggaggctggcgagaagccatggcggacagggtagtaatggcctga

SEQ ID NO: 36 - DNA, 1041 bp, Escherichia coli
atgaaaaagacagctatcgcgattgcagtggcactggctggtttcgctaccgtagcgcaggccgctccgaaagataacacctggtacactggtgctaaactgggctggtcccagtaccatgacactggtttcatcaacaacaatggcccgacccatgaaaaccaactgggcgctggtgcttttggtggttaccaggttaacccgtatgttggctttgaaatgggttacgactggttaggtcgtatgccgtacaaaggcagcgttgaaaacggtgcatacaaagctcagggcgttcaactgaccgctaaactgggttacccaatcactgacgacctggacatctacactcgtctgggtggcatggtatggcgtgcagacactaaatccaacgtttatggtaaaaaccacgacaccggcgtttctccggtcttcgctggcggtgttgagtacgcgatcactcctgaaatcgctacccgtctggaataccagtggaccaacaacatcggtgacgcacacaccatcggcactcgtccggacaacggcatgctgagcctgggtgtttcctaccgtttcggtcagggcgaagcagctccagtagttgctccggctccagctccggcaccggaagtacagaccaagcacttcactctgaagtctgacgttctgttcaacttcaacaaagcaaccctgaaaccggaaggtcaggctgctctggatcagctgtacagccagctgagcaacctggatccgaaagacggttccgtagttgttctgggttacaccgaccgcatcggttctgacgcttacaaccagggtctgtccgagcgccgtgctcagtctgttgttgattacctgatctccaaaggtatcccggcagacaagatctccgcacgtggtatgggcgaatccaacccggttactggcaacacctgtgacaacgtgaaacagcgtgctgcactgatcgactgcctggctccggatcgtcgcgtagagatcgaagttaaaggtatcaaagacgttgtaactcagccgcaggcttaa

SEQ ID NO: 37 - DNA, 375 bp, Escherichia coli
atgaccatgtacgcaacgcttgaagaagccattgacgctgcacgcgaagaatttcttgcagacaaccccggcatcgacgccgaagatgcgaatgtgcaacagttcaatgcccaaaaatacgttttgcaggacggcgacatcatgtggcaagttgagttttttgccgacgaaggggaagaaggtgaatgtttacctatgcttagcggtgaagccgcgcaaagtgtttttgatggcgactatgatgagatagagatacgccaggagtggcaggaagagaatacattacatgaatgggacgagggggaatttcagcttgagccaccgctggataccgaggaaggacgcgcagcagctgatgagtgggatgaacgttaa

SEQ ID NO: 38 - DNA, 522 bp, Escherichia coli
atgcaaaaggtaaaattacccctgactctcgatccggttcgtacggctcaaaaacgccttgattaccagggtatctatacccctgatcaggttgagcgcgtcgccgaatccgtagtcagtgtggacagtgatgtggaatgctccatgtcgttcgctatcgataaccaacgtctcgcagtgttaaacggcgatgcgaaggtgacggtaacgctcgagtgtcagcgttgcgggaagccgtttactcatcaggtctacacaacgtattgttttagtcctgtgcgttcagacgaacaggctgaagcactgccggaagcgtatgaaccgattgaggttaacgaattcggtgaaatcgatctgcttgcaatggttgaagatgaaatcatcctcgccttgccggtagttccggtgcatgattctgaacactgtgaagtgtccgaagcggacatggtctttggtgaactgcctgaagaagcgcaaaagccaaacccatttgccgtattagccagcttaaagcgtaagtaa

SEQ ID NO: 39 - DNA, 174 bp, Escherichia coli
atggccgtacaacagaataaaccaacccgttccaaacgtggcatgcgtcgttcccatgacgcgctgaccgcagtcaccagcctgtctgtagacaaaacttctggtgaaaaacacctgcgtcaccacatcactgccgacggttactaccgcggccgcaaggtcatcgctaagtaa

SEQ ID NO: 40 - DNA, 954 bp, Escherichia coli
atgtatacgaagattattggtactggcagctatctgcccgaacaagtgcggacaaacgccgatttggaaaaaatggtggacacctctgacgagtggattgtcactcgtaccggtatccgcgaacgccacattgccgcgccaaacgaaaccgtttcaaccatgggctttgaagcggcgacacgcgcaattgagatggcgggcattgagaaagaccagattggcctgatcgttgtggcaacgacttctgctacgcacgctttcccgagcgcagcttgtcagattcaaagcatgttgggcattaaaggttgcccggcatttgacgttgcagcagcctgcgcaggtttcacctatgcattaagcgtagccgatcaatacgtgaaatctggggcggtgaagtatgctctggtcgtcggttccgatgtactggcgcgcacctgcgatccaaccgatcgtgggactattattatttttggcgatggcgcgggcgctgcggtgctggctgcctctgaagagccgggaatcatttccacccatctgcatgccgacggtagttatggtgaattgctgacgctgccaaacgccgaccgcgtgaatccagagaattcaattcatctgacgatggcgggcaacgaagtcttcaaggttgcggtaacggaactggcgcacatcgttgatgagacgctggcggcgaataatcttgaccgttctcaactggactggctggttccgcatcaggctaacctgcgtattatcagtgcaacggcgaaaaaactcggtatgtctatggataatgtcgtggtgacgctggatcgccacggtaatacctctgcggcctctgtcccgtgcgcgctggatgaagctgtacgcgacgggcgcattaagccggggcagttggttctgcttgaagcctttggcggtggattcacctggggctccgcgctggttcgtttctag

SEQ ID NO: 41 - DNA, 930 bp, Escherichia coli
atgacgcaatttgcatttgtgttccctggacagggttctcaaaccgttggaatgctggctgatatggcggcgagctatccaattgtcgaagaaacgtttgctgaagcttctgcggcgctgggctacgacctgtgggcgctgacccagcaggggccagctgaagaactgaataaaacctggcaaactcagcctgcgctgttgactgcatctgttgcgctgtatcgcgtatggcagcagcagggcggtaaagcaccggcaatgatggccggtcacagcctgggggaatactccgcgctggtttgcgctggtgtgattgatttcgctgatgcggtgcgtctggttgagatgcgcggcaagttcatgcaagaagccgtaccggaaggcacgggcgctatggcggcaatcatcggtctggatgatgcgtctattgcgaaagcgtgtgaagaagctgcagaaggtcaggtcgtttctccggtaaactttaactctccgggacaggtggttattgccggtcataaagaagcggttgagcgtgctggcgctgcctgtaaagcggcgggcgcaaaacgcgcgctgccgttaccagtgagcgtaccgtctcactgtgcgctgatgaaaccagcagccgacaaactggcagtagaattagcgaaaatcacctttaacgcaccaacagttcctgttgtgaataacgttgatgtgaaatgcgaaaccaatggtgatgccatccgtgacgcactggtacgtcagttgtataacccggttcagtggacgaagtctgttgagtacatggcagcgcaaggcgtagaacatctctatgaagtcggcccgggcaaagtgcttactggcctgacgaaacgcattgtcgacaccctgaccgcctcggcgctgaacgaaccttcagcgatggcagcggcgctcgagctttaa

SEQ ID NO: 42 - DNA, 735 bp, Escherichia coli
atgaattttgaaggaaaaatcgcactggtaaccggtgcaagccgcggaattggccgcgcaattgctgaaacgctcgcagcccgtggcgcgaaagttattggcactgcgaccagtgaaaatggcgctcaggcgatcagtgattatttaggtgccaacggcaaaggtctgatgttgaatgtgaccgacccggcatctatcgaatctgttctggaaaaaattcgcgcagaatttggtgaagtggatatcctggtcaataatgccggtatcactcgtgataacctgttaatgcgaatgaaagatgaagagtggaacgatattatcgaaaccaacctttcatctgttttccgtctgtcaaaagcggtaatgcgcgctatgatgaaaaagcgtcatggtcgtattatcactatcggttctgtggttggtaccatgggaaatggcggtcaggccaactacgctgcggcgaaagcgggcttgatcggcttcagtaaatcactggcgcgcgaagttgcgtcacgcggtattactgtaaacgttgttgctccgggctttattgaaacggacatgacacgtgcgctgagcgatgaccagcgtgcgggtatcctggcgcaggttcctgcgggtcgcctcggcggcgcacaggaaatcgccaacgcggttgcattcctggcatccgacgaagcagcttacatcacgggtgaaactttgcatgtgaacggcgggatgtacatggtctga

SEQ ID NO: 43 - DNA, 237 bp, Escherichia coli
atgagcactatcgaagaacgcgttaagaaaattatcggcgaacagctgggcgttaagcaggaagaagttaccaacaatgcttctttcgttgaagacctgggcgcggattctcttgacaccgttgagctggtaatggctctggaagaagagtttgatactgagattccggacgaagaagctgagaaaatcaccaccgttcaggctgccattgattacatcaacggccaccaggcgtaa

SEQ ID NO: 44 - DNA, 1434 bp, Escherichia coli
atgtttaagaatgcatttgctaacctgcaaaaggtcggtaaatcgctgatgctgccggtatccgtactgcctatcgcaggtattctgctgggcgtcggttccgcgaatttcagctggctgcccgccgttgtatcgcatgttatggcagaagcaggcggttccgtctttgcaaacatgccactgatttttgcgatcggtgtcgccctcggctttaccaataacgatggcgtatccgcgctggccgcagttgttgcctatggcatcatggttaaaaccatggccgtggttgcgccactggtactgcatttacctgctgaagaaatcgcctctaaacacctggcggatactggcgtactcggagggattatctccggtgcgatcgcagcgtacatgtttaaccgtttctaccgtattaagctgcctgagtatcttggcttctttgccggtaaacgctttgtgccgatcatttctggcctggctgccatctttactggcgttgtgctgtccttcatttggccgccgattggttctgcaatccagaccttctctcagtgggctgcttaccagaacccggtagttgcgtttggcatttacggtttcatcgaacgttgcctggtaccgtttggtctgcaccacatctggaacgtacctttccagatgcagattggtgaatacaccaacgcagcaggtcaggttttccacggcgacattccgcgttatatggcgggtgacccgactgcgggtaaactgtctggtggcttcctgttcaaaatgtacggtctgccagctgccgcaattgctatctggcactctgctaaaccagaaaaccgcgcgaaagtgggcggtattatgatctccgcggcgctgacctcgttcctgaccggtatcaccgagccgatcgagttctccttcatgttcgttgcgccgatcctgtacatcatccacgcgattctggcaggcctggcattcccaatctgtattcttctggggatgcgtgacggtacgtcgttctcgcacggtctgatcgacttcatcgttctgtctggtaacagcagcaaactgtggctgttcccgatcgtcggtatcggttatgcgattgtttactacaccatcttccgcgtgctgattaaagcactggatctgaaaacgccgggtcgtgaagacgcgactgaagatgcaaaagcgacaggtaccagcgaaatggcaccggctctggttgctgcatttggtggtaaagaaaacattactaacctcgacgcatgtattacccgtctgcgcgtcagcgttgctgatgtgtctaaagtggatcaggccggcctgaagaaactgggcgcagcgggcgtagtggttgctggttctggtgttcaggcgattttcggtactaaatccgataacctgaaaaccgagatggatgagtacatccgtaaccactaa

SEQ ID NO: 45 - DNA, 1251 bp, Escherichia coli
atggaaagtaaagtagttgttccggcacaaggcaagaagatcaccctgcaaaacggcaaactcaacgttcctgaaaatccgattatcccttacattgaaggtgatggaatcggtgtagatgtaaccccagccatgctgaaagtggtcgacgctgcagtcgagaaagcctataaaggcgagcgtaaaatctcctggatggaaatttacaccggtgaaaaatccacacaggtttatggtcaggacgtctggctgcctgctgaaactcttgatctgattcgtgaatatcgcgttgccattaaaggtccgctgaccactccggttggtggcggtattcgctctctgaacgttgccctgcgccaggaactggatctctacatctgcctgcgtccggtacgttactatcagggcactccaagcccggttaaacaccctgaactgaccgatatggttatcttccgtgaaaactcggaagacatttatgcgggtatcgaatggaaagcagactctgccgacgccgagaaagtgattaaattcctgcgtgaagagatgggggtgaagaaaattcgcttcccggaacattgtggtatcggtattaagccgtgttcggaagaaggcaccaaacgtctggttcgtgcagcgatcgaatacgcaattgctaacgatcgtgactctgtgactctggtgcacaaaggcaacatcatgaagttcaccgaaggagcgtttaaagactggggctaccagctggcgcgtgaagagtttggcggtgaactgatcgacggtggcccgtggctgaaagttaaaaacccgaacactggcaaagagatcgtcattaaagacgtgattgctgatgcattcctgcaacagatcctgctgcgtccggctgaatatgatgttatcgcctgtatgaacctgaacggtgactacatttctgacgccctggcagcgcaggttggcggtatcggtatcgcccctggtgcaaacatcggtgacgaatgcgccctgtttgaagccacccacggtactgcgccgaaatatgccggtcaggacaaagtaaatcctggctctattattctctccgctgagatgatgctgcgccacatgggttggaccgaagcggctgacttaattgttaaaggtatggaaggcgcaatcaacgcgaaaaccgtaacctatgacttcgagcgtctgatggatggcgctaaactgctgaaatgttcagagtttggtgacgcgatcatcgaaaacatgtaa

SEQ ID NO: 46 - DNA, 414 bp, Escherichia coli
atgagcgaagcacttaaaattctgaacaacatccgtactcttcgtgcgcaggcaagagaatgtacacttgaaacgctggaagaaatgctggaaaaattagaagttgttgttaacgaacgtcgcgaagaagaaagcgcggctgctgctgaagttgaagagcgcactcgtaaactgcagcaatatcgcgaaatgctgatcgctgacggtattgacccgaacgaactgctgaatagccttgctgccgttaaatctggcaccaaagctaaacgtgctcagcgtccggcaaaatatagctacgttgacgaaaacggcgaaactaaaacctggactggccaaggccgtactccagctgtaatcaaaaaagcaatggatgagcaaggtaaatccctcgacgatttcctgatcaagcaataa

SEQ ID NO: 47 - DNA, 1632 bp, Escherichia coli
atgaccaacatcaccaagagaagtttagtagcagctggcgttctggctgcgctaatggcagggaatgtcgcgctggcagctgatgtacccgcaggcgtcacactggcggaaaaacaaacactggtacgtaacaatggttcagaagttcagtcattagatccgcacaaaattgaaggtgttccggagtctaatatcagccgagacctgtttgaaggcttactggtcagcgatcttgacggtcatccagcacctggcgtcgctgaatcctgggataataaagacgcgaaagtctggaccttccatttgcgtaaagatgcgaaatggtctgatggcacgccagtcacagcacaagactttgtgtatagctggcaacgttctgttgatccgaacactgcttctccgtatgccagttatctgcaatatgggcatatcgccggtattgatgaaattcttgaagggaaaaaaccgattaccgatctcggcgtgaaagctattgatgatcacacattagaagtcaccttaagtgaacccgttccgtacttctataaattacttgttcacccatcaacttcaccggtgccaaaagccgctatcgagaaattcggcgaaaaatggacccagcctggtaatatcgtcaccaacggtgcctataccttaaaagattgggtcgtaaacgaacgaatcgttcttgaacgcagcccgacctactggaacaacgcgaaaaccgttattaaccaggtaacctatttgcctattgcttctgaagttaccgatgtcaaccgctaccgtagtggtgaaatcgacatgacgaataacagcatgccgatcgaattgttccagaagctgaaaaaagagatcccggacgaagttcacgttgatccatacctgtgcacttactattacgaaattaacaaccagaaaccgccattcaacgatgtgcgtgtgcgtaccgcactgaaactaggtatggaccgcgatatcattgttaataaagtgaaagcgcagggcaacatgcccgcctatggttacactccaccgtatactgatggcgcaaaattgactcagccagaatggtttggctggagccaggaaaaacgtaacgaagaagcgaaaaaactgctggctgaagcgggttataccgcagacaaaccgttgaccatcaacctgttgtataacacctccgatctgcataaaaagctggcgattgctgcctcttcattgtggaagaaaaacattggtgtaaacgtcaaactggttaaccaggagtggaaaacgttcctcgacacccgtcaccagggtacttttgatgtggcccgtgcaggctggtgtgctgactacaacgaaccaacttccttcctgaacaccatgctttcgaacagctcgatgaataccgcgcattataagagcccggcctttgacagcattatggcggaaacgctgaaagtgactgacgaggcgcagcgcacagctctgtacactaaagcagaacaacagctggataaggattcggccattgttcctgtttattactacgtgaatgcgcgtctggtgaaaccgtgggttggtggctataccggcaaagatccgctggataatacctatacccggaatatgtacattgtgaagcactaa

SEQ ID NO: 48 - DNA, 507 bp, Escherichia coli
atgtcacaaaccgttcatttccagggcaacccggttacagtcgccaattccatcccgcaggcgggtagcaaagcgcagacttttactctcgtggcaaaagatctgtctgacgtcaccctcggtcagtttgcgggtaaacgcaaagtgctgaacattttcccgagtattgataccggtgtttgcgccgcatcagtacgtaagtttaaccaactggcaactgagatcgacaacaccgttgtgctgtgtatctctgccgatctgccgttcgcccagtctcgtttctgcggcgcagaaggtctgaacaacgttatcaccctctccactttccgtaacgctgaatttctgcaagcttacggtgtggcaattgctgatggcccactgaaaggtctggcagcgcgtgccgttgtggttattgacgaaaatgacaatgtgattttcagccagctggtggatgaaatcaccaccgagccggattacgaagcagctctggctgtactgaaagcataa

SEQ ID NO: 49 - DNA, 138 bp, Escherichia coli
atgaaatcgaaccgtcaggcacgtcatattcttggactggaccataaaatttctaaccagcgcaaaatagttaccgaaggtgacaaatccagcgtagtaaataacccaaccggcagaaaacgccccgctgaaaagtaa

SEQ ID NO: 50 - DNA, 342 bp, Escherichia coli
atgaaaatcactctcagcaaacgaatcggcctgctcgctattctgctgccttgcgcactggcattgagcacaactgttcatgccgaaactaacaaactggtgattgagtctggcgacagtgcacaaagccgccagcacgccgctatggaaaaagagcaatggaatgacacgcgcaatctgcgccagaaagtgaataaacgcactgaaaaagagtgggataaagccgacgccgcttttgataaccgcgataaatgtgagcaaagcgccaacatcaatgcctactgggagcccaatactttgcgctgcctggaccgtcgaactggccgcgttattaccccctaa

SEQ ID NO: 51 - DNA, 1533 bp, Escherichia coli
atgcgaattggcataccaagagaacggttaaccaatgaaacccgtgttgcagcaacgccaaaaacagtggaacagctgctgaaactgggttttaccgtcgcggtagagagcggcgcgggtcaactggcaagttttgacgataaagcgtttgtgcaagcgggcgctgaaattgtagaagggaatagcgtctggcagtcagagatcattctgaaggtcaatgcgccgttagatgatgaaattgcgttactgaatcctgggacaacgctggtgagttttatctggcctgcgcagaatccggaattaatgcaaaaacttgcggaacgtaacgtgaccgtgatggcgatggactctgtgccgcgtatctcacgcgcacaatcgctggacgcactaagctcgatggcgaacatcgccggttatcgcgccattgttgaagcggcacatgaatttgggcgcttctttaccgggcaaattactgcggccgggaaagtgccaccggcaaaagtgatggtgattggtgcgggtgttgcaggtctggccgccattggcgcagcaaacagtctcggcgcgattgtgcgtgcattcgacacccgcccggaagtgaaagaacaagttcaaagtatgggcgcggaattcctcgagctggattttaaagaggaagctggcagcggcgatggctatgccaaagtgatgtcggacgcgttcatcaaagcggaaatggaactctttgccgcccaggcaaaagaggtcgatatcattgtcaccaccgcgcttattccaggcaaaccagcgccgaagctaattacccgtgaaatggttgactccatgaaggcgggcagtgtgattgtcgacctggcagcccaaaacggcggcaactgtgaatacaccgtgccgggtgaaatcttcactacggaaaatggtgtcaaagtgattggttataccgatcttccgggccgtctgccgacgcaatcctcacagctttacggcacaaacctcgttaatctgctgaaactgttgtgcaaagagaaagacggcaatatcactgttgattttgatgatgtggtgattcgcggcgtgaccgtgatccgtgcgggcgaaattacctggccggcaccgccgattcaggtatcagctcagccgcaggcggcacaaaaagcggcaccggaagtgaaaactgaggaaaaatgtacctgctcaccgtggcgtaaatacgcgttgatggcgctggcaatcattctttttggctggatggcaagcgttgcgccgaaagaattccttgggcacttcaccgttttcgcgctggcctgcgttgtcggttattacgtggtgtggaatgtatcgcacgcgctgcatacaccgttgatgtcggtcaccaacgcgatttcagggattattgttgtcggagcactgttgcagattggccagggcggctgggttagcttccttagttttatcgcggtgcttatagccagcattaatattttcggtggcttcaccgtgactcagcgcatgctgaaaatgttccgcaaaaattaa

SEQ ID NO: 52 - DNA, 468 bp, Escherichia coli
atgattaaacgcgtattggttgtttcaatggtaggtctgtctcttgtcggttgtgttaataacgacaccctgtcaggggatgtttataccgcttctgaagcgaaacaagtacagaatgtcagctatggcaccatcgttaacgtacgtccggtacagattcagggcggtgatgattccaacgttatcggtgcaattggcggtgctgttcttggtggtttcctggggaatactgttggtggcggaaccgggcgttctctggctactgcagcaggcgctgttgcaggtggcgtagctggtcagggcgtacagagtgcaatgaacaaaacgcagggtgtcgagctggaaattcgtaaagacgatggtaataccatcatggtggtacagaaacaaggcaacactcgtttctctccgggccaacgtgtcgtactggccagcaatggcagtcaggtgaccgtttctccgcgctaa

SEQ ID NO: 53 - DNA, 582 bp, Escherichia coli
atgtcattcgaattacctgcactaccatatgctaaagatgctctggcaccgcacatttctgcggaaaccatcgagtatcactacggcaagcaccatcagacttatgtcactaacctgaacaacctgattaaaggtaccgcgtttgaaggtaaatcactggaagagattattcgcagctctgaaggtggcgtattcaacaacgcagctcaggtctggaaccatactttctactggaactgcctggcaccgaacgccggtggcgaaccgactggaaaagtcgctgaagctatcgccgcatcttttggcagctttgccgatttcaaagcgcagtttactgatgcagcgatcaaaaactttggttctggctggacctggctggtgaaaaacagcgatggcaaactggctatcgtttcaacctctaacgcgggtactccgctgaccaccgatgcgactccgctgctgaccgttgatgtctgggaacacgcttattacatcgactatcgcaatgcacgtcctggctatctggagcacttctgggcgctggtgaactgggaattcgtagcgaaaaatctcgctgcataa

SEQ ID NO: 54 - DNA, 237 bp, Escherichia coli
atgaaagctactaaactggtactgggcgcggtaatcctgggttctactctgctggcaggttgctccagcaacgctaaaatcgatcagctgtcttctgacgttcagactctgaacgctaaagttgaccagctgagcaacgacgtgaacgcaatgcgttccgacgttcaggctgctaaagatgacgcagctcgtgctaaccagcgtctggacaacatggctactaaataccgcaagtaa

SEQ ID NO: 55 - DNA, 300 bp, Escherichia coli
atggcgcttacaaaagctgaaatgtcagaatatctgtttgataagcttgggcttagcaagcgggatgccaaagaactggttgaactgtttttcgaagagatccgtcgcgctctggaaaacggcgaacaggtgaaactctctggttttggtaacttcgatctgcgtgataagaatcaacgcccgggacgtaacccgaaaacgggcgaggatattcccattacagcacggcgcgtggtgaccttcagacccgggcagaagttaaaaagccgggtcgaaaacgcttcgcccaaagacgagtaa

SEQ ID NO: 56 - DNA, 2388 bp, Escherichia coli
atgaaattcagtgaactgtggttacgcgaatgggtgaacccggcgattgatagcgatgcgctggcaaatcaaatcactatggcgggcctggaagttgacggtgtagaaccggttgccggcagcttccacggcgtggtcgttggtgaagtggttgagtgtgcgcagcatccgaacgctgacaaactgcgtgtgacaaaagtgaatgtcggcggcgatcgcctgctggacatcgtctgcggtgcgccaaactgccgtcagggcctgcgtgtagcggtagcgaccattggtgctgttctgccgggtgatttcaaaattaaagcggcgaaactgcgtggcgaaccgtctgaagggatgctgtgctccttctctgaactgggcatttctgacgatcacagcggcattatcgaactgcctgcggatgcgccgattggcaccgatatccgtgaatacctgaaacttgatgacaacaccatcgaaatcagcgtgacgccaaaccgtgccgactgcttaggcatcattggtgttgcgcgtgacgttgccgtgctgaaccagctgccgctggttcaaccggaaatcgttccggttggtgcgaccatcgacgacacgctgccgattacagtcgaagcgccggaagcctgcccgcgttatcttggccgtgtggtaaaaggcattaacgttaaagcgccaactccgctgtggatgaaagaaaaactgcgtcgttgcgggatccgttctatcgatgcagttgttgacgtcaccaactatgtgctgctcgaactgggccagccgatgcacgctttcgataaagatcgcattgaaggcggcattgtggtgcggatggcgaaagagggcgaaacgctggtgctgctcgacggtactgaagcgaagctgaatgctgacactctggtcatcgccgaccacaacaaggcgctggcgatgggcggcatcttcggtggcgaacactctggcgtgaatgacgaaacacaaaacgtgctgctggaatgcgcgttctttagcccgctgtctatcaccggtcgtgctcgtcgtcatggcctgcataccgatgcgtctcaccgttatgagcgtggcgttgatccggcactgcagcacaaagcgatggaacgtgcgacccgtctgctgatcgacatctgcggtggtgaggctggcccggtaattgatatcaccaacgaagcaacgctgccgaagcgtgcaaccatcactctacgtcgtagcaaactggatcgcctgatcggccatcatattgcggatgagcaggtaactgacattctgcgtcgtctcggctgcgaagtgaccgaaggcaaagacgaatggcaggcagttgcgccgagctggcgtttcgatatggagattgaagaagatctggttgaagaagtcgcgcgtgtttacggctacaacaacatcccggatgagccggtacaggcaagcctgattatgggtactcaccgtgaagctgacctgtcgctcaagcgcgtgaaaacgctgctcaacgacaaaggctatcaggaagtgatcacctacagcttcgttgatccgaaagtgcagcagatgatccatccaggcgttgaagccttactgctgccaagcccgatctctgttgaaatgtcagcaatgcgtctttctctgtggactggcctgctggcaaccgtggtgtacaaccagaaccgtcagcagaaccgtgtgcgcattttcgaaagcggtctgcgtttcgtaccagatactcaggcaccgttgggcattcgtcaggatctgatgttagccggtgtgatttgcggtaaccgttacgaagagcactggaacctggcaaaagagaccgttgatttctatgatttgaaaggcgatcttgaatccgttctcgacctgaccggtaaactgaatgaggttgagttccgtgcagaagcgaatccggcactgcatccggggcaatccgcagcgatttatctgaaaggtgaacgtattggttttgttggggttgttcatcctgaactggaacgtaaactggatcttaacggtcgcactctggtgttcgaactggagtggaacaagctcgcagaccgcgtggtgcctcaggcgcgcgagatttctcgcttcccggcgaaccgtcgtgacatcgcggtggtggtcgcagaaaacgttcccgcagcggatattttatccgaatgtaagaaagttggcgtaaatcaggtagttggcgtaaacttatttgacgtgtaccgcggtaagggtgttgcggaggggtataagagcctcgccataagcctgatcctgcaagataccagccgtacactcgaagaagaggagattgccgctaccgtcgccaaatgtgtagaggcattaaaagagcgattccaggcatcattgagggattga

SEQ ID NO: 57 - DNA, 357 bp, Escherichia coli
atggctcgcgtaaaacgtggtgttattgcacgtgcacgtcacaagaaaattttgaaacaagctaaaggctactacggtgcgcgttctcgcgtataccgcgttgccttccaggctgttatcaaagctggtcagtatgcttaccgtgaccgtcgtcaacgtaagcgtcagttccgtcaactgtggattgcgcgtatcaacgcagcagcacgtcagaacggtatttcttacagcaaattcatcaatggcctgaaaaaagcctctgttgaaatcgaccgtaagatcctggctgatatcgcagtattcgacaaagtagcgttcaccgctctggttgaaaaagcgaaagcagctctggcataa

SEQ ID NO: 58 - DNA, 198 bp, Escherichia coli
atgccaaaaattaagaccgtacgcggtgctgctaagcgcttcaaaaaaaccggtaaaggtggttttaagcacaagcacgctaacctgcgtcacattctgaccaaaaaagcgaccaaacgtaaacgtcacctgcgtccgaaagccatggtttccaaaggcgatctgggcctggtaatcgcgtgcctgccgtacgcataa

SEQ ID NO: 59 - DNA, 1929 bp, Escherichia coli
atgcctgttataactcttcctgatggcagccaacgccattacgatcacgctgtaagccccatggatgttgcgctggacattggtccaggtctggcgaaagcctgtatcgcagggcgcgttaatggcgaactggttgatgcttgcgatctgattgaaaacgacgcacaactgtcgatcattaccgccaaagacgaagaaggtctggagatcattcgtcactcctgtgcgcacctgttagggcacgcgattaaacaactttggccgcataccaaaatggcaatcggcccggttattgacaacggtttttattacgacgttgatcttgaccgcacgttaacccaggaagatgtcgaagcactcgagaagcggatgcatgagcttgctgagaaaaactacgacgtcattaagaagaaagtcagctggcacgaagcgcgtgaaactttcgccaaccgtggggagagctacaaagtctccattcttgacgaaaacatcgcccatgatgacaagccaggtctgtacttccatgaagaatatgtcgatatgtgccgcggtccgcacgtaccgaacatgcgtttctgccatcatttcaaactaatgaaaacggcaggggcttactggcgtggcgacagcaacaacaaaatgttgcaacgtatttacggtacggcgtgggcagacaaaaaagcacttaacgcttacctgcagcgcctggaagaagccgcgaaacgcgaccaccgtaaaatcggtaaacagctcgacctgtaccatatgcaggaagaagcgccgggtatggtattctggcacaacgacggctggaccatcttccgtgaactggaagtgtttgttcgttctaaactgaaagagtaccagtatcaggaagttaaaggtccgttcatgatggaccgtgtcctgtgggaaaaaaccggtcactgggacaactacaaagatgcaatgttcaccacatcttctgagaaccgtgaatactgcattaagccgatgaactgcccgggtcacgtacaaattttcaaccaggggctgaagtcttatcgcgatctgccgctgcgtatggccgagtttggtagctgccaccgtaacgagccgtcaggttcgctgcatggcctgatgcgcgtgcgtggatttacccaggatgacgcgcatatcttctgtactgaagaacaaattcgcgatgaagttaacggatgtatccgtttagtctatgatatgtacagcacttttggcttcgagaagatcgtcgtcaaactctccactcgtcctgaaaaacgtattggcagcgacgaaatgtgggatcgtgctgaggcggacctggcggttgcgctggaagaaaacaacatcccgtttgaatatcaactgggtgaaggcgctttctacggtccgaaaattgaatttaccctgtatgactgcctcgatcgtgcatggcagtgcggtacagtacagctggacttctctttgccgtctcgtctgagcgcttcttatgtaggcgaagacaatgaacgtaaagtaccggtaatgattcaccgcgcaattctggggtcgatggaacgtttcatcggtatcctgaccgaagagttcgctggtttcttcccgacctggcttgcgccggttcaggttgttatcatgaatattaccgattcacagtctgaatacgttaacgaattgacgcaaaaactatcaaatgcgggcattcgtgttaaagcagacttgagaaatgagaagattggctttaaaatccgcgagcacactttgcgtcgcgtcccatatatgctggtctgtggtgataaagaggtggaatcaggcaaagttgccgttcgcacccgccgtggtaaagacctgggaagcatggacgtaaatgaagtgatcgagaagctgcaacaagagattcgcagccgcagtcttaaacaattggaggaataa

SEQ ID NO: 60 - DNA, 1344 bp, Escherichia coli
atggatcagacatattctctggagtcattcctcaaccatgtccaaaagcgcgacccgaatcaaaccgagttcgcgcaagccgttcgtgaagtaatgaccacactctggccttttcttgaacaaaatccaaaatatcgccagatgtcattactggagcgtctggttgaaccggagcgcgtgatccagtttcgcgtggtatgggttgatgatcgcaaccagatacaggtcaaccgtgcatggcgtgtgcagttcagctctgccatcggcccgtacaaaggcggtatgcgcttccatccgtcagttaacctttccattctcaaattcctcggctttgaacaaaccttcaaaaatgccctgactactctgccgatgggcggtggtaaaggcggcagcgatttcgatccgaaaggaaaaagcgaaggtgaagtgatgcgtttttgccaggcgctgatgactgaactgtatcgccacctgggcgcggataccgacgttccggcaggtgatatcggggttggtggtcgtgaagtcggctttatggcggggatgatgaaaaagctctccaacaataccgcctgcgtcttcaccggtaagggcctttcatttggcggcagtcttattcgcccggaagctaccggctacggtctggtttatttcacagaagcaatgctaaaacgccacggtatgggttttgaagggatgcgcgtttccgtttctggctccggcaacgtcgcccagtacgctatcgaaaaagcgatggaatttggtgctcgtgtgatcactgcgtcagactccagcggcactgtagttgatgaaagcggattcacgaaagagaaactggcacgtcttatcgaaatcaaagccagccgcgatggtcgagtggcagattacgccaaagaatttggtctggtctatctcgaaggccaacagccgtggtctctaccggttgatatcgccctgccttgcgccacccagaatgaactggatgttgacgccgcgcatcagcttatcgctaatggcgttaaagccgtcgccgaaggggcaaatatgccgaccaccatcgaagcgactgaactgttccagcaggcaggcgtactatttgcaccgggtaaagcggctaatgctggtggcgtcgctacatcgggcctggaaatggcacaaaacgctgcgcgcctgggctggaaagccgagaaagttgacgcacgtttgcatcacatcatgctggatatccaccatgcctgtgttgagcatggtggtgaaggtgagcaaaccaactacgtgcagggcgcgaacattgccggttttgtgaaggttgccgatgcgatgctggcgcagggtgtgatttaa

SEQ ID NO: 61 - DNA, 996 bp, Escherichia coli
atgactatcaaagtaggtatcaacggttttggccgtatcggtcgcattgttttccgtgctgctcagaaacgttctgacatcgagatcgttgcaatcaacgacctgttagacgctgattacatggcatacatgctgaaatatgactccactcacggccgtttcgacggtaccgttgaagtgaaagacggtcatctgatcgttaacggtaaaaaaatccgtgttaccgctgaacgtgatccggctaacctgaaatgggacgaagttggtgttgacgttgtcgctgaagcaactggtctgttcctgactgacgaaactgctcgtaaacacatcaccgctggtgcgaagaaagtggttatgactggtccgtctaaagacaacactccgatgttcgttaaaggcgctaacttcgacaaatatgctggccaggacatcgtttccaacgcttcctgcaccaccaactgcctggctccgctggctaaagttatcaacgataacttcggcatcatcgaaggtctgatgaccaccgttcacgctactaccgctactcagaaaaccgttgatggcccgtctcacaaagactggcgcggcggccgcggcgcttcccagaacatcatcccgtcctctaccggtgctgctaaagctgtaggtaaagtactgccagaactgaatggcaaactgactggtatggcgttccgcgttccgaccccgaacgtatctgtagttgacctgaccgttcgtctggaaaaagctgcaacttacgagcagatcaaagctgccgttaaagctgctgctgaaggcgaaatgaaaggcgttctgggctacaccgaagatgacgtagtatctaccgatttcaacggcgaagtttgcacttccgtgttcgatgctaaagctggtatcgctctgaacgacaacttcgtgaaactggtatcctggtacgacaacgaaaccggttactccaacaaagttctggacctgatcgctcacatctccaaataa

SEQ ID NO: 62 - DNA, 801 bp, Escherichia coli
atggagattaccactcttcaaattgtgctggtatttatcgtagcctgtatcgcaggtatgggatcaatcctcgatgaatttcagtttcaccgtccgctaatcgcgtgtaccctggtgggtatcgttcttggggatatgaaaaccggtattattatcggtggtacgctggaaatgatcgcgctgggctggatgaacatcggtgctgcagttgcgcctgacgccgctctggcttctatcatttctaccattctggttatcgcaggtcatcagagcattggtgcaggtatcgcactggcaatccctctggccgctgcgggccaggtactgaccatcatcgttcgtactattaccgttgctttccagcacgctgcggataaggctgctgataacggcaacctgacagcgatttcctggatccacgtttcttctctgttcctgcaagcaatgcgtgtggctattccggccgtcatcgttgcgctgtctgttggtaccagcgaagtacagaacatgctgaatgcgattccggaagtggtgaccaatggtctgaatatcgccggtggcatgatcgtggtggttggttatgcgatggttatcaacatgatgcgtgctggctacctgatgccgttcttctacctcggcttcgtaaccgcagcattcaccaactttaacctggttgctctgggtgtgattggtactgttatggcagtgctctacatccaacttagcccgaaatacaaccgcgtagccggtgcgcctgctcaggcagctggtaacaacgatctcgataacgaactggactaa

SEQ ID NO: 63 - DNA, 210 bp, Escherichia coli
atggcaaagattaaaggtcaggttaagtggttcaacgagtctaaaggttttggcttcattactccggctgatggcagcaaagatgtgttcgtacacttctccgctatccagggtaatggcttcaaaactctggctgaaggtcagaacgttgagttcgaaattcaggacggccagaaaggtccggcagctgttaacgtaacagctatctga

SEQ ID NO: 64 - DNA, 144 bp, Escherichia coli
atgtgtggcattttcagtaaagaagtcctgagtaaacacgttgacgttgaataccgcttctctgccgagccttatattggtgcctcatgcagtaatgtgtcagttttatctatgttatgcctgcgggcgaagaaaacaatctaa

SEQ ID NO: 65 - DNA, 801 bp, Escherichia coli
atgaaattagcacatctgggacgtcaggcattgatgggtgtgatggccgtggcgctggttgcgggcatgagcgttaaaagttttgcagatgaaggtctgcttaataaagttaaagagcgcggcacgctgctggtagggctggaaggaacttatccgccgttcagttttcagggagatgacggcaaattaaccggttttgaagtggaatttgcccaacagctggcaaaacatcttggcgttgaggcgtcactaaaaccgaccaaatgggacggtatgctggcgtcgctggactctaaacgtattgatgtggtgattaatcaggtcaccatttctgatgagcgcaagaaaaaatacgatttctcaaccccgtacaccatttctggtattcaggcgctggtgaaaaaaggtaacgaaggcaccattaaaacagccgatgatctgaaaggcaaaaaagtgggggtcggtctgggcaccaactatgaagagtggctgcggcagaatgttcagggcgtcgatgtgcgtacctatgatgatgacccgaccaaatatcaggatctgcgcgtagggcgtatcgatgcgatcctcgttgatcgtctggcggcgctggatctggtgaagaaaaccaacgatacgctggcagtaaccggtgaagcattctcccgtcaggagtctggcgtggcgctgcgtaaaggaaatgaggacctgctgaaagcagtgaatgatgcaattgcggaaatgcaaaaagatggcactctgcaagccctttccgaaaaatggtttggtgctgatgtgaccaaataa

SEQ ID NO: 66 - DNA, 330 bp, Escherichia coli
atggaaactaccaagccttcattccaggacgtactggaatttgttcgtctgttccgtcgtaagaacaaactgcaacgtgaaattcaggacgttgagaaaaagatccgtgacaaccagaagcgcgtcctgctgctggacaacctgagcgattacatcaagccggggatgagcgttgaagcaatccagggcatcatcgccagcatgaaaggtgactatgaagatcgcgttgacgattacatcatcaaaaatgccgagctctccaaagaacgccgcgatatctccaaaaagctgaaagctatgggcgaaatgaaaaacggcgaagcgaagtaa

SEQ ID NO: 67 - DNA, 1407 bp, Escherichia coli
atgtccaagcaacagatcggcgtagtcggtatggcagtgatgggacgcaaccttgcgctcaacatcgaaagccgtggttataccgtctctattttcaaccgttcccgtgagaagacggaagaagtgattgccgaaaatccaggcaagaaactggttccttactatacggtgaaagagtttgtcgaatctctggaaacgcctcgtcgcatcctgttaatggtgaaagcaggtgcaggcacggatgctgctattgattccctcaaaccatatctcgataaaggagacatcatcattgatggtggtaacaccttcttccaggacactattcgtcgtaatcgtgagctttcagcagagggctttaacttcatcggtaccggtgtttctggcggtgaagagggggcgctgaaaggtccttctattatgcctggtggccagaaagaagcctatgaattggtagcaccgatcctgaccaaaatcgccgccgtagctgaagacggtgaaccatgcgttacctatattggtgccgatggcgcaggtcactatgtgaagatggttcacaacggtattgaatacggcgatatgcagctgattgctgaagcctattctctgcttaaaggtggcctgaacctcaccaacgaagaactggcgcagacctttaccgagtggaataacggtgaactgagcagttacctgatcgacatcaccaaagatatcttcaccaaaaaagatgaagacggtaactacctggttgatgtgatcctggatgaagcggctaacaaaggtaccggtaaatggaccagccagagcgcgctggatctcggcgaaccgctgtcgctgattaccgagtctgtgtttgcacgttatatctcttctctgaaagatcagcgtgttgccgcatctaaagttctctctggtccgcaagcacagccagcaggcgacaaggctgagttcatcgaaaaagttcgtcgtgcgctgtatctgggcaaaatcgtttcttacgcccagggcttctctcagctgcgtgctgcgtctgaagagtacaactgggatctgaactacggcgaaatcgcgaagattttccgtgctggctgcatcatccgtgcgcagttcctgcagaaaatcaccgatgcttatgccgaaaatccacagatcgctaacctgttgctggctccgtacttcaagcaaattgccgatgactaccagcaggcgctgcgtgatgtcgttgcttatgcagtacagaacggtattccggttccgaccttctccgcagcggttgcctattacgacagctaccgtgctgctgttctgcctgcgaacctgatccaggcacagcgtgactattttggtgcgcatacttataagcgtattgataaagaaggtgtgttccataccgaatggctggattaa

SEQ ID NO: 68 - DNA, 285 bp, Escherichia coli
atgaaacgcaagattattgtcgcttgcggaggcgcggttgcgacctctacgatggcggcggaagaaattaaagagttgtgtcagaatcataatattcctgttgaattaatccagtgtcgggttaatgaaatagaaacctatatggatggtgtgcatttgatatgcaccactgccaaagtggatcgtagttttggcgatattccgttagttcacggcatgccttttatttctggtatcggtatcgaagcattacaaaataaaattctgactatcttacaggggtga

SEQ ID NO: 69 - DNA, 453 bp, Escherichia coli
atgactaacctgtttgttcgtagcggaatttcttttgtcgatcgtagcgaagttttaacccatatcggtaatgagatgctcgccaaaggtgtggttcatgatacctggccacaggcattaattgccagagaagcagaattccctaccgggataatgcttgagcagcacgctattgcaataccgcattgtgaggcgattcatgctaagtcgtcagccatttatctgttaaggccaacaaataaagttcattttcagcaagcggatgatgataacgacgtggcggtatcgttggttattgcgttgattgtggaaaatccgcagcagcaattgaaacttttacgctgtttatttggcaagttacaacagcccgatatcgtcgagacactaatcactcttcctgaaacccagttaaaggaatacttcacaaagtatgttttagattcagacgaataa

SEQ ID NO: 70 - DNA, 1263 bp, Escherichia coli
atgaaaacgttaattgcccggcataaagctggtgaacatatcggcatatgttcagtctgttctgcccatccgttggttatcgaagcggcgctggcatttgatcgcaacagcacgcgcaaagtgctgattgaagcaacgtcaaaccaggtcaatcaatttggcggttataccggaatgacaccggcagactttcgcgaatttgtttttacgattgccgataaagttgggtttgcacgcgaacgcattattctcggcggcgatcatctggggccaaactgctggcagcaagaaaatgcggatgcggcgatggaaaaatccgtcgagctggtaaaggaatatgttcgtgccggcttcagtaaaattcatcttgatgcgtcaatgtcctgcgcgggggatcccataccgttagcaccagaaacggttgcggaacgagctgctgtgctttgctttgctgcggaaagtgtggcgacagattgccagcgtgagcaactgagctatgtcattggcaccgaagttccggttccgggcggtgaggccagcgccattcagtcagtacacatcacccatgttgaagatgccgccaatactttacgtacgcatcaaaaggcctttattgcccgtgggctgacagaggcgttaacacgtgtgattgccatcgtggtgcagccgggtgtggaatttgatcacagcaatattatccattatcagccgcaggaagcgcagccgctggcgcaatggatagaaaacacccgaatggtttatgaagcacattctaccgattaccagacccggacggcttattgggaattagtccgcgatcactttgcaatattgaaagtcggtcccgcattaacctttgctttacgcgaggcgatatttgcactggcacaaattgagcaggaacttatcgcccctgaaaatcgcagcggttgcctggcggtaattgaagaagtgatgctcgacgaaccgcaatactggaaaaaatattatcgtacgggttttaacgattcattactggatattcgttacagcctgtcggatcgtattcgttattactggccgcatagtcggattaaaaatagcgtcgaaacgatgatggtgaatcttgaaggcgtggacatcccactgggcatgattagtcagtatcttcccaaacaatttgaacgcattcagtccggggaattatcagcaataccgcatcagctgattatggataaaatttatgatgttttgcgcgcctatcgctacggctgtgcggaataa

SEQ ID NO: 71 - DNA, 855 bp, Escherichia coli
atgtacgtggtatcgacaaagcagatgctgaacaacgcacagcgcggcggttatgcggttccggcattcaatattcacaatctcgaaacgatgcaagtggtggtagaaaccgctgccaacctgcatgcgccggtcatcatcgccggaacgcctggcacatttactcatgctggtacagaaaatctgttggcgctggtcagcgcgatggcgaagcaatatcaccatccactggcaattcatctcgaccatcacacgaaatttgacgatatcgctcagaaggttcgttctggcgtgcgctcagtcatgattgacgcctcgcatttgccttttgcgcaaaatatttcacgggtcaaagaggtggtggatttttgccatcgctttgatgtcagcgtcgaggcggagctggggcaacttggcggccaggaagatgatgtgcaagtcaatgaagccgatgcgttgtacaccaaccccgctcaggcgcgtgaatttgccgaggcaaccggaattgattccctggcggtcgccatcggcacggctcatgggatgtatgccagcgcaccggcgcttgatttttctagactggagaacattcgccagtgggtgaacttaccgctggtgctgcatggcgcgtcagggttatcgactaaggatattcagcaaaccatcaaactggggatatgcaaaatcaacgttgcaacggagctgaaaaatgccttctcgcaggcgttaaaaaattacctgaccgagcaccctgaagcgaccgatccccgggattatttgcagtcggctaaatccgcaatgcgcgatgtggtgagcaaagtgattgccgattgtggctgcgagggcagggcataa

SEQ ID NO: 72 - DNA, 567 bp, Escherichia coli
atggtcaaatctcaaccgattttgagatatatcttgcgcgggattcccgcgattgcagtagcggttctgctttctgcatgtagtgcaaataacaccgcaaagaatatgcatcctgagacacgtgcagtgggtagtgaaacatcatcactgcaagcttctcaggatgaatttgaaaacctggttcgtaatgtcgacgtaaaatcgcgaattatggatcagtatgctgactggaaaggcgtacgttatcgtctgggcggcagcactaaaaaaggtatcgattgttctggtttcgtacagcgtacattccgtgagcaatttggcttagaacttccgcgttcgacttacgaacagcaggaaatgggtaaatctgtttcccgcagtaatttgcgtacgggtgatttagttctgttccgtgccggttcaacgggacgccatgtcggtatttatatcggcaacaatcagtttgtccatgcttccaccagcagtggtgttattatttccagcatgaatgaaccgtactggaagaagcgttacaacgaagcacgccgggttctcagccgcagctaa

SEQ ID NO: 73 - DNA, 285 bp, Escherichia coli
atgtttactatcaacgcagaagtacgtaaagagcagggtaagggtgcgagccgccgcctgcgtgccgctaacaagttcccggcaatcatctacggtggcaaagaagcgccgctggctatcgagctggatcacgacaaagtcatgaacatgcaagctaaagctgaattctacagcgaagttctgaccatcgttgttgacggtaaagaaatcaaagttaaagctcaggacgtacagcgtcacccgtacaaaccgaagctgcagcacatcgacttcgttcgcgcttaa

SEQ ID NO: 74 - DNA, 1104 bp, Escherichia coli
atgaaagttaaagtactgtccctcctggtcccagctctgctggtagcaggcgcagcaaacgctgctgaagtttacaacaaagacggcaacaaattagatctgtacggtaaagtagacggcctgcactatttctctgacaacaaagatgtagatggcgaccagacctacatgcgtcttggcttcaaaggtgaaactcaggttactgaccagctgaccggttacggccagtgggaatatcagatccagggcaacagcgctgaaaacgaaaacaactcctggacccgtgtggcattcgcaggtctgaaattccaggatgtgggttctttcgactacggtcgtaactacggcgttgtttatgacgtaacttcctggaccgacgtactgccagaattcggtggtgacacctacggttctgacaacttcatgcagcagcgtggtaacggcttcgcgacctaccgtaacactgacttcttcggtctggttgacggcctgaactttgctgttcagtaccagggtaaaaacggcaacccatctggtgaaggctttactagtggcgtaactaacaacggtcgtgacgcactgcgtcaaaacggcgacggcgtcggcggttctatcacttatgattacgaaggtttcggtatcggtggtgcgatctccagctccaaacgtactgatgctcagaacaccgctgcttacatcggtaacggcgaccgtgctgaaacctacactggtggtctgaaatacgacgctaacaacatctacctggctgctcagtacacccagacctacaacgcaactcgcgtaggttccctgggttgggcgaacaaagcacagaacttcgaagctgttgctcagtaccagttcgacttcggtctgcgtccgtccctggcttacctgcagtctaaaggtaaaaacctgggtcgtggctacgacgacgaagatatcctgaaatatgttgatgttggtgctacctactacttcaacaaaaacatgtccacctacgttgactacaaaatcaacctgctggacgacaaccagttcactcgtgacgctggcatcaacactgataacatcgtagctctgggtctggtttaccagttctaa

SEQ ID NO: 75 - DNA, 501 bp, Escherichia coli
atgcacgagaatcaacaaccacaaaccgaggcttttgagctgagtgcggcagagcgtgaagcgatcgagcacgagatgcaccactacgaagacccgcgtgcggcgtccattgaagcgctgaaaatcgttcagaagcagcgtggctgggtgccggatggtgcgatccacgcgatcgccgatgtgctgggtattccggcaagcgacgtcgaaggtgtggcaacgttctacagtcagatcttccgccagccggttggtcgccatgtgatccgttattgtgacagcgtggtctgtcatatcaacggttatcagggtattcaggcggcgctcgagaaaaagctgaacatcaaaccagggcaaacgacatttgatggccgctttacgctgctgccaacttgctgcctggggaactgtgataaagggccaaacatgatgatcgatgaggacactcacgcgcatctgaccccggaagcgatccctgaactgctggagcggtataaatga

SEQ ID NO: 76 - DNA, 1203 bp, Escherichia coli
atgtcgagtaagttagtactggttctgaactgcggtagttcttcactgaaatttgccatcatcgatgcagtaaatggtgaagagtacctttctggtttagccgaatgtttccacctgcccgaagcacgtatcaaatggaaaatggacggcaataaacaggaagcggctttaggtgcaggcgccgctcacagcgaagcgctcaactttatcgttaatactattctggcacaaaaaccagaactgtctgcgcagctgactgctatcggtcaccgtatcgtacacggcggcgaaaagtataccagctccgtagtgatcgatgagtctgttattcagggtatcaaagatgcagcttcttttgcaccgctgcacaacccggctcacctgatcggtatcgaagaagctctgaaatctttcccacagctgaaagacaaaaacgttgctgtatttgacaccgcgttccaccagactatgccggaagagtcttacctctacgccctgccttacaacctgtacaaagagcacggcatccgtcgttacggcgcgcacggcaccagccacttctatgtaacccaggaagcggcaaaaatgctgaacaaaccggtagaagaactgaacatcatcacctgccacctgggcaacggtggttccgtttctgctatccgcaacggtaaatgcgttgacacctctatgggcctgaccccgctggaaggtctggtcatgggtacccgttctggtgatatcgatccggcgatcatcttccacctgcacgacaccctgggcatgagcgttgacgcaatcaacaaactgctgaccaaagagtctggcctgctgggtctgaccgaagtgaccagcgactgccgctatgttgaagacaactacgcgacgaaagaagacgcgaagcgcgcaatggacgtttactgccaccgcctggcgaaatacatcggtgcctacactgcgctgatggatggtcgtctggacgctgttgtattcactggtggtatcggtgaaaatgccgcaatggttcgtgaactgtctctgggcaaactgggcgtgctgggctttgaagttgatcatgaacgcaacctggctgcacgtttcggcaaatctggtttcatcaacaaagaaggtacccgtcctgcggtggttatcccaaccaacgaagaactggttatcgcgcaagacgcgagccgcctgactgcctga

SEQ ID NO: 77 - DNA, 1221 bp, Escherichia coli
atgaaacgtgcagtgattactggcctgggcattgtttccagcatcggtaataaccagcaggaagtcctggcatctctgcgtgaaggacgttcagggatcactttctctcaggagctgaaggattccggcatgcgtagccacgtctggggcaacgtaaaactggataccactggcctcattgaccgcaaagttgtgcgctttatgagcgacgcatccatttatgcattcctttctatggagcaggcaatcgctgatgcgggcctctctccggaagcttaccagaataacccgcgcgttggcctgattgcaggttccggcggcggctccccgcgtttccaggtgttcggcgctgacgcaatgcgcggcccgcgcggcctgaaagcggttggcccgtatgtggtcaccaaagcgatggcatccggcgtttctgcctgcctcgccaccccgtttaaaattcatggcgttaactactccatcagctccgcgtgtgcgacttccgcacactgtatcggtaacgcagtagagcagatccaactgggcaaacaggacatcgtgtttgctggcggcggcgaagagctgtgctgggaaatggcttgcgaattcgacgcaatgggtgcgctgtctactaaatacaacgacaccccggaaaaagcctcccgtacttacgacgctcaccgtgacggtttcgttatcgctggcggcggcggtatggtagtggttgaagagctggaacacgcgctggcgcgtggtgctcacatctatgctgaaatcgttggctacggcgcaacctctgatggtgcagacatggttgctccgtctggcgaaggcgcagtacgctgcatgaagatggcgatgcatggcgttgataccccaatcgattacctgaactcccacggtacttcgactccggttggcgacgtgaaagagctggcagctatccgtgaagtgttcggcgataagagcccggcgatttctgcaaccaaagccatgaccggtcactctctgggcgctgctggcgtacaggaagctatctactctctgctgatgctggaacacggctttatcgccccgagcatcaacattgaagagctggacgagcaggctgcgggtctgaacatcgtgaccgaaacgaccgatcgcgaactgaccaccgttatgtctaacagcttcggcttcggcggcaccaacgccacgctggtaatgcgcaagctgaaagattaa

SEQ ID NO: 78 - DNA, 972 bp, Escherichia coli
atgagtaagatttttgaagataactcgctgactatcggtcacacgccgctggttcgcctgaatcgcatcggtaacggacgcattctggcgaaggtggaatctcgtaaccccagcttcagcgttaagtgccgtatcggtgccaacatgatttgggatgccgaaaagcgcggcgtgctgaaaccaggcgttgaactggttgaaccgaccagcggtaataccgggattgcactggcctatgtagctgccgctcgcggttacaaactcaccctgaccatgccagaaaccatgagtattgaacgccgcaagctgctgaaagcgttaggtgcaaacctggtgctgacggaaggtgctaaaggcatgaaaggcgcaatccaaaaagcagaagaaattgtcgccagcaatccagagaaatacctgctgctgcaacaattcagcaatccggcaaaccctgaaattcacgaaaagaccaccggtccggagatatgggaagataccgacggtcaggttgatgtatttattgctggcgttgggactggcggtacgctgactggcgtcagccgctacattaaaggcaccaaaggcaagaccgatcttatctctgtcgccgttgagccaaccgattctccagttatcgcccaggcgctggcaggtgaagagattaaacctggcccgcataaaattcagggtattggcgctggttttatcccggctaacctcgatctcaagctggtcgataaagtcattggcatcaccaatgaagaagcgatttctaccgcgcgtcgtctgatggaagaagaaggtattcttgcaggtatctcttctggagcagctgttgccgcggcgttgaaactacaagaagatgaaagctttaccaacaagaatattgtggttattctaccatcatcgggtgagcgttatttaagcaccgcattgtttgccgatctcttcactgagaaagaattgcaacagtaa

SEQ ID NO: 79 - DNA, 258 bp, Escherichia coli
atgttccagcaagaagttaccattaccgctccgaacggtctgcacacccgccctgctgcccagtttgtaaaagaagctaagggcttcacttctgaaattactgtgacttccaacggcaaaagcgccagcgcgaaaagcctgtttaaactgcagactctgggcctgactcaaggtaccgttgtgactatctccgcagaaggcgaagacgagcagaaagcggttgaacatctggttaaactgatggcggaactcgagtaa

SEQ ID NO: 80 - DNA, 1728 bp, Escherichia coli
atgatttcaggcattttagcatccccgggtatcgctttcggtaaagctctgcttctgaaagaagacgaaattgtcattgaccggaaaaaaatttctgccgaccaggttgatcaggaagttgaacgttttctgagcggtcgtgccaaggcatcagcccagctggaaacgatcaaaacgaaagctggtgaaacgttcggtgaagaaaaagaagccatctttgaagggcatattatgctgctcgaagatgaggagctggagcaggaaatcatagccctgattaaagataagcacatgacagctgacgcagctgctcatgaagttatcgaaggtcaggcttctgccctggaagagctggatgatgaatacctgaaagaacgtgcggctgacgtacgtgatatcggtaagcgcctgctgcgcaacatcctgggcctgaagattatcgacctgagcgccattcaggatgaagtcattctggttgccgctgacctgacgccgtccgaaaccgcacagctgaacctgaagaaggtgctgggtttcatcaccgacgcgggtggccgtacttcccacacctctatcatggcgcgttctctggaactacctgctatcgtgggtaccggtagcgtcacctctcaggtgaaaaatgacgactatctgattctggatgccgtaaataatcaggtttacgtcaatccaaccaacgaagttattgataaaatgcgcgctgttcaggagcaagtggcttctgaaaaagcagagcttgctaaactgaaagatctgccagctattacgctggacggtcaccaggtagaagtatgcgctaacattggtacggttcgtgacgttgaaggtgcagagcgtaacggcgctgaaggcgttggtctgtatcgtactgagttcctgttcatggaccgcgacgcactgcccactgaagaagaacagtttgctgcttacaaagcagtggctgaagcgtgtggctcgcaagcggttatcgttcgtaccatggacatcggcggcgacaaagagctgccatacatgaacttcccgaaagaagagaacccgttcctcggctggcgcgctatccgtatcgcgatggatcgtagagagatcctgcgcgatcagctccgcgctatcctgcgtgcctcggctttcggtaaattgcgcattatgttcccgatgatcatctctgttgaagaagtgcgtgcactgcgcaaagagatcgaaatctacaaacaggaactgcgcgacgaaggtaaagcgtttgacgagtcaattgaaatcggcgtaatggtggaaacaccggctgccgcaacaattgcacgtcatttagccaaagaagttgatttctttagtatcggcaccaatgatttaacgcagtacactctggcagttgaccgtggtaatgatatgatttcacacctttaccagccaatgtcaccgtccgtgctgaacttgatcaagcaagttattgatgcttctcatgctgaaggcaaatggactggcatgtgtggtgagcttgctggcgatgaacgtgctacacttctgttgctggggatgggtctggacgaattctctatgagcgccatttctatcccgcgcattaagaagattatccgtaacacgaacttcgaagatgcgaaggtgttagcagagcaggctcttgctcaaccgacaacggacgagttaatgacgctggttaacaagttcattgaagaaaaaacaatctgctaa

SEQ ID NO: 81 - DNA, 510 bp, Escherichia coli
atgggtttgttcgataaactgaaatctctggtttccgacgacaagaaggataccggaactattgagatcattgctccgctctctggcgagatcgtcaatatcgaagacgtgccggatgtcgtttttgcggaaaaaatcgttggtgatggtattgctatcaaaccaacgggtaacaaaatggtcgcgccagtagacggcaccattggtaaaatctttgaaaccaaccacgcattctctatcgaatctgatagcggcgttgaactgttcgtccacttcggtatcgacaccgttgaactgaaaggcgaaggcttcaagcgtattgctgaagaaggtcagcgcgtgaaagttggcgatactgtcattgaatttgatctgccgctgctggaagagaaagccaagtctaccctgactccggttgttatctccaacatggacgaaatcaaagaactgatcaaactgtccggtagcgtaaccgtgggtgaaaccccggttatccgcatcaagaagtaa

SEQ ID NO: 82 - DNA, 879 bp, Escherichia coli
atgttcacgggaagtattgtcgcgattgttactccgatggatgaaaaaggtaatgtctgtcgggctagcttgaaaaaactgattgattatcatgtcgccagcggtacttcggcgatcgtttctgttggcaccactggcgagtccgctaccttaaatcatgacgaacatgctgatgtggtgatgatgacgctggatctggctgatgggcgcattccggtaattgccgggaccggcgctaacgctactgcggaagccattagcctgacgcagcgcttcaatgacagtggtatcgtcggctgcctgacggtaaccccttactacaatcgtccgtcgcaagaaggtttgtatcagcatttcaaagccatcgctgagcatactgacctgccgcaaattctgtataatgtgccgtcccgtactggctgcgatctgctcccggaaacggtgggccgtctggcgaaagtaaaaaatattatcggaatcaaagaggcaacagggaacttaacgcgtgtaaaccagatcaaagagctggtttcagatgattttgttctgctgagcggcgatgatgcgagcgcgctggacttcatgcaattgggcggtcatggggttatttccgttacggctaacgtcgcagcgcgtgatatggcccagatgtgcaaactggcagcagaagggcattttgccgaggcacgcgttattaatcagcgtctgatgccattacacaacaaactatttgtcgaacccaatccaatcccggtgaaatgggcatgtaaggaactgggtcttgtggcgaccgatacgctgcgcctgccaatgacaccaatcaccgacagtggtcgtgagacggtcagagcggcgcttaagcatgccggtttgctgtaa

SEQ ID NO: 83 - DNA, 324 bp, Escherichia coli
atgtcgattacactgagcgacagtgcagcagcgcgagtaaatacctttctggctaaccgcggtaaagggtttggcctgcgtctgggcgtgagaacctccgggtgttcaggtatggcttatgtactggaatttgttgacgaaccgacgccggaagacatcgtgtttgaagacaaaggcgtgaaagtcgtggtcgatggcaagagcctgcaatttctggacggtacgcagctggacttcgtaaaagaaggcctgaacgaagggtttaaattcaccaacccgaacgtcaaagatgagtgtggttgcggcgaaagcttccacgtttga

SEQ ID NO: 84 - DNA, 651 bp, Escherichia coli
atgcagaaagaacaactttccgctttaatggatggcgaaacgctggatagtgagctgcttaacgaactggctcataacccagaaatgcagaaaacctgggaaagctatcacttaatccgtgactcaatgcggggtgatactcccgaggtgctccatttcgatatctcttcacgcgtgatggccgccattgaagaagagccagtacgtcaaccggcgacattgatcccggaagcccagcctgcgccgcatcaatggcagaaaatgccattctggcagaaagtacgtccgtgggcggcacagcttacccaaatgggcgtagccgcatgcgtatcgcttgcagttatcgttggcgtccagcactataatggacaatctgaaacgtcccagcagcccgaaacgccggtatttaatacactgccgatgatgggtaaagccagcccggtaagcctgggagtaccttctgaagcgaccgcaaacaatggtcaacagcagcaggtacaggagcagcgtcgtcgcattaatgcaatgttgcaggattacgaactgcaacgccgactccactctgaacagcttcagtttgagcaggcgcaaacccagcaagccgctgtacaggtgccaggaattcaaactttaggaacgcaatcgcagtaa

SEQ ID NO: 85 - DNA, 342 bp, Escherichia coli
atgacaatgaacattaccagcaaacaaatggaaattactccggccatccgccaacatgtcgcagaccgtctcgccaaactggaaaaatggcaaacacatctgattaatccacatatcattctgtccaaagagccacaagggtttgttgctgacgccacaatcaatacacctaacggcgttctggttgccagtggtaaacatgaagatatgtacaccgcaattaacgaattgatcaacaagctggaacggcagctcaataaactgcagcacaaaggcgaagcacgtcgtgccgcaacatcggtgaaagacgccaacttcgtcgaagaagttgaagaagagtag

SEQ ID NO: 86 - DNA, 348 bp, Escherichia coli
atgagcaacattattaagcaacttgaacaagagcagatgaagcaggacgtaccttccttccgtccgggtgataccgtggaagtgaaagtatgggttgttgaaggttccaaaaaacgtctgcaggcattcgagggcgtggttatcgctattcgtaaccgcggtctgcactctgcattcactgttcgtaaaatttccaacggcgaaggcgttgagcgtgtcttccagactcactctccggtagttgacagcatttctgtcaaacgtcgtggtgctgttcgtaaagctaaactgtactacctgcgtgagcgtactggtaaggctgctcgtatcaaagagcgtcttaactaa

SEQ ID NO: 87 - DNA, 768 bp, Escherichia coli
atgtggattggcataattagcctgtttcctgaaatgttccgcgcaattaccgattacggggtaactggccgggcagttaaaaatggcctgctgagcatccagagctggagtcctcgcgacttcacgcatgaccggcaccgtaccgtggacgatcgtccttacggcggcggaccggggatgttaatgatggtgcaacccttgcgggacgccattcatgcagcaaaagccgcggcgggtgaaggcgcaaaggtgatttatctgtcaccacagggacgcaagcttgatcaagcgggcgtcagcgaactggcaacgaatcaaaaattgattctggtgtgcggtcgctacgaaggtatagatgagcgcgtgatccaaaccgaaattgacgaagaatggtcaatcggcgattacgttctcagtggtggtgagttaccagcaatgacgctgattgactccgtttcccggtttattccgggagtactgggacatgaagcctcggcaacggaagattcctttgctgaaggattgctggattgcccgcactatacgcggcctgaggtgttagaagggatggaagttccgccagtgttactgtcgggcaaccatgccgagatacgtcgctggcgtttgaaacagtcgctgggccgtacctggcttagaagacctgaacttctggaaaacctggctctgactgaagagcaagcaaggttgctggcggagttcaaaacggaacacgcacaacagcaacataaacatgatgggatggcgtaa

SEQ ID NO: 88 - DNA, 549 bp, Escherichia coli
atgagcaaacaactcaccgcgcaagcacctgttgatcccatcgttttgggaaaaatgggttcgtcttacggtattcgtgggtggctcagagtgttttcttccaccgaagacgccgaaagcatttttgactatcagccctggtttatccagaaggcgggtcagtggcagcaagtccagctggaaagctggaagcaccacaatcaggacatgatcatcaagctgaaaggcgttgacgatcgtgatgcggcgaacctgctgacgaattgtgaaattgtcgtggattcatcgcagctgcctcagcttgaagagggggactactactggaaagacctgatgggctgccaggtagtaaccactgaaggctacgatctcggtaaagtcgtcgatatgatggaaaccggatctaatgacgttctcgtcattaaggcaaacctgaaagatgcgtttggtatcaaggaacgtctcgtaccgttcctcgatgggcaggttatcaagaaagtcgatctcactactcgttcaatcgaagtagattgggatcctggtttttaa

SEQ ID NO: 89 - DNA, 249 bp, Escherichia coli
atggtaactattcgtttagcacgtcacggcgctaaaaagcgtccgttctaccaggttgttgtcgctgacagccgtaatgcacgcaacggtcgcttcatcgagcgcgttggtttcttcaacccaatcgctagcgaaaaagaagaaggcactcgcctggatctggatcgcatcgctcactgggttggccagggcgcaactatttctgatcgcgttgctgcgctgatcaaagaagtaaacaaagcagcttaa

SEQ ID NO: 90 - DNA, 186 bp, Escherichia coli
atgctgattctgactcgtcgagttggtgagaccctcatgattggggatgaggtcaccgtgacagttttaggggtaaagggcaaccaggtacgtattggcgtaaatgccccgaaggaagtttctgttcaccgtgaagagatctaccagcgtatccaggctgaaaaatcccagcagtccagttactaa

SEQ ID NO: 91 - DNA, 2631 bp, Escherichia coli
atgagcaagagcaccgctgagatccgtcaggcgtttctcgactttttccatagtaagggacatcaggtagttgccagcagctccctggtaccccataacgacccaactttgttgtttaccaacgccgggatgaaccagttcaaggatgtgttccttgggctcgacaagcgtaattattcccgcgctaccacttcccaacgctgcgtgcgtgcgggtggtaaacacaacgacctggaaaacgtcggttacaccgcgcgtcaccataccttcttcgaaatgctgggcaacttcagcttcggcgactatttcaaacacgatgccattcagtttgcatgggaactgctgaccagcgaaaaatggtttgccctgccgaaagagcgtctgtgggttaccgtctatgaaagcgacgacgaagcctacgaaatctgggaaaaagaagtagggatcccgcgcgaacgtattattcgcatcggcgataacaaaggtgcgccatacgcatctgacaacttctggcagatgggtgacactggtccgtgcggcccgtgcaccgaaatcttctacgatcacggcgaccacatttgggggggccctccgggaagcccggaagaagacggcgaccgctacattgagatctggaacatcgtcttcatgcagttcaaccgccaggccgatggcacgatggaaccgctgccgaagccgtctgtagataccggtatgggtctggagcgtattgctgcggtgctgcaacacgttaactctaactatgacatcgacctgttccgcacgctgatccaggcggtagcgaaagtcactggcgcaaccgatctgagcaataaatcgctgcgcgtaatcgctgaccacattcgttcttgtgcgttcctgatcgcggatggcgtaatgccgtccaatgaaaaccgtggttatgtactgcgtcgtatcattcgtcgcgcagtgcgtcacggtaatatgctcggcgcgaaagaaaccttcttctacaaactggttggtccgctgatcgacgttatgggctctgcgggtgaagacctgaaacgccagcaggcgcaggttgagcaggtgctgaagactgaagaagagcagtttgctcgtactctggagcgcggtctggcgttgctggatgaagagctggcaaaactttctggtgatacgctggatggtgaaactgctttccgtctgtacgacacctatggcttcccggttgacctgacggctgatgtttgtcgtgagcgcaacatcaaagttgacgaagctggttttgaagctgcaatggaagagcagcgtcgtcgcgcgcgcgaagccagcggctttggtgccgattacaacgcaatgatccgtgttgacagtgcatctgaatttaaaggctatgaccatctggaactgaacggcaaagtgactgcgctgtttgttgatggtaaagcggttgatgccatcaatgcaggccaggaagctgtggtcgtgctggatcaaacgccattctatgcggaatccggcggtcaggttggcgataaaggcgaactgaaaggcgctaacttctcctttgcggtggaagatacgcagaaatacggccaggcgattggtcacatcggtaaacttgctgcgggttctctgaaagtgggcgacgcggtgcaggctgatgttgatgaggctcgtcgcgcccgtattcgtctgaatcactccgcaacgcacctgatgcacgctgcgctgcgccaggttctgggtactcatgtatcgcagaaaggttcactggttaacgacaaggtgctgcgcttcgacttctcacacaacgaagcgatgaaaccagaagagattcgtgcggtcgaagacctggtgaacacacagattcgtcgcaatttgccgatcgaaaccaacatcatggatctcgaagcggcgaaagcgaaaggtgcgatggcgctgttcggcgagaagtatgatgagcgcgtacgcgtgctgagcatgggcgatttctctaccgagttgtgtggcggtactcacgccagccgcactggtgatattggtctgttccgcatcatctctgaatcgggtactgctgcaggcgttcgtcgtatcgaagcggtaaccggagaaggtgctatcgccaccgttcatgcagacagcgatcgcttaagcgaagtcgcgcatctgctgaaaggcgatagcaataatctggctgataaagtgcgctcagtactggaacgtacgcgtcagctggaaaaagagttacaacagcttaaagaacaagctgccgcacaggagagcgcaaatctttccagtaaggcaattgatgttaatggtgttaagctgttggttagcgagcttagcggtgttgagccgaaaatgttgcgtaccatggttgacgatttaaaaaatcagctggggtcgacaattatcgtgctggcaacggtagtcgaaggtaaggtttctctgattgcaggcgtatctaaggacgtcacagatcgtgtgaaagcaggggaactgattggtatggtcgctcagcaggtgggcggcaagggtggtggacgtcctgacatggcgcaagccggtggtacggatgctgcggccttacctgcagcgttagccagtgtgaaaggctgggtcagcgcgaaattgcaataa

SEQ ID NO: 92 - DNA, 993 bp, Escherichia coli
atgagtcagaatacgctgaaagttcatgatttaaatgaagatgcggaatttgatgagaacggagttgaggtttttgacgaaaaggccttagtagaacaggaacccagtgataacgatttggccgaagaggaactgttatcgcagggagccacacagcgtgtgttggacgcgactcagctttaccttggtgagattggttattcaccactgttaacggccgaagaagaagtttattttgcgcgtcgcgcactgcgtggagatgtcgcctctcgccgccggatgatcgagagtaacttgcgtctggtggtaaaaattgcccgccgttatggcaatcgtggtctggcgttgctggaccttatcgaagagggcaacctggggctgatccgcgcggtagagaagtttgacccggaacgtggtttccgcttctcaacatacgcaacctggtggattcgccagacgattgaacgggcgattatgaaccaaacccgtactattcgtttgccgattcacatcgtaaaggagctgaacgtttacctgcgaaccgcacgtgagttgtcccataagctggaccatgaaccaagtgcggaagagatcgcagagcaactggataagccagttgatgacgtcagccgtatgcttcgtcttaacgagcgcattacctcggtagacaccccgctgggtggtgattccgaaaaagcgttgctggacatcctggccgatgaaaaagagaacggtccggaagataccacgcaagatgacgatatgaagcagagcatcgtcaaatggctgttcgagctgaacgccaaacagcgtgaagtgctggcacgtcgattcggtttgctggggtacgaagcggcaacactggaagatgtaggtcgtgaaattggcctcacccgtgaacgtgttcgccagattcaggttgaaggcctgcgccgtttgcgcgaaatcctgcaaacgcaggggctgaatatcgaagcgctgttccgcgagtaa

SEQ ID NO: 93 - DNA, 1140 bp, Escherichia coli
atgagcgcgggaagcccaaaattcaccgttcgccgcattgcggctttgtcactggtttcgctatggctggcaggctgttctgacacttcaaatccaccggcaccggtcagctccgttaatggcaatgcgcctgcaaatactaattctggtatgttgattacgccgccgccgaaaatggggacgacgtctacagcgcagcaaccgcaaattcagccggtgcagcagccacaaattcaggctactcaacaaccgcaaatccagccagtgcagccagtagctcagcagccggtacagatggaaaacggacgcatcgtctataaccgtcagtatgggaacattccgaaaggcagttatagcggcagtacctataccgtgaaaaaaggcgacacacttttctatatcgcctggattactggcaacgatttccgtgaccttgctcagcgcaacaatattcaggcaccatacgcgctgaacgttggtcagaccttgcaggtgggtaatgcttccggtacgccaatcactggcggaaatgccattacccaggccgacgcagcagagcaaggagttgtgatcaagcctgcacaaaattccaccgttgctgttgcgtcgcaaccgacaattacgtattctgagtcttcgggtgaacagagtgctaacaaaatgttgccgaacaacaagccaactgcgaccacggtcacagcgcctgtaacggtaccaacagcaagcacaaccgagccgactgtcagcagtacatcaaccagtacgcctatctccacctggcgctggccgactgagggcaaagtgatcgaaacctttggcgcttctgaggggggcaacaaggggattgatatcgcaggcagcaaaggacaggcaattatcgcgaccgcagatggccgcgttgtttatgctggtaacgcgctgcgcggctacggtaatctgattatcatcaaacataatgatgattacctgagtgcctacgcccataacgacacaatgctggtccgggaacaacaagaagttaaggcggggcaaaaaatagcgaccatgggtagcaccggaaccagttcaacacgcttgcattttgaaattcgttacaaggggaaatccgtaaacccgctgcgttatttgccgcagcgataa

SEQ ID NO: 94 - DNA, 1299 bp, Escherichia coli
atgtccaaaatcgtaaaaatcatcggtcgtgaaatcatcgactcccgtggtaacccgactgttgaagccgaagtacatctggagggtggtttcgtcggtatggcagctgctccgtcaggtgcttctactggttcccgtgaagctctggaactgcgcgatggcgacaaatcccgtttcctgggtaaaggcgtaaccaaagctgttgctgcggtaaacggcccgatcgctcaggcgctgattggcaaagatgctaaagatcaggctggcattgacaagatcatgatcgacctggacggcaccgaaaacaaatccaaattcggcgcgaacgcaatcctggctgtatctctggctaacgccaaagctgctgcagctgctaaaggtatgccgctgtacgagcacatcgctgaactgaacggtactccgggcaaatactctatgccggttccgatgatgaacatcatcaacggtggtgagcacgctgacaacaacgttgatatccaggaattcatgattcagccggttggcgcgaaaactgtgaaagaagccatccgcatgggttctgaagttttccatcacctggcaaaagttctgaaagcgaaaggcatgaacactgctgttggtgacgaaggtggctatgcgccgaacctgggttccaacgctgaagctctggctgttatcgctgaagctgttaaagctgctggttatgaactgggcaaagacatcactttggcgatggactgcgcagcttctgaattctacaaagatggtaaatacgttctggctggcgaaggcaacaaagcgttcacctctgaagaattcactcacttcctggaagaactgaccaaacagtacccgatcgtttctatcgaagacggtctggacgaatctgactgggacggtttcgcataccagaccaaagttctgggcgacaaaatccagctggttggtgacgacctgttcgtaaccaacaccaagatcctgaaagaaggtatcgaaaaaggtatcgctaactccatcctgatcaaattcaaccagatcggttctctgaccgaaactctggctgcaatcaagatggcgaaagatgctggctacactgcagttatctctcaccgttctggcgaaactgaagacgctaccatcgctgacctggctgttggtactgctgcaggccagatcaaaactggttctatgagccgttctgaccgtgttgctaaatacaaccagctgattcgtatcgaagaagctctgggcgaaaaagcaccgtacaacggtcgtaaagagatcaaaggccaggcataa

SEQ ID NO: 95 - DNA, 1638 bp, Escherichia coli
atgacaacgaactatatttttgtgaccggcggggtcgtatcctctctgggtaaaggcattgccgcagcctccctcgcagccattcttgaagcccgtggcctcaatgtgaccatcatgaaactggatccgtacatcaacgtcgatccaggtactatgagcccaatccaacacggggaagtgttcgttactgaagacggcgctgaaaccgacctggacctggggcactacgagcgtttcattcgtaccaaaatgagccgccgcaacaacttcaccacgggtcgtatctactctgacgttctgcgtaaagaacgccgcggtgactacctcggcgcaaccgtgcaggttattccgcacatcactaacgcaatcaaagagcgcgtgctggaaggtggcgaaggtcatgacgtagtactggtagaaatcggcggtacagtaggtgatatcgaatccttgccgttcctcgaagcgattcgccagatggctgttgaaattggccgtgagcacactctgtttatgcacctgacgctggtgccgtacatggcagcgtctggtgaagtcaaaaccaaaccgactcagcactctgtaaaagagctgctctccatcggtatccagcctgacatcctgatttgtcgttcagatcgcgctgttccggcgaacgaacgtgcgaagattgcattgttctgtaatgttccggaaaaagcggttatttctctgaaagacgtcgattccatctataaaattccgggcctgttgaaatctcaggggctggacgattatatttgtaaacgattcagcttaaactgcccggaagcgaatctgtccgaatgggaacaggttatcttcgaagaagcgaacccggtaagtgaagtcaccatcggtatggtcggcaagtacattgaactgccggatgcttataaatcagtgatcgaagcactgaaacacggtgggctgaagaatcgtgtcagcgtcaacatcaaactgatcgattcacaagatgttgaaacgcgcggcgttgaaatccttaaaggtctggacgcaatcctcgtacctggcggtttcggctatcgtggcgtagaaggcatgattacgaccgcgcgttttgcgcgtgagaacaatattccttatctgggcatttgcctgggtatgcaggtggcgttaattgattacgctcgccatgttgccaacatggagaacgccaactctacggaatttgtgccagactgtaagtacccggttgtggcgctgattaccgagtggcgcgatgaaaacggcaacgttgaagttcgtagcgagaagagcgatctcggcggtaccatgcgtctcggcgcacagcagtgccagttggttgacgatagcctggttcgccagctgtacaatgcgccgacaattgttgagcgtcatcgtcaccgttacgaagtcaacaacatgctgttgaaacagattgaagatgcaggtctgcgcgttgcgggccgttccggggatgatcagttggtcgagatcatcgaagttccgaatcacccgtggttcgtggcttgccagttccatccggagtttacttctactccacgtgatggtcacccgctgtttgcaggctttgtgaaagccgccagcgagttccagaaacgtcaggcgaagtaa

SEQ ID NO: 96 - DNA, 1098 bp, Escherichia coli
atgtttgaaattaatccggtaaataatcgcattcaggacctcacggaacgctccgacgttcttagggggtatcttgactacgacgccaagaaagagcgtctggaagaagtaaacgccgagctggaacagccggatgtctggaacgaacccgaacgcgcacaggcgctgggtaaagagcgttcctccctcgaagccgttgtcgacaccctcgaccaaatgaaacaggggctggaagatgtttctggtctgctggaactggctgtagaagctgacgacgaagaaacctttaacgaagccgttgctgaactcgacgccctggaagaaaaactggcgcagcttgagttccgccgtatgttctctggcgaatatgacagcgccgactgctacctcgatattcaggcggggtctggcggtacggaagcacaggactgggcgagcatgcttgagcgtatgtatctgcgctgggcagaatcgcgtggtttcaaaactgaaatcatcgaagagtcggaaggtgaagtggcgggtattaaatccgtgacgatcaaaatctccggcgattacgcttacggctggctgcgtacagaaaccggcgttcaccgcctggtgcgtaaaagcccgtttgactccggcggtcgtcgccacacgtcgttcagctccgcgtttgtttatccggaagttgatgatgatattgatatcgaaatcaacccggcggatctgcgcattgacgtttatcgcacgtccggcgcgggcggtcagcacgttaaccgtaccgaatctgcggtgcgtattacccacatcccgaccgggatcgtgacccagtgccagaacgaccgttcccagcacaagaacaaagatcaggccatgaagcagatgaaagcgaagctttatgaactggagatgcagaagaaaaatgccgagaaacaggcgatggaagataacaaatccgacatcggctggggcagccagattcgttcttatgtccttgatgactcccgcattaaagatctgcgcaccggggtagaaacccgcaacacgcaggccgtgctggacggcagcctggatcaatttatcgaagcaagtttgaaagcagggttatga

SEQ ID NO: 97 - DNA, 390 bp, Escherichia coli
atgagcaacgtaccagcagaactgaaatacagcaaagaacacgaatggctgcgtaaagaagccgacggcacttacaccgttggtattaccgaacatgctcaggagctgttaggcgatatggtgtttgttgacctgccggaagtgggcgcaacggttagcgcgggcgatgactgcgcggttgccgaatcggtaaaagcggcgtcagacatttatgcgccagtaagcggtgaaatcgtggcggtaaacgacgcactgagcgattccccggaactggtgaacagcgaaccgtatgcaggcggctggatctttaaaatcaaagccagcgatgaaagcgaactggaatcactgctggatgcgaccgcatacgaagcattgttagaagacgagtaa

SEQ ID NO: 98 - DNA, 1233 bp, Escherichia coli
atggcaaaggtatcgctggagaaagacaagattaagtttctgctggtagaaggcgtgcaccaaaaggcgctggaaagccttcgtgcagctggttacaccaacatcgaatttcacaaaggcgcgctggatgatgaacaattaaaagaatccatccgcgatgcccacttcatcggcctgcgatcccgtacccatctgactgaagacgtgatcaacgccgcagaaaaactggtcgctattggctgtttctgtatcggaacaaaccaggttgatctggatgcggcggcaaagcgcgggatcccggtatttaacgcaccgttctcaaatacgcgctctgttgcggagctggtgattggcgaactgctgctgctattgcgcggcgtgccggaagccaatgctaaagcgcaccgtggcgtgtggaacaaactggcggcgggttcttttgaagcgcgcggcaaaaagctgggtatcatcggctacggtcatattggtacgcaattgggcattctggctgaatcgctgggaatgtatgtttacttttatgatattgaaaataaactgccgctgggcaacgccactcaggtacagcatctttctgacctgctgaatatgagcgatgtggtgagtctgcatgtaccagagaatccgtccaccaaaaatatgatgggcgcgaaagaaatttcactaatgaagcccggctcgctgctgattaatgcttcgcgcggtactgtggtggatattccggcgctgtgtgatgcgctggcgagcaaacatctggcgggggcggcaatcgacgtattcccgacggaaccggcgaccaatagcgatccatttacctctccgctgtgtgaattcgacaacgtccttctgacgccacacattggcggttcgactcaggaagcgcaggagaatatcggcctggaagttgcgggtaaattgatcaagtattctgacaatggctcaacgctctctgcggtgaacttcccggaagtctcgctgccactgcacggtgggcgtcgtctgatgcacatccacgaaaaccgtccgggcgtgctaactgcgctgaacaaaatcttcgccgagcagggcgtcaacatcgccgcgcaatatctgcaaacttccgcccagatgggttatgtggttattgatattgaagccgacgaagacgttgccgaaaaagcgctgcaggcaatgaaagctattccgggtaccattcgcgcccgtctgctgtactaa

SEQ ID NO: 99 - DNA, 1164 bp, Escherichia coli
atgtctgtaattaagatgaccgatctggatcttgctgggaaacgtgtatttatccgtgcggatctgaacgtaccagtaaaagacgggaaagtaaccagcgacgcgcgtatccgtgcttctctgccgaccatcgaactggccctgaaacaaggcgcaaaagtgatggtaacttcccacctgggtcgtcctaccgaaggcgagtacaacgaagaattctctctgctgccggttgttaactacctgaaagacaaactgtctaacccggttcgtctggttaaagattacctcgacggcgttgacgttgctgaaggtgaactggttgttctggaaaacgttcgcttcaacaaaggcgagaagaaagacgacgaaaccctgtccaaaaaatacgctgcactgtgtgacgtgttcgtaatggacgcattcggtactgctcaccgcgcgcaggcttctactcacggtatcggtaaattcgctgacgttgcgtgcgcaggcccgctgctggcagctgaactggacgcgctgggtaaagcactgaaagaacctgctcgcccgatggtggctatcgttggtggttctaaagtatctaccaaactgaccgttctggactccctgtctaaaatcgctgaccagctgattgttggtggtggtatcgctaacacctttatcgcggcacaaggccacgatgtgggtaaatccctgtacgaagctgacctggttgacgaagctaaacgtctgctgaccacctgcaacatcccggttccgtctgatgttcgcgtagcaaccgagttctctgaaactgcaccggctaccctgaaatctgttaacgatgtgaaagctgacgagcagatcctggatatcggtgatgcttccgctcaggaactggctgaaatcctgaagaatgcgaaaaccattctgtggaacggtccggttggcgtgttcgaattcccgaacttccgcaaaggtactgaaatcgtggctaacgctatcgcagacagcgaagcgttctccatcgctggcggcggcgacactctggcagcaatcgacctgttcggcattgctgacaaaatctcctacatctccactggcggcggcgcattcctcgaattcgtggaaggtaaagtactgcctgcagtagcgatgctcgaagagcgcgctaagaagtaa

SEQ ID NO: 100 - DNA, 216 bp, Escherichia coli
atgccggtaattaaagtacgtgaaaacgagccgttcgacgtagctctgcgtcgcttcaagcgttcctgcgaaaaagcaggtgttctggcggaagttcgtcgtcgtgagttctatgaaaaaccgactaccgaacgtaagcgcgctaaagcttctgcagtgaaacgtcacgcgaagaaactggctcgcgaaaacgcacgccgcactcgtctgtactaa

SEQ ID NO: 101 - DNA, 369 bp, Escherichia coli
atgaaataccgcatcgctttagctgtttctctctttgctcttagtgccggtagttatgccactaccctgtgtcaggaaaaggagcaaaatatccttaaggagatcagctatgccgaaaaacaccaaaaccagaatcgtattgacggtctgaataaagccctgagtgaagtccgggccaactgttcagatagccagctgcgtgccgatcatcagaagaaaatcgcaaagcagaaagatgaggtggcggaacgccagcaagatttagccgaggcgaagcaaaaaggcgatgccgataagattgccaaacgcgaacggaaactggcagaagcgcaggaagagctgaaaaagctggaagcgcgcgactactaa

SEQ ID NO: 102 - DNA, 306 bp, Escherichia coli
atgtcgaaagaacacactacggaacatctgcgtgctgagttgaaatccctttccgatacgctggaagaggtgcttagctcatctggcgagaagtcgaaagaagagttgagtaagattcgtagcaaagcggagcaggcactgaaacagagccgttatcgcctgggtgaaaccggtgatgccattgccaaacaaacccgtgtcgcggcggcgcgtgccgatgagtatgtgcgcgaaaatccgtggacgggcgtgggcattggcgctgcaatcggtgtagtgctcggcgttctgctgtcgcgtcgttaa

SEQ ID NO: 103 - DNA, 1488 bp, Escherichia coli
atgaacaaagaaattttggctgtagttgaagccgtatccaatgaaaaggcgctacctcgcgagaagattttcgaagcattggaaagcgcgctggcgacagcaacaaagaaaaaatatgaacaagagatcgacgtccgcgtacagatcgatcgcaaaagcggtgattttgacactttccgtcgctggttagttgttgatgaagtcacccagccgaccaaggaaatcacccttgaagccgcacgttatgaagatgaaagcctgaacctgggcgattacgttgaagatcagattgagtctgttacctttgaccgtatcactacccagacggcaaaacaggttatcgtgcagaaagtgcgtgaagccgaacgtgcgatggtggttgatcagttccgtgaacacgaaggtgaaatcatcaccggcgtggtgaaaaaagtaaaccgcgacaacatctctctggatctgggcaacaacgctgaagccgtgatcctgcgcgaagatatgctgccgcgtgaaaacttccgccctggcgaccgcgttcgtggcgtgctctattccgttcgcccggaagcgcgtggcgcgcaactgttcgtcactcgttccaagccggaaatgctgatcgaactgttccgtattgaagtgccagaaatcggcgaagaagtgattgaaattaaagcagcggctcgcgatccgggttctcgtgcgaaaatcgcggtgaaaaccaacgataaacgtatcgatccggtaggtgcttgcgtaggtatgcgtggcgcgcgtgttcaggcggtgtctactgaactgggtggcgagcgtatcgatatcgtcctgtgggatgataacccggcgcagttcgtgattaacgcaatggcaccggcagacgttgcttctatcgtggtggatgaagataaacacaccatggatatcgccgttgaagccggtaacctggcgcaggcgattggccgtaacggtcagaacgtgcgtctggcttcgcagctgagcggttgggaactcaacgtgatgaccgttgacgacctgcaggctaagcatcaggcggaagcgcacgcagcgatcgacaccttcaccaaatatctcgacatcgacgaagacttcgcgactgttctggtagaagaaggcttctcgacgctggaagaattggcctatgtgccgatgaaagagctgttggaaatcgaaggccttgatgagccgaccgttgaagcactgcgcgagcgtgctaaaaatgcactggccaccattgcacaggcccaggaagaaagcctcggtgataacaaaccggctgacgatctgctgaaccttgaaggggtagatcgtgatttggcattcaaactggccgcccgtggcgtttgtacgctggaagatctcgccgaacagggcattgatgatctggctgatatcgaagggttgaccgacgaaaaagccggagcactgattatggctgcccgtaatatttgctggttcggtgacgaagcgtaa

SEQ ID NO: 104 - DNA, 312 bp, Escherichia coli
atgtacgcggttttccaaagtggtggtaaacaacaccgagtaagcgaaggtcagaccgttcgcctggaaaagctggacatcgcaactggcgaaactgttgagttcgctgaagtgctgatgatcgcaaacggtgaagaagtcaaaatcggcgttcctttcgttgatggcggcgtaatcaaagctgaagttgttgctcacggtcgtggcgagaaagttaaaatcgttaagtttcgtcgtcgtaaacactatcgtaagcagcagggccatcgtcagtggttcactgatgtgaaaattactggcatcagcgcctaa

SEQ ID NO: 105 - DNA, 4461 bp, Escherichia coli
atgttgtacgataaatcccttgagagggataactgtggtttcggcctgatcgcccacatagaaggcgaacctagccacaaggtagtgcgtactgcaatacacgcactggcccgcatgcagcaccgtggcgcgattctcgccgatggtaaaaccggcgacggttgcggcttgctgttacaaaaaccggatcgcttttttcgcatcgttgcgcaggagcgcggctggcgtttagcaaaaaactacgctgtcgggatgctcttcctgaataaagatcctgaactcgccgctgccgcacgccgcatcgttgaagaagaactgcaacgcgaaaccttgtcgattgtgggctggcgtgatgtccccactaacgaaggcgtgctgggtgaaatcgccctctcctctctgccacgcattgagcaaatttttgtgaacgccccggcaggctggcgtccacgcgatatggagcgccgtctgtttatcgcccgccgccgcattgaaaagcgtctcgaagccgacaaagacttctacgtctgtagcctgtcgaatctggtgaacatctataaaggtctgtgtatgccgacggatctgccgcgcttttatctggatcttgcggacctgcgtctggaatcggccatttgcctgttccaccagcgcttctccactaacaccgtaccgcgctggccgctggcgcaaccgttccgctatctggcgcataacggtgaaatcaacaccatcaccggtaaccgccaatgggcgcgtgcgcgtacttataaattccagacaccgcttatccctgacctgcacgacgccgcaccgttcgtcaacgaaaccggctctgactccagttcgatggataacatgctggaactgctgctggcaggcgggatggatatcatccgcgccatgcgtctattagtaccacccgcctggcagaacaacccggatatggacccggaactgcgtgccttctttgactttaactccatgcatatggagccgtgggatggcccggcgggcatcgtgatgtccgacggtcgttttgccgcctgtaacctcgaccgtaacggtctgcgtccggcgcgctacgtcatcaccaaagataagctcatcacctgcgcctctgaagtcggtatctgggattaccagcctgacgaagtggtcgaaaaaggccgcgtcgggccaggcgaactgatggttatcgacacccgcagtgggcgtattctgcactcggcagaaaccgatgacgatctgaaaagccgccatccatataaagagtggatggagaaaaacgtccgccgactggtaccgtttgaagatctgcccgatgaagaagtgggtagccgcgaactggacgacgacacgcttgccagctaccagaaacagtttaactacagcgcggaagagctggactccgtaattcgcgtactgggcgaaaacggtcaggaagcggtcggttcgatgggcgatgataccccattcgccgtgctctccagtcagccgcgcattatttacgactacttccgccagcagtttgcccaggtgactaacccgccaatcgacccgctgcgtgaagcgcatgttatgtcgctcgccaccagtatcggtcgtgaaatgaacgtcttttgcgaagcagagggccaggcgcaccgtttaagctttaaatcgccgattctgctctactccgatttcaaacagctcacgacgatgaaagaggagcactaccgcgcagatacgctggatatcacctttgacgtcactaaaaccacgctcgaagcgacagtcaaagagctgtgcgacaaagccgaaaaaatggtacgtagcggcaccgtgctgctggtgctctccgaccggaatatcgctaaagatcgcctgccggttccagccccgatggcggttggcgcgatccagacccgtctggtcgatcaaagcctgcgttgcgatgccaacatcatcgtcgaaaccgccagcgcccgcgatccgcaccacttcgccgtgttgctgggcttcggcgcgacggctatttatccataccttgcctatgaaacgctgggccgcctggtagacacccatgcgattgccaaagattatcgtaccgtgatgctcaactaccgtaacggcatcaacaaaggcttgtacaaaatcatgtccaaaatgggcatctccaccatcgcctcttaccgctgctcgaaactgtttgaagcggtcggtctacacgatgatgtagtgggcctgtgcttccagggggcggtcagccgcattggtggagcaagctttgaagacttccagcaggatctgctgaatctgtcgaaacgtgcctggctggcgcgtaagcccatcagccagggcggtctgctgaaatacgtccacggcggcgaataccacgcctacaacccggacgtggtgcgcacgctgcaacaagcggtacaaagcggcgagtacagcgactatcaggaatacgcgaagctggttaatgagcgtccggcaaccacgctgcgcgatctgctggcaattacgccgggtgaaaacgcggtcaacattgctgatgttgaaccggcaagcgaactgtttaaacgctttgataccgccgcgatgtctatcggcgcgttaagcccggaagcccacgaggcgctggcggaagcgatgaacagcatcggcggtaattcgaactccggtgaaggcggcgaagacccggcgcgctacggcaccaacaaagtgtcgcgcatcaagcaggtggcttccggtcgctttggggttactccggcgtatctggtcaatgccgacgtcattcagattaaagtcgcccagggcgcgaagccaggcgaaggcggtcagttgccgggtgataaagtcacgccttacatcgccaaactgcgctattcggtgcccggagtgacgctgatctccccgccgccgcaccacgatatctactctatcgaggacttagcgcagctcattttcgacctcaagcaggttaacccgaaagcgatgatctccgtgaagctggtttccgaaccgggagtaggcaccatcgcgactggcgtggcaaaagcttatgcggacttgatcaccatcgcaggctatgacggcggcaccggcgcaagtccgctttcatcggtgaaatacgcaggctgtccgtgggagctggggcttgttgaaacccagcaggcgctggttgctaacggcttgcgtcacaagatccgtttgcaggtcgatggcggcctgaaaacgggtgtcgatatcatcaaggcggcgattctcggcgcagaaagcttcggcttcggcactggcccgatggtggcgctcggctgtaaatatctacgtatttgccatctgaacaactgcgcaacgggtgtagcaactcaggatgacaaactgcgtaagaaccactatcacggcctgccattcaaggtgacgaattactttgagtttatcgcccgtgaaacccgcgagctgatggcacagcttggcgtaacacgtctggtggatctgattggtcgcaccgacctgctgaaagagctggacggtttcaccgccaaacagcagaagctggcgctgtcgaagctgctggagactgccgaaccgcatccaggtaaggcactctactgcaccgaaaacaacccgccgtttgataacggcctgctgaacgcgcagttgctgcaacaggcgaaaccgtttgtcgatgagcgccagagcaaaaccttctggttcgatattcgcaacaccgaccgttctgtcggcgcgtcgctttcaggctatatcgcccagacgcacggcgatcaggggctggcagccgatcctatcaaagcgtacttcaacggcaccgcaggccagagcttcggcgtgtggaacgcgggcggcgtggaactgtacctgaccggtgatgccaacgactatgtcggtaaaggcatggcgggcggcttaatcgccattcgtcctccggttggttccgccttccgcagccatgaagcaagcattatcggcaacacctgcctgtatggcgcgaccggtggtcgtctgtatgccgcaggccgcgcgggtgaacgtttcggcgtgcgtaactccggtgctatcaccgtggtagaaggcattggcgacaacggttgtgaatatatgacgggtggtatcgtctgcattctgggtaaaaccggcgttaacttcggtgcgggcatgaccggcggtttcgcttacgttctcgatgaaagcggcgatttccgcaaacgcgttaacccggaactggtcgaggtcttaagcgttgacgctctggcgatccatgaagagcatctgcgtggtcttatcaccgagcatgtgcagcataccggctctcagcgcggtgaagagattctggcgaactggtcaaccttcgccactaaatttgcgctggttaaaccgaagtccagtgatgtaaaagcactgctgggtcaccgtagtcgtagcgcagctgagttgcgcgtgcaggcgcagtaa

SEQ ID NO: 106 - DNA, 1419 bp, Escherichia coli
atgagtcagaatgtttatcaatttatcgacctgcagcgcgttgatccgccaaagaaaccgctgaagatccgcaaaattgagtttgttgaaatttacgagccgttttccgaaggccaggccaaagcgcaggctgaccgctgcctgtcgtgcggcaacccatactgcgagtggaaatgcccggtacacaactacatcccgaactggctgaagctcgccaacgaggggcgtatttttgaagcggcggaactgtcgcaccagaccaacaccctgccggaagtttgcggacgagtctgcccgcaagaccgtctgtgcgaaggttcctgcactctgaacgatgagtttggcgcggtgaccatcggcaacattgagcgctatatcaacgataaagcgttcgagatgggctggcgtccggatatgtctggtgtgaaacagaccggtaaaaaagtggcgattatcggcgcaggcccggcaggtctggcgtgtgcggatgtcctgacgcgtaacggcgtaaaagccgttgtcttcgaccgtcatccagaaattggcgggctgctgaccttcggtattccggccttcaagctggaaaaagaggtaatgacgcgtcgccgtgaaatcttcaccggcatgggtattgaattcaaactcaataccgaagtgggccgcgacgtacagctggacgatctgctgagtgattacgatgccgtgttccttggcgtcgggacttatcagtcaatgcgcggcgggctggaaaacgaagacgccgatggcgtgtacgcagcgctgccgttcctcatcgccaacaccaaacagttaatgggctttggtgaaacccgcgacgaaccgttcgtcagcatggaaggcaaacgcgtggtggtccttggcggtggcgacactgcgatggactgcgtgcgtacgtccgtgcgccagggagcgaagcacgttacctgtgcctatcgtcgtgatgaagagaacatgccgggttcccgccgcgaagtgaaaaacgcgcgggaagaaggcgtagagttcaaattcaacgtccagccgctgggtattgaagtgaacggtaacggcaaagtcagcggcgtaaaaatggtgcgtaccgaaatgggcgaaccggacgccaaaggccgtcgccgcgcggagatcgttgcaggttccgaacatatcgttccggcagatgcggtgatcatggcgtttggtttccgtccacacaacatggaatggctggcaaaacacagcgtcgagctggattcacaaggccgcatcatcgccccggaaggcagcgacaacgccttccagaccagcaacccgaaaatctttgctggcggcgatatcgtccgtggttccgatctggtggtgaccgctattgccgaaggtcgtaaggcggcagacggtattatgaactggctggaagtttaa

SEQ ID NO: 107 - DNA, 393 bp, Escherichia coli
atggctgaaaatcaatactacggcactggtcgccgcaaaagttccgcagctcgcgttttcatcaaaccgggcaacggtaaaatcgtaatcaaccaacgttctctggaacagtacttcggtcgtgaaactgcccgcatggtagttcgtcagccgctggaactggtcgacatggttgagaaactggacctgtacatcaccgttaaaggtggtggtatctctggtcaggctggtgcgatccgtcacggtatcacccgcgctctgatggaatacgacgagtccctgcgttctgaactgcgtaaagctggcttcgttactcgtgacgctcgtcaggttgaacgtaagaaagtcggtctgcgtaaagcacgtcgtcgtccgcagttctccaaacgttaa

SEQ ID NO: 108 - DNA, 429 bp, Escherichia coli
atgaaaacttttacagctaaaccagaaaccgtaaaacgcgactggtatgttgttgacgcgaccggtaaaactctgggccgtctggctactgaactggctcgtcgcctgcgcggtaagcacaaagcggaatacactccgcacgtagataccggtgattacatcatcgttctgaacgctgacaaagttgctgtaaccggcaacaagcgtactgacaaagtgtactatcaccacaccggccacatcggtggtatcaaacaagcgacctttgaagagatgattgctcgccgtcctgagcgtgtgattgaaatcgcggttaaaggcatgttgccaaaaggcccgctgggtcgtgctatgttccgtaaactgaaagtttacgcgggtaacgagcacaaccacgcggcacagcaaccgcaagttcttgacatctaa

SEQ ID NO: 109 - DNA, 939 bp, Escherichia coli
atgaaagtcgcagtcctcggcgctgctggcggtattggccaggcgcttgcactactgttaaaaacccaactgccttcaggttcagaactctctctgtatgatatcgctccagtgactcccggtgtggctgtcgatctgagccatatccctactgctgtgaaaatcaaaggtttttctggtgaagatgcgactccggcgctggaaggcgcagatgtcgttcttatctctgcaggcgtagcgcgtaaaccgggtatggatcgttccgacctgtttaacgttaacgccggcatcgtgaaaaacctggtacagcaagttgcgaaaacctgcccgaaagcgtgcattggtattatcactaacccggttaacaccacagttgcaattgctgctgaagtgctgaaaaaagccggtgtttatgacaaaaacaaactgttcggcgttaccacgctggatatcattcgttccaacacctttgttgcggaactgaaaggcaaacagccaggcgaagttgaagtgccggttattggcggtcactctggtgttaccattctgccgctgctgtcacaggttcctggcgttagttttaccgagcaggaagtggctgatctgaccaaacgcatccagaacgcgggtactgaagtggttgaagcgaaggccggtggcgggtctgcaaccctgtctatgggccaggcagctgcacgttttggtctgtctctggttcgtgcactgcagggcgaacaaggcgttgtcgaatgtgcctacgttgaaggcgacggtcagtacgcccgtttcttctctcaaccgctgctgctgggtaaaaacggcgtggaagagcgtaaatctatcggtaccctgagcgcatttgaacagaacgcgctggaaggtatgctggatacgctgaagaaagatatcgccctgggcgaagagttcgttaataagtaa

SEQ ID NO: 110 - DNA, 471 bp, Escherichia coli
atggatattcgtaagattaaaaaactgatcgagctggttgaagaatcaggcatctccgaactggaaatttctgaaggcgaagagtcagtacgcattagccgtgcagctcctgccgcaagtttccctgtgatgcaacaagcttacgctgcaccaatgatgcagcagccagctcaatctaacgcagccgctccggcgaccgttccttccatggaagcgccagcagcagcggaaatcagtggtcacatcgtacgttccccgatggttggtactttctaccgcaccccaagcccggacgcaaaagcgttcatcgaagtgggtcagaaagtcaacgtgggcgataccctgtgcatcgttgaagccatgaaaatgatgaaccagatcgaagcggacaaatccggtaccgtgaaagcaattctggtcgaaagtggacaaccggtagaatttgacgagccgctggtcgtcatcgagtaa

SEQ ID NO: 111 - DNA, 297 bp, Escherichia coli
atgttcgaacaacgcgtaaattctgacgtactgaccgtttctaccgttaactctcaggatcaggtaacccaaaaacccctgcgtgactcggttaaacaggcactgaagaactattttgctcaactgaatggtcaggatgtgaatgacctctatgagctggtactggctgaagtagaacagcccctgttggacatggtgatgcaatacacccgtggtaaccagacccgtgctgcgctgatgatgggcatcaaccgtggtacgctgcgtaaaaaattgaaaaaatacggcatgaactaa

SEQ ID NO: 112 - DNA, 384 bp, Escherichia coli
atgcgccatcgtaagagtggtcgtcaactgaaccgcaacagcagccatcgccaggctatgttccgcaatatggcaggttcactggttcgtcatgaaatcatcaagacgactctgcctaaagcgaaagagctgcgccgcgtagttgagccgctgattactcttgccaagactgatagcgttgctaatcgtcgtctggcattcgcccgtactcgtgataacgagatcgtggcaaaactgtttaacgaactgggcccgcgtttcgcgagccgtgccggtggttacactcgtattctgaagtgtggcttccgtgcaggcgacaacgcgccgatggcttacatcgagctggttgatcgttcagagaaagcagaagctgctgcagagtaa

SEQ ID NO: 113 - DNA, 990 bp, Escherichia coli
atgcagggttctgtgacagagtttctaaaaccgcgcctggttgatatcgagcaagtgagttcgacgcacgccaaggtgacccttgagcctttagagcgtggctttggccatactctgggtaacgcactgcgccgtattctgctctcatcgatgccgggttgcgcggtgaccgaggttgagattgatggtgtactacatgagtacagcaccaaagaaggcgttcaggaagatatcctggaaatcctgctcaacctgaaagggctggcggtgagagttcagggcaaagatgaagttattcttaccttgaataaatctggcattggccctgtgactgcagccgatatcacccacgacggtgatgtcgaaatcgtcaagccgcagcacgtgatctgccacctgaccgatgagaacgcgtctattagcatgcgtatcaaagttcagcgcggtcgtggttatgtgccggcttctacccgaattcattcggaagaagatgagcgcccaatcggccgtctgctggtcgacgcatgctacagccctgtggagcgtattgcctacaatgttgaagcagcgcgtgtagaacagcgtaccgacctggacaagctggtcatcgaaatggaaaccaacggcacaatcgatcctgaagaggcgattcgtcgtgcggcaaccattctggctgaacaactggaagctttcgttgacttacgtgatgtacgtcagcctgaagtgaaagaagagaaaccagagttcgatccgatcctgctgcgccctgttgacgatctggaattgactgtccgctctgctaactgccttaaagcagaagctatccactatatcggtgatctggtacagcgtaccgaggttgagctccttaaaacgcctaaccttggtaaaaaatctcttactgagattaaagacgtgctggcttcccgtggactgtctctgggcatgcgcctggaaaactggccaccggcaagcatcgctgacgagtaa

SEQ ID NO: 114 - DNA, 621 bp, Escherichia coli
atggcaagatatttgggtcctaagctcaagctgagccgtcgtgagggcaccgacttattccttaagtctggcgttcgcgcgatcgataccaagtgtaaaattgaacaagctcctggccagcacggtgcgcgtaaaccgcgtctgtctgactatggtgtgcagttgcgtgaaaagcaaaaagttcgccgtatctatggtgtgctggagcgtcagttccgtaactactacaaagaagcagcacgtctgaaaggcaacaccggtgaaaacctgttggctctgctggaaggtcgtctggacaacgttgtataccgtatgggcttcggtgccactcgtgcagaagcacgtcagctggttagccataaagcaattatggtaaacggtcgtgttgttaacatcgcttcttatcaggttagtccgaatgacgttgtaagcattcgtgagaaagcgaagaagcagtctcgcgtgaaagccgctctggagctggctgagcagcgtgaaaagccaacctggctggaagttgatgctggcaagatggaaggtacgtttaagcgtaagccggagcgttctgatctgtctgcggacattaacgaacacctgatcgtcgagctttactccaagtaa

SEQ ID NO: 115 - DNA, 390 bp, Escherichia coli
atggcaaaggcaccaattcgtgcacgtaaacgtgtaagaaaacaagtctctgacggcgtggctcatatccatgcttctttcaacaacaccatcgtgactatcactgatcgtcagggtaacgcgttgggttgggcaacagccggtggttccggtttccgtggttctcgcaaatccactccgtttgcagctcaggttgcagcagagcgttgcgctgacgccgtgaaagaatacggcatcaagaatctggaagttatggttaaaggtccgggtccaggccgcgaatctactattcgtgctctgaacgccgcaggtttccgcatcactaacattactgatgtgactccgatccctcataacggttgtcgtccgccgaaaaaacgtcgcgtataa

SEQ ID NO: 116 - DNA, 117 bp, Escherichia coli
atgaaagttcgtgcttccgtcaagaaattatgccgtaactgcaaaatcgttaagcgtgatggtgtcatccgtgtgatttgcagtgccgagccgaagcataaacagcgccaaggctga

SEQ ID NO: 117 - DNA, 1332 bp, Escherichia coli
atggctaaacaaccgggattagattttcaaagtgccaaaggtggcttaggcgagctgaaacgcagactgctgtttgttatcggtgcgctgattgtgttccgtattggctcttttattccgatccctggtattgatgccgctgtacttgccaaactgcttgagcaacagcgaggcaccatcattgagatgtttaacatgttctctggtggtgctctcagccgtgcttctatctttgctctggggatcatgccgtatatttcggcgtcgatcattatccagctgctgacggtggttcacccaacgttggcagaaattaagaaagaaggggagtctggtcgtcgtaagatcagccagtacacccgctacggtactctggtgctggcaatattccagtcgatcggtattgctaccggtctgccgaatatgcctggtatgcaaggcctggtgattaacccgggctttgcattctacttcaccgctgttgtaagtctggtcacaggaaccatgttcctgatgtggttgggcgaacagattactgaacgaggtatcggcaacggtatttcaatcattatcttcgccggtattgtcgcgggactcccgccagccattgcccatactatcgagcaagcgcgtcaaggcgacctgcacttcctcgtgttgctgttggttgcagtattagtatttgcagtgacgttctttgttgtatttgttgagcgtggtcaacgccgcattgtggtaaactacgcgaaacgtcagcaaggtcgtcgtgtctatgctgcacagagcacacatttaccgctgaaagtgaatatggcgggggtaatcccggcaatcttcgcttccagtattattctgttcccggcgaccatcgcgtcatggttcgggggcggtactggttggaactggctgacaacaatttcgctgtatttgcagcctgggcaaccgctttatgtgttactctatgcgtctgcaatcatcttcttctgtttcttctacacggcgttggttttcaacccgcgtgaaacagcagataacctgaagaagtccggtgcatttgtaccaggaattcgtccgggagagcaaacggcgaagtatatcgataaagtaatgacccgcctgaccctggttggtgcgctgtatattacctttatctgcctgatcccggagttcatgcgtgatgcaatgaaagtaccgttctacttcggtgggacctcactgcttatcgttgttgtcgtgattatggactttatggctcaagtgcaaactctgatgatgtccagtcagtatgagtctgcattgaagaaggcgaacctgaaaggctacggccgataa

SEQ ID NO: 118 - DNA, 435 bp, Escherichia coli
atgcgtttaaatactctgtctccggccgaaggctccaaaaaggcgggtaaacgcctgggtcgtggtatcggttctggcctcggtaaaaccggtggtcgtggtcacaaaggtcagaagtctcgttctggcggtggcgtacgtcgcggtttcgagggtggtcagatgcctctgtaccgtcgtctgccgaaattcggcttcacttctcgtaaagcagcgattacagccgaaattcgtctgtctgacctggctaaagtagaaggcggtgtagtagacctgaacacgctgaaagcggctaacattatcggtatccagatcgagttcgcgaaagtgatcctggctggcgaagtaacgactccggtaactgttcgtggcctgcgtgttactaaaggcgctcgtgctgctatcgaagctgctggcggtaaaatcgaggaataa

SEQ ID NO: 119 - DNA, 180 bp, Escherichia coli
atggcaaagactattaaaattactcaaacccgcagtgcaatcggtcgtctgccgaaacacaaggcaacgctgcttggcctgggtctgcgtcgtattggtcacaccgtagagcgcgaggatactcctgctattcgcggtatgatcaacgcggtttccttcatggttaaagttgaggagtaa

SEQ ID NO: 120 - DNA, 504 bp, Escherichia coli
atggctcacatcgaaaaacaagctggcgaactgcaggaaaagctgatcgcggtaaaccgcgtatctaaaaccgttaaaggtggtcgtattttctccttcacagctctgactgtagttggcgatggtaacggtcgcgttggttttggttacggtaaagcgcgtgaagttccagcagcgatccagaaagcgatggaaaaagcccgtcgcaatatgattaacgtcgcgctgaataacggcactctgcaacaccctgttaaaggtgttcacacgggttctcgcgtattcatgcagccggcttccgaaggtaccggtatcatcgccggtggtgcaatgcgcgccgttctggaagtcgctggggttcataacgttctggctaaagcctatggttccaccaacccgatcaacgtggttcgtgcaactattgatggcctggaaaatatgaattctccagaaatggtcgctgccaagcgtggtaaatccgttgaagaaattctggggaaataa

SEQ ID NO: 121 - DNA, 354 bp, Escherichia coli
atggataagaaatctgctcgtatccgtcgtgcgacccgcgcacgccgcaagctccaggagctgggcgcaactcgcctggtggtacatcgtaccccgcgtcacatttacgcacaggtaattgcaccgaacggttctgaagttctggtagctgcttctactgtagaaaaagctatcgctgaacaactgaagtacaccggtaacaaagacgcggctgcagctgtgggtaaagctgtcgctgaacgcgctctggaaaaaggcatcaaagatgtatcctttgaccgttccgggttccaatatcatggtcgtgtccaggcactggcagatgctgcccgtgaagctggccttcagttctaa

SEQ ID NO: 122 - DNA, 534 bp, Escherichia coli
atgtctcgtgttgctaaagcaccggtcgttgttcctgccggcgttgacgtaaaaatcaacggtcaggttattacgatcaaaggtaaaaacggcgagctgactcgtactctcaacgatgctgttgaagttaaacatgcagataataccctgaccttcggtccgcgtgatggttacgcagacggttgggcacaggctggtaccgcgcgtgccctgctgaactcaatggttatcggtgttaccgaaggcttcactaagaagctgcagctggttggtgtaggttaccgtgcagcggttaaaggcaatgtgattaacctgtctctgggtttctctcatcctgttgaccatcagctgcctgcgggtatcactgctgaatgtccgactcagactgaaatcgtgctgaaaggcgctgataagcaggtgatcggccaggttgcagcggatctgcgcgcctaccgtcgtcctgagccttataaaggcaagggtgttcgttacgccgacgaagtcgtgcgtaccaaagaggctaagaagaagtaa

SEQ ID NO: 123 - DNA, 393 bp, Escherichia coli
atgagcatgcaagatccgatcgcggatatgctgacccgtatccgtaacggtcaggccgcgaacaaagctgcggtcaccatgccttcctccaagctgaaagtggcaatcgccaacgtgctgaaggaagaaggttttattgaagattttaaagttgaaggcgacaccaagcctgaactggaacttactctgaagtatttccagggcaaagctgttgtagaaagcattcagcgtgtcagccgcccaggtctgcgcatctataaacgtaaagatgagctgccgaaagttatggcgggtctgggtatcgcagttgtttctacctctaaaggtgttatgactgatcgtgcagcgcgccaggctggtcttggtggcgaaattatctgctacgtagcctaa

SEQ ID NO: 124 - DNA, 306 bp, Escherichia coli
atggctaagcaatcaatgaaagcacgcgaagtaaaacgcgtagctttagctgataaatacttcgcgaaacgcgctgaactgaaagcgatcatctctgatgtgaacgcttccgacgaagatcgttggaacgctgttctcaagctgcagactctgccgcgtgattccagcccgtctcgtcagcgtaaccgctgccgtcaaacaggtcgtccgcatggtttcctgcggaagttcgggttgagccgtattaaggtccgtgaagccgctatgcgcggtgaaatcccgggtctgaaaaaggctagctggtaa

SEQ ID NO: 125 - DNA, 540 bp, Escherichia coli
atggcgaaactgcatgattactacaaagacgaagtagttaaaaaactcatgactgagtttaactacaattctgtcatgcaagtccctcgggtcgagaagatcaccctgaacatgggtgttggtgaagcgatcgctgacaaaaaactgctggataacgcagcagcagacctggcagcaatctccggtcaaaaaccgctgatcaccaaagcacgcaaatctgttgcaggcttcaaaatccgtcagggctatccgatcggctgtaaagtaactctgcgtggcgaacgcatgtgggagttctttgagcgcctgatcactattgctgtacctcgtatccgtgacttccgtggcctgtccgctaagtctttcgacggtcgtggtaactacagcatgggtgtccgtgagcagatcatcttcccagaaatcgactacgataaagtcgaccgcgttcgtggtttggatattaccattaccactactgcgaaatctgacgaagaaggccgcgctctgctggctgcctttgacttcccgttccgcaagtaa

SEQ ID NO: 126 - DNA, 315 bp, Escherichia coli
atggcagcgaaaatccgtcgtgatgacgaagttatcgtgttaaccggtaaagataaaggtaaacgcggtaaagttaagaatgtcctgtcttccggcaaggtcattgttgaaggtatcaacctggttaagaaacatcagaagccggttccggccctgaaccaaccgggtggcatcgttgaaaaagaagccgctattcaggtttccaacgtagcaatcttcaatgcggcaaccggcaaggctgaccgtgtaggctttagattcgaagacggtaaaaaagtccgtttcttcaagtctaacagcgaaactatcaagtaa

SEQ ID NO: 127 - DNA, 372 bp, Escherichia coli
atgatccaagaacagactatgctgaacgtcgccgacaactccggtgcacgtcgcgtaatgtgtatcaaggttctgggtggctcgcaccgtcgctacgcaggcgtaggcgacatcatcaagatcaccatcaaagaagcaattccgcgtggtaaggtcaaaaaaggtgatgtgctgaaggcggtagtggtgcgcaccaagaagggtgttcgtcgcccggacggttctgtcattcgcttcgatggtaatgcttgtgttcttctgaacaacaacagcgagcagcctatcggtacgcgtatttttgggccggtaactcgtgagcttcgtagtgagaagttcatgaaaattatctctctggcaccagaagtactctaa

SEQ ID NO: 128 - DNA, 255 bp, Escherichia coli
atgaccgataaaatccgtactctgcaaggtcgcgttgttagcgacaaaatggagaaatccattgttgttgctatcgaacgttttgtgaaacacccgatctacggtaaattcatcaagcgtacgaccaaactgcacgtacatgacgagaacaacgaatgcggtatcggtgacgtggttgaaatccgcgaatgccgtccgctgtccaagactaaatcctggacgctggttcgcgttgtagagaaagcggttctgtaa

SEQ ID NO: 129 - DNA, 192 bp, Escherichia coli
atgaaagcaaaagagctgcgtgagaagagcgttgaagagctgaacaccgagctgctgaacctgctgcgtgagcagttcaacctgcgtatgcaggctgcaagtggccagctgcaacagtctcacctgttgaagcaagtgcgtcgcgatgtcgcacgcgttaagactttactgaacgagaaggcgggtgcgtaa

SEQ ID NO: 130 - DNA, 411 bp, Escherichia coli
atgttacaaccaaagcgtacaaaattccgtaaaatgcacaaaggccgtaaccgcggtctggcgcagggtacggatgttagcttcggcagcttcggtctgaaagctgttggccgtggtcgtctgactgcccgtcagatcgaagcagcacgtcgtgctatgacccgtgcagttaagcgtcaaggtaagatctggatccgtgtgttcccggacaaaccgatcactgaaaagccgctggcagtgcgtatgggtaaaggtaaaggtaacgtggagtattgggttgccttgattcagccgggtaaagtcctgtatgaaatggacggtgttccggaagagctggcccgtgaagcattcaagctggcagcagcgaaactgccgattaaaaccacctttgtaactaagacggtgatgtaa

SEQ ID NO: 131 - DNA, 702 bp, Escherichia coli
atgggtcagaaagtacatcctaatggtattcgcctgggtattgtaaaaccatggaactctacctggtttgcgaacaccaaagaattcgctgacaacctggacagcgattttaaagtacgtcagtacctgactaaggaactggctaaagcgtccgtatctcgtatcgttatcgagcgtccggctaagagcatccgtgtaaccattcacactgctcgcccgggtatcgttatcggtaaaaaaggtgaagacgtagaaaaactgcgtaaggtcgtagcggacatcgctggcgttcctgcacagatcaacatcgccgaagttcgtaagcctgaactggacgcaaaactggttgctgacagcatcacttctcagctggaacgtcgcgttatgttccgtcgtgctatgaagcgtgctgtacagaacgcaatgcgtctgggcgctaaaggtattaaagttgaagttagcggccgtctgggcggcgcggaaatcgcacgtaccgaatggtaccgcgaaggtcgcgtaccgctgcacactctgcgtgctgacatcgactacaacacctctgaagcgcacaccacttacggtgtaatcggcgttaaagtgtggatcttcaaaggcgagatcctgggtggtatggctgctgttgaacaaccggaaaaaccggctgctcagcctaaaaagcagcagcgtaaaggccgtaaataa

SEQ ID NO: 132 - DNA, 333 bp, Escherichia coli
atggaaactatcgctaaacatcgccatgctcgttcttctgctcagaaggttcgccttgttgctgacctgattcgcggtaagaaagtgtcgcaggctctggatattttgacctacaccaacaagaaagcggctgtactggtcaagaaagttctggaatctgccattgctaacgctgaacacaacgatggcgctgacattgacgatctgaaagttacgaaaattttcgtagacgaaggcccgagcatgaagcgcattatgccgcgtgcaaaaggtcgtgcagatcgcatcctgaagcgcaccagccacatcactgtggttgtgtccgatcgctga

SEQ ID NO: 133 - DNA, 279 bp, Escherichia coli
atgccacgttctctcaagaaaggtccttttattgacctgcacttgctgaagaaggtagagaaagcggtggaaagcggagacaagaagcccctgcgcacttggtcccgtcgttcaacgatctttcctaacatgatcggtttgaccatcgctgtccataatggtcgtcagcacgttccggtatttgtaaccgacgaaatggttggtcacaaactgggtgaattcgcaccgactcgtacttatcgcggccacgctgctgataaaaaagcgaagaagaaataa

SEQ ID NO: 134 - DNA, 822 bp, Escherichia coli
atggcagttgttaaatgtaaaccgacatctccgggtcgtcgccacgtagttaaagtggttaaccctgagctgcacaagggcaaaccttttgctccgttgctggaaaaaaacagcaaatccggtggtcgtaacaacaatggccgtatcaccactcgtcatatcggtggtggccacaagcaggcttaccgtattgttgacttcaaacgcaacaaagacggtatcccggcagttgttgaacgtcttgagtacgatccgaaccgttccgcgaacatcgcgctggttctgtacaaagacggtgaacgccgttacatcctggcccctaaaggcctgaaagctggcgaccagattcagtctggcgttgatgctgcaatcaaaccaggtaacaccctgccgatgcgcaacatcccggttggttctactgttcataacgtagaaatgaaaccaggtaaaggcggtcagctggcacgttccgctggtacttacgttcagatcgttgctcgtgatggtgcttatgtcaccctgcgtctgcgttctggtgaaatgcgtaaagtagaagcagactgccgtgcaactctgggcgaagttggcaatgctgagcatatgctgcgcgttctgggtaaagcaggtgctgcacgctggcgtggtgttcgtccgaccgttcgcggtaccgcgatgaacccggtagaccacccacatggtggtggtgaaggtcgtaactttggtaagcacccggtaactccgtggggcgttcagaccaaaggtaagaagacccgcagcaacaagcgtactgataaattcatcgtacgtcgccgtagcaaataa

SEQ ID NO: 135 - DNA, 303 bp, Escherichia coli
atgattcgtgaagaacgtctgctgaaggtgctgcgtgcaccgcacgtttctgaaaaagcgtctactgcgatggaaaaatccaacaccatcgtactcaaagttgctaaagacgcgaccaaagcagaaatcaaagctgctgtgcagaaactgtttgaagtcgaagtcgaagtcgttaacaccctggtagttaaagggaaagttaaacgtcacggacagcgtatcggtcgtcgtagcgactggaaaaaagcttacgtcaccctgaaagaaggccagaatctggacttcgttggcggcgctgagtaa

SEQ ID NO: 136 - DNA, 606 bp, Escherichia coli
atggaattagtattgaaagacgcgcagagcgcgctgactgtttccgaaactaccttcggtcgtgatttcaacgaagcgctggttcaccaggttgttgttgcttatgcagctggtgctcgtcagggtactcgtgctcagaagactcgtgctgaagtaactggttccggtaaaaaaccgtggcgccagaaaggcaccggccgtgcgcgttctggttctatcaagagcccgatctggcgttctggtggcgtgacctttgctgctcgtccgcaggaccacagtcaaaaagttaacaagaagatgtaccgcggcgcgctgaaaagcatcctgtccgaactggtacgtcaggatcgtctgatcgttgtcgagaagttctctgtagaagcgccgaaaactaagctgctggcacagaaactgaaagacatggctctggaagatgtgctgatcatcaccggtgagctggacgaaaacctgttcctggctgcgcgcaacctgcacaaggttgacgtacgcgatgcaactggtatcgacccggttagcctgatcgccttcgacaaagtcgtaatgactgctgatgctgttaagcaagttgaggagatgctggcatga

SEQ ID NO: 137 - DNA, 630 bp, Escherichia coli
atgattggtttagtcggtaaaaaagtgggtatgacccgtatcttcacagaagacggcgtttctatcccagtaaccgtaatcgaagttgaagcaaaccgcgttactcaggttaaagacctggctaacgatggctaccgtgctattcaggtgaccaccggtgctaaaaaagctaaccgtgtgaccaagcctgaagctggccacttcgctaaagctggcgtagaagctggccgtggtctgtgggaattccgcctggctgaaggcgaagagttcactgtaggtcagagcattagcgttgaactgtttgctgacgttaaaaaagttgacgtaactggcacctctaaaggtaaaggtttcgcaggtaccgttaagcgctggaacttccgtacccaggacgctactcacggtaactccttgtctcaccgcgttccgggttctatcggtcagaaccagactccgggcaaagtgttcaaaggcaagaaaatggcaggtcagatgggtaacgaacgtgtaaccgttcagagccttgacgtagtacgcgttgacgctgagcgcaacctgctgctggttaaaggtgctgtcccgggtgcaaccggtagcgacctgatcgttaaaccagctgtgaaggcgtaa

SEQ ID NO: 138 - DNA, 312 bp, Escherichia coli
atgcagaaccaaagaatccgtatccgcctgaaagcgtttgatcatcgtctgatcgatcaagcaaccgcggaaatcgtcgagactgccaagcgcactggtgcgcaggtccgtggtccgatcccgctgccgacacgcaaagagcgcttcactgttctgatctccccgcacgtcaacaaagacgcgcgcgatcagtacgaaatccgtactcacttgcgtctggttgacatcgttgagccaaccgagaaaaccgttgatgctctgatgcgtctggatctggctgccggtgtagacgtgcagatcagcctgggttaa

SEQ ID NO: 139 - DNA, 2115 bp, Escherichia coli
atggctcgtacaacacccatcgcacgctaccgtaacatcggtatcagtgcgcacatcgacgccggtaaaaccactactaccgaacgtattctgttctacaccggtgtaaaccataaaatcggtgaagttcatgacggcgctgcaaccatggactggatggagcaggagcaggaacgtggtattaccatcacttccgctgcgactactgcattctggtctggtatggctaagcagtatgagccgcatcgcatcaacatcatcgacaccccggggcacgttgacttcacaatcgaagtagaacgttccatgcgtgttctcgatggtgcggtaatggtttactgcgcagttggtggtgttcagccgcagtctgaaaccgtatggcgtcaggcaaacaaatataaagttccgcgcattgcgttcgttaacaaaatggaccgcatgggtgcgaacttcctgaaagttgttaaccagatcaaaacccgtctgggcgcgaacccggttccgctgcagctggcgattggtgctgaagaacatttcaccggtgttgttgacctggtgaaaatgaaagctatcaactggaacgacgctgaccagggcgtaaccttcgaatacgaagatatcccggcagacatggttgaactggctaacgaatggcaccagaacctgatcgaatccgcagctgaagcttctgaagagctgatggaaaaatacctgggtggtgaagaactgactgaagcagaaatcaaaggtgctctgcgtcagcgcgttctgaacaacgaaatcatcctggtaacctgtggttctgcgttcaagaacaaaggtgttcaggcgatgctggatgcggtaattgattacctgccatccccggttgacgtacctgcgatcaacggtatcctggacgacggtaaagacactccggctgaacgtcacgcaagtgatgacgagccgttctctgcactggcgttcaaaatcgctaccgacccgtttgttggtaacctgaccttcttccgtgtttactccggtgtggttaactctggtgataccgtactgaactccgtgaaagctgcacgtgagcgtttcggtcgtatcgttcagatgcacgctaacaaacgtgaagagatcaaagaagttcgcgcgggcgacatcgctgctgctatcggtctgaaagacgtaaccactggtgacaccctgtgtgacccggatgcgccgatcattctggaacgtatggaattccctgagccggtaatctccatcgcagttgaaccgaaaaccaaagctgaccaggaaaaaatgggtctggctctgggccgtctggctaaagaagacccgtctttccgtgtatggactgacgaagaatctaaccagaccatcatcgcgggtatgggcgaactgcacctcgacatcatcgttgaccgtatgaagcgtgaattcaacgttgaagcgaacgtaggtaaaccgcaggttgcttaccgtgaaactatccgccagaaagttaccgatgttgaaggtaaacacgcgaaacagtctggtggtcgtggtcagtatggtcatgttgttatcgacatgtacccgctggagccgggttcaaacccgaaaggctacgagttcatcaacgacattaaaggtggtgtaatccctggcgaatacatcccggccgttgataaaggtatccaggaacagctgaaagcaggtccgctggcaggctacccggtagtagacatgggtattcgtctgcacttcggttcttaccatgacgttgactcctctgaactggcgtttaaactggctgcttctatcgcctttaaagaaggctttaagaaagcgaaaccagttctgcttgagccgatcatgaaggttgaagtagaaactccggaagagaacaccggtgacgttatcggtgacttgagccgtcgtcgtggtatgctcaaaggtcaggaatctgaagttactggcgttaagatccacgctgaagtaccgctgtctgaaatgttcggatacgcaactcagctgcgttctctgaccaaaggtcgtgcatcatacactatggaattcctgaagtatgatgaagcgccgagtaacgttgctcaggccgtaattgaagcccgtggtaaataa

SEQ ID NO: 140 - DNA, 540 bp, Escherichia coli
atgccacgtcgtcgcgtcattggtcagcgtaaaattctgccggatccgaagttcggatcagaactgctggctaaatttgtaaatatcctgatggtagatggtaaaaaatctactgctgaatctatcgtatacagcgcgctggagaccctggctcagcgctctggtaaatctgaactggaagcattcgaagtagctctcgaaaacgtgcgcccgactgtagaagttaagtctcgccgcgttggtggttctacttatcaggtaccagttgaagtccgtccggttcgtcgtaatgctctggcaatgcgttggatcgttgaagctgctcgtaaacgcggtgataaatccatggctctgcgcctggcgaacgaactttctgatgctgcagaaaacaaaggtactgcagttaagaaacgtgaagacgttcaccgtatggccgaagccaacaaggcgttcgcacactaccgttggttatcccttcggagttttagtcaccaggcgggcgcttccagtaagcagcccgctttgggctacttaaattga

SEQ ID NO: 141 - DNA, 375 bp, Escherichia coli
atggcaacagttaaccagctggtacgcaaaccacgtgctcgcaaagttgcgaaaagcaacgtgcctgcgctggaagcatgcccgcaaaaacgtggcgtatgtactcgtgtatatactaccactcctaaaaaaccgaactccgcgctgcgtaaagtatgccgtgttcgtctgactaacggtttcgaagtgacttcctacatcggtggtgaaggtcacaacctgcaggagcactccgtgatcctgatccgtggcggtcgtgttaaagacctcccgggtgttcgttaccacaccgtacgtggtgcgcttgactgctccggcgttaaagaccgtaagcaggctcgttccaagtatggcgtgaagcgtcctaaggcttaa

SEQ ID NO: 142 - DNA, 633 bp, Escherichia coli
atggtgcttggcaaaccgcaaacagacccgactctcgaatggttcttgtctcattgccacattcataagtacccatccaagagcacgcttattcaccagggtgaaaaagcggaaacgctgtactacatcgttaaaggctctgtggcagtgctgatcaaagacgaagagggtaaagaaatgatcctctcctatctgaatcagggtgattttattggcgaactgggcctgtttgaagagggccaggaacgtagcgcatgggtacgtgcgaaaaccgcctgtgaagtggctgaaatttcgtacaaaaaatttcgccaattgattcaggtaaacccggacattctgatgcgtttgtctgcacagatggcgcgtcgtctgcaagtcacttcagagaaagtgggcaacctggcgttcctcgacgtgacgggccgcattgcacagactctgctgaatctggcaaaacaaccagacgctatgactcacccggacggtatgcaaatcaaaattacccgtcaggaaattggtcagattgtcggctgttctcgtgaaaccgtgggacgcattctgaagatgctggaagatcagaacctgatctccgcacacggtaaaaccatcgtcgtttacggcactcgttaa

SEQ ID NO: 143 - DNA, 1104 bp, Escherichia coli
atgaaaaatgttggttttatcggctggcgcggtatggtcggctccgttctcatgcaacgcatggttgaagagcgcgacttcgacgccattcgccctgtcttcttttctacttctcagcttggccaggctgcgccgtcttttggcggaaccactggcacacttcaggatgcctttgatctggaggcgctaaaggccctcgatatcattgtgacctgtcagggcggcgattataccaacgaaatctatccaaagcttcgtgaaagcggatggcaaggttactggattgacgcagcatcgtctctgcgcatgaaagatgacgccatcatcattcttgaccccgtcaatcaggacgtcattaccgacggattaaataatggcatcaggacttttgttggcggtaactgtaccgtaagcctgatgttgatgtcgttgggtggtttattcgccaatgatcttgttgattgggtgtccgttgcaacctaccaggccgcttccggcggtggtgcgcgacatatgcgtgagttattaacccagatgggccatctgtatggccatgtggcagatgaactcgcgaccccgtcctctgctattctcgatatcgaacgcaaagtcacaaccttaacccgtagcggtgagctgccggtggataactttggcgtgccgctggcgggtagcctgattccgtggatcgacaaacagctcgataacggtcagagccgcgaagagtggaaagggcaggcggaaaccaacaagatcctcaacacatcttccgtaattccggtagatggtttatgtgtgcgtgtcggggcattgcgctgccacagccaggcattcactattaaattgaaaaaagatgtgtctattccgaccgtggaagaactgctggctgcgcacaatccgtgggcgaaagtcgttccgaacgatcgggaaatcactatgcgtgagctaaccccagctgccgttaccggcacgctgaccacgccggtaggccgcctgcgtaagctgaatatgggaccagagttcctgtcagcctttaccgtgggcgaccagctgctgtggggggccgcggagccgctgcgtcggatgcttcgtcaactggcgtaa

SEQ ID NO: 144 - DNA, 1104 bp, Escherichia coli
atgaacataaagggtaaagcgttactggcaggatgtatcgcgctggcattcagcaatatggctctggcagaagatattaaagtcgcggtcgtgggcgcaatgtccggtccggttgcgcagtacggtgaccaggagtttaccggcgcagagcaggcggttgcggatatcaacgctaaaggcggcattaaaggcaacaaactgcaaatcgtaaaatatgacgatgcctgtgacccgaaacaggcggttgcggtggcgaacaaagtcgttaacgacggcattaaatatgtgattggtcacctctgttcttcatcaacgcagcctgcgtctgacatctacgaagacgaaggcattttaatgatcaccccagcggcaaccgcgccggagctgaccgcccgtggctatcagctgatcctgcgcaccaccggcctggactccgaccaggggccgacggcggcgaaatatattcttgagaaagtgaaaccgcagcgtattgctatcgttcacgacaaacagcaatacggcgaaggtctggcgcgagcggtgcaggacggcctgaagaaaggcaatgcaaacgtggtgttctttgatggcatcaccgccggggaaaaagatttctcaacgctggtggcgcgtctgaaaaaagagaatatcgacttcgtttactacggcggttatcacccggaaatggggcaaatcctgcgtcaggcacgcgcggcagggctgaaaactcagtttatggggccggaaggtgtggctaacgtttcgctgtctaacattgcgggcgaatcagcggaagggctgctggtgaccaagccgaagaactacgatcaggttccggcgaacaaacccattgttgacgcgatcaaagcgaaaaaacaggacccaagtggcgcattcgtttggaccacctacgccgcgctgcaatctttgcaggcgggcctgaatcagtctgacgatccggctgaaatcgccaaatacctgaaagcgaactccgtggataccgtaatgggaccgctgacctgggatgagaaaggcgatctgaaaggctttgagttcggcgtatttgactggcacgccaacggcacggcgaccgatgcgaagtaa

SEQ ID NO: 145 - DNA, 435 bp, Escherichia coli
atggcttataaacacattctcatcgcggtcgacctctccccggaaagcaaagttctggtagagaaagcagtctctatggctcgcccctacaatgcgaaagtttctctgatccacgtagatgtaaactactctgacctatacaccgggcttattgatgtgaatctgggtgatatgcagaaacgcatctctgaagagacacatcatgcactgaccgagctttccactaatgcaggctacccaatcactgaaaccctgagcggcagcggcgacctgggccaggttctggtcgatgcaatcaagaaatacgatatggatttggtggtttgtggtcaccaccaggacttctggagcaaactgatgtcttccgcacgtcagctgatcaacaccgttcacgttgatatgctgattgttccgctgcgcgacgaagaagaataa

SEQ ID NO: 146 - DNA, 333 bp, Escherichia coli
atgaaaaaagtattaggcgttattcttggtggtctgcttcttctgccagttgtgagcaatgcagcggatgcgcaaaaagcagctgataacaaaaaaccggtcaactcctggacctgtgaagatttcctggctgtggacgaatccttccagccaactgcagttggttttgctgaagcgctgaacaacaaagataaaccagaagatgcggttttagatgttcagggtattgcaaccgtaaccccagctatcgttcaggcttgtactcaggataaacaagccaactttaaagataaagttaaaggcgaatgggacaaaattaagaaagatatgtaa

SEQ ID NO: 147 - DNA, 252 bp, Escherichia coli
atggccaatgttgaaatctataccaaagaaacctgcccgtattgccatcgtgcaaaagcactgctgagcagcaagggcgtgagtttccaggagctgccgatcgatggcaacgccgccaagcgtgaagagatgatcaaacgcagcggtcgcaccacggttccccagatttttattgacgcacagcacattggcggctgtgatgacttgtatgcattggatgcacgtggtggactggatcccctgctgaaataa

SEQ ID NO: 148 - DNA, 168 bp, Escherichia coli
atggctaaaggtattcgtgagaaaatcaagctggtttcttctgctggtactggtcacttctataccactacgaagaacaaacgtactaagccggaaaaactggaactgaaaaaattcgatccagttgttcgccagcacgtgatctacaaagaagcgaaaatcaaataa

SEQ ID NO: 149 - DNA, 237 bp, Escherichia coli
atgtcccgagtctgccaagttactggcaagcgtccggtgaccggtaacaaccgttcccacgcactgaacgcgactaaacgccgtttcctgccgaacctgcactctcaccgtttctgggttgagagcgagaagcgttttgtcaccctgcgcgtatctgctaaaggtatgcgtgtaatcgataaaaaaggcatcgatacagttctggctgaactgcgtgcccgtggcgaaaagtactaa

SEQ ID NO: 150 - DNA, 276 bp, Escherichia coli
atggcacgcgtaactgttcaggacgctgtagagaaaattggtaaccgttttgacctggtactggtcgccgcgcgtcgcgctcgtcagatgcaggtaggcggaaaggatccgctggtaccggaagaaaacgataaaaccactgtaatcgcgctgcgcgaaatcgaagaaggtctgatcaacaaccagatcctcgacgttcgcgaacgccaggaacagcaagagcaggaagccgctgaattacaagccgttaccgctattgctgaaggtcgtcgttaa

SEQ ID NO: 151 - DNA, 99 bp, Escherichia coli
atgactacttccatgctcaacgcaaaactactaccaactgcgccatccgccgcagtggtcgtcgtgcgtgtggtggtggtcgtcggcaatgcgccgtag

SEQ ID NO: 152 - DNA, 141 bp, Escherichia coli
atgaaacgcacttttcaaccgtctgtactgaagcgcaaccgttctcacggcttccgtgctcgtatggctactaaaaatggtcgtcaggttctggcacgtcgtcgtgctaaaggccgcgctcgtctgaccgtttctaagtaa

SEQ ID NO: 153 - DNA, 1371 bp, Escherichia coli
atgttgaataatgctatgagcgtagtgatccttgccgcaggcaaaggcacgcgcatgtattccgatcttccgaaagtgctgcatacccttgccgggaaagcgatggttcagcatgtcattgatgctgcgaatgaattaggcgcagcgcacgttcacctggtgtacggtcacggcggcgatctgctaaaacaggcgctgaaagacgacaaccttaactgggtgcttcaggcagagcagctgggtacgggtcatgcaatgcagcaggccgcacctttctttgccgatgatgaagacattttaatgctctacggcgacgtgccgctgatctctgtcgaaacactccagcgtctgcgtgatgctaaaccgcagggtggcattggtctgctgacggtgaaactggatgatccgaccggttatggacgtatcacccgtgaaaacggcaaagttaccggcattgttgagcacaaagatgccaccgacgagcagcgtcagattcaggagatcaacaccggcattctgattgccaacggcgcagatatgaaacgctggctggcgaagctgaccaacaataatgctcagggcgaatactacatcaccgacattattgcgctggcgtatcaggaagggcgtgaaatcgtcgccgttcatccgcaacgtttaagcgaagtagaaggcgtgaataaccgcctgcaactctcccgtctggagcgtgtttatcagtccgaacaggctgaaaaactgctgttagcaggcgttatgctgcgcgatccagcgcgttttgatctgcgtggtacgctaactcacgggcgcgatgttgaaattgatactaacgttatcatcgagggcaacgtgactctcggtcatcgcgtgaaaattggcaccggttgcgtgattaaaaacagcgtgattggcgatgattgcgaaatcagtccgtataccgttgtggaagatgcgaatctggcagcggcctgtaccattggcccgtttgcccgtttgcgtcctggtgctgagttgctggaaggtgctcacgtcggtaacttcgttgagatgaaaaaagcgcgtctgggtaaaggctcgaaagctggtcatctgacttacctgggcgatgcggaaattggcgataacgttaacatcggcgcgggaaccattacctgcaactacgatggtgcgaataaatttaagaccattatcggcgacgatgtgtttgttggttccgacactcagctggtggccccggtaacagtaggcaaaggcgcgaccattgctgcgggtacaactgtgacgcgtaatgtcggcgaaaatgcattagctatcagccgtgtgccgcagactcagaaagaaggctggcgtcgtccggtaaagaaaaagtga

SEQ ID NO: 154 - DNA, 864 bp, Escherichia coli
atggccggcgcaaaagagatacgtagtaagatcgcaagcgtccagaacacgcaaaagatcactaaagcgatggagatggtcgccgcttccaaaatgcgtaaatcgcaggatcgcatggcggccagccgtccttatgcagaaaccatgcgcaaagtgattggtcaccttgcacacggtaatctggaatataagcacccttacctggaagaccgcgacgttaaacgcgtgggctacctggtggtgtcgaccgaccgtggtttgtgcggtggtttgaacattaacctgttcaaaaaactgctggcggaaatgaagacctggaccgacaaaggcgttcaatgcgacctcgcaatgatcggctcgaaaggcgtgtcgttcttcaactccgtgggcggcaatgttgttgcccaggtcaccggcatgggggataacccttccctgtccgaactgatcggtccggtaaaagtgatgttgcaggcctacgacgaaggccgtctggacaagctttacattgtcagcaacaaatttattaacaccatgtctcaggttccgaccatcagccagctgctgccgttaccggcatcagatgatgatgatctgaaacataaatcctgggattacctgtacgaacccgatccgaaggcgttgctggataccctgctgcgtcgttatgtcgaatctcaggtttatcagggcgtggttgaaaacctggccagcgagcaggccgcccgtatggtggcgatgaaagccgcgaccgacaatggcggcagcctgattaaagagctgcagttggtatacaacaaagctcgtcaggccagcattactcaggaactcaccgagatcgtctcgggggccgccgcggtttaa

SEQ ID NO: 155 - DNA, 1542 bp, Escherichia coli
atgcaactgaattccaccgaaatcagcgaactgatcaagcagcgcattgctcagttcaatgttgtgagtgaagctcacaacgaaggtactattgtttctgtaagtgacggtgttatccgcattcacggcctggccgattgtatgcagggtgaaatgatctccctgccgggtaaccgttacgctatcgcactgaacctcgagcgcgactctgtaggtgcggttgttatgggtccgtacgctgaccttgccgaaggcatgaaagttaagtgtactggccgtatcctggaagttccggttggccgtggcctgctgggccgtgtggttaacactctgggtgcaccaatcgacggtaaaggtccgctggatcacgacggcttctctgctgtagaagcaatcgctccgggcgttatcgaacgtcagtccgtagatcagccggtacagaccggttataaagccgttgactccatgatcccaatcggtcgtggtcagcgtgaattgatcatcggtgaccgtcagacaggtaaaaccgcactggctatcgatgccatcatcaaccagcgcgattccggtatcaaatgtatctatgtcgctatcggccagaaagcgtccaccatttctaacgtggtacgtaaactggaagagcacggcgcactggctaacaccatcgttgtggtagcaaccgcgtctgaatccgctgcactgcaatacctggcaccgtatgccggttgcgcaatgggcgaatacttccgtgaccgcggtgaagatgcgctgatcatttacgatgacctgtctaaacaggctgttgcttaccgtcagatctccctgctgctccgtcgtccgccaggacgtgaagcattcccgggcgacgttttctacctccactctcgtctgctggagcgtgctgcacgtgttaacgccgaatacgttgaagccttcaccaaaggtgaagtgaaagggaaaaccggttctctgaccgcactgccgattatcgaaactcaggcgggtgacgtttctgcgttcgttccgaccaacgtaatctccattaccgatggtcagatcttcctggaaaccaacctgttcaacgccggtattcgtcctgcggttaacccgggtatttccgtatcccgtgttggtggtgcagcacagaccaagatcatgaaaaaactgtccggtggtatccgtaccgctctggcacagtatcgtgaactggcagcgttctctcagtttgcatccgaccttgacgatgcaacacgtaagcagcttgaccacggtcagaaagtgaccgaactgctgaaacagaaacagtatgcgccgatgtccgttgcgcagcagtctctggttctgttcgcagcagaacgtggttacctggcggatgttgaactgtcgaaaattggcagcttcgaagccgctctgctggcttacgtcgaccgtgatcacgctccgttgatgcaagagatcaaccagaccggtggctacaacgacgaaatcgaaggcaagctgaaaggcatcctcgattccttcaaagcaacccaatcctggtaa

SEQ ID NO: 156 - DNA, 534 bp, Escherichia coli
atgtctgaatttattacggtagctcgcccctacgccaaagcagcttttgactttgccgtcgaacaccaaagtgtagaacgctggcaggacatgctggcgtttgccgccgaggtaaccaaaaacgaacaaatggcagagcttctctctggcgcgcttgcgccagaaacgctcgccgagtcgtttatcgcagtttgtggtgagcaactggacgaaaacggtcagaacctgattcgggttatggctgaaaatggtcgtcttaacgcgctcccggatgttctggagcagtttattcacctgcgtgccgtgagtgaggctaccgctgaggtagacgtcatttccgctgccgcactgagtgaacaacagctcgcgaaaatttctgctgcgatggaaaaacgtctgtcacgcaaagttaagctgaattgcaaaatcgataagtctgtaatggcaggcgttatcatccgagcgggtgatatggtcattgatggcagcgtacgcggtcgtcttgagcgccttgcagacgtcttgcagtcttaa

SEQ ID NO: 157 - DNA, 240 bp, Escherichia coli
atggaaaacctgaatatggatctgctgtacatggctgccgctgtgatgatgggtctggcggcaatcggtgctgcgatcggtatcggcatcctcgggggtaaattcctggaaggcgcagcgcgtcaacctgatctgattcctctgctgcgtactcagttctttatcgttatgggtctggtggatgctatcccgatgatcgctgtaggtctgggtctgtacgtgatgttcgctgtcgcgtag

SEQ ID NO: 158 - DNA, 816 bp, Escherichia coli
atggcttcagaaaatatgacgccgcaggattacataggacaccacctgaataaccttcagctggacctgcgtacattctcgctggtggatccacaaaaccccccagccaccttctggacaatcaatattgactccatgttcttctcggtggtgctgggtctgttgttcctggttttattccgtagcgtagccaaaaaggcgaccagcggtgtgccaggtaagtttcagaccgcgattgagctggtgatcggctttgttaatggtagcgtgaaagacatgtaccatggcaaaagcaagctgattgctccgctggccctgacgatcttcgtctgggtattcctgatgaacctgatggatttactgcctatcgacctgctgccgtacattgctgaacatgtactgggtctgcctgcactgcgtgtggttccgtctgcggacgtgaacgtaacgctgtctatggcactgggcgtatttatcctgattctgttctacagcatcaaaatgaaaggcatcggcggcttcacgaaagagttgacgctgcagccgttcaatcactgggcgttcattcctgtcaacttaatccttgaaggggtaagcctgctgtccaaaccagtttcactcggtttgcgactgttcggtaacatgtatgccggtgagctgattttcattctgattgctggtctgttgccgtggtggtcacagtggatcctgaatgtgccgtgggccattttccacatcctgatcattacgctgcaagccttcatcttcatggttctgacgatcgtctatctgtcgatggcgtctgaagaacattaa

SEQ ID NO: 159 - DNA, 891 bp, Escherichia coli
atgaacatgaaaaaactggctaccctggtttccgctgttgcgctaagcgccaccgtcagtgcgaatgcgatggcaaaagacaccatcgcgctggtggtctccacgcttaacaacccgttctttgtatcgctgaaagatggcgcgcagaaagaggcggataaacttggctataacctggtggtgctggactcccagaacaacccggcgaaagagctggcgaacgtgcaggacttaaccgttcgcggcacaaaaattctgctgattaacccgaccgactccgacgcagtgggtaatgctgtgaagatggctaaccaggcgaacatcccggttatcactcttgaccgccaggcaacgaaaggtgaagtggtgagccacattgcttctgataacgtactgggcggcaaaatcgctggtgattacatcgcgaagaaagcgggtgaaggtgccaaagttatcgagctgcaaggcattgctggtacatccgcagcccgtgaacgtggcgaaggcttccagcaggccgttgctgctcacaagtttaatgttcttgccagccagccagcagattttgatcgcattaaaggtttgaacgtaatgcagaacctgttgaccgctcatccggatgttcaggctgtattcgcgcagaatgatgaaatggcgctgggcgcgctgcgcgcactgcaaactgccggtaaatcggatgtgatggtcgtcggatttgacggtacaccggatggcgaaaaagcggtgaatgatggcaaactagcagcgactatcgctcagctacccgatcagattggcgcgaaaggcgtcgaaaccgcagataaagtgctgaaaggcgagaaagttcaggctaagtatccggttgatctgaaactggttgttaagcagtag

SEQ ID NO: 160 - DNA, 99 bp, Escherichia coli
atgacagcccttctacgagtgattagcctggtcgtgattagcgtggtggtgattattatcccaccgtgcggggctgcacttggacgaggaaaggcttag

SEQ ID NO: 161 - DNA, 330 bp, Escherichia coli
atgagcgataaaattattcacctgactgacgacagttttgacacggatgtactcaaagcggacggggcgatcctcgtcgatttctgggcagagtggtgcggtccgtgcaaaatgatcgccccgattctggatgaaatcgctgacgaatatcagggcaaactgaccgttgcaaaactgaacatcgatcaaaaccctggcactgcgccgaaatatggcatccgtggtatcccgactctgctgctgttcaaaaacggtgaagtggcggcaaccaaagtgggtgcactgtctaaaggtcagttgaaagagttcctcgacgctaacctggcgtaa

SEQ ID NO: 162 - DNA, 2262 bp, Escherichia coli
atgacaatattgaatcacaccctcggtttccctcgcgttggcctgcgtcgcgagctgaaaaaagcgcaagaaagttattgggcggggaactccacgcgtgaagaactgctggcggtagggcgtgaattgcgtgctcgtcactgggatcaacaaaagcaagcgggtatcgacctgctgccggtgggcgattttgcctggtacgatcatgtactgaccaccagtctgctgctgggtaacgttccggcgcgtcatcagaacaaagatggttcggtagatatcgacaccctgttccgtattggtcgtggacgtgcgccgactggcgaacctgcggcggcagcggaaatgaccaaatggtttaacaccaactatcactacatggtgccggagttcgttaaaggccaacagttcaaactgacctggacgcagctgctggacgaagtggacgaggcgctggcgctgggccacaaggtgaaacctgtgctgctggggccggttacctggctgtggctggggaaagtgaaaggtgaacaatttgaccgcctgagcctgctgaacgacattctgccggtttatcagcaagtgctggcagaactggcgaaacgcggcatcgagtgggtacagattgatgaacccgcgctggtactggaactaccacaggcgtggctggacgcatacaaacccgcttacgacgcgctccagggacaggtgaaactgctgctgaccacctattttgaaggcgtaacgccaaatctcgacacgattactgcgctgcctgttcagggtctgcatgttgacctcgtacatggtaaagatgacgttgctgaactgcacaagcgcctgccttctgactggttgctgtctgcgggtctgatcaatggtcgtaacgtctggcgcgccgatcttaccgagaaatatgcgcaaattaaggacattgtcggcaaacgtgatttgtgggtggcatcttcctgctcgttgctgcacagccccatcgacctgagcgtggaaacgcgtcttgatgcagaagtgaaaagctggtttgccttcgccctacaaaaatgccatgaactggcactgctgcgcgatgcgctgaacagtggtgacacggcagctctggcagagtggagcgccccgattcaggcacgtcgtcactctacccgcgtacataatccggcggtagaaaagcgtctggcggcgatcaccgcccaggacagccagcgtgcgaatgtctatgaagtgcgtgctgaagcccagcgtgcgcgttttaaactgccagcgtggccgaccaccacgattggttccttcccgcaaaccacggaaattcgtaccctgcgtctggatttcaaaaagggcaatctcgacgccaacaactaccgcacgggcattgcggaacatatcaagcaggccattgttgagcaggaacgtttgggactggatgtgctggtacatggcgaggccgagcgtaatgacatggtggaatactttggcgagcacctcgacggatttgtctttacgcaaaacggttgggtacagagctacggttcccgctgcgtgaagccaccgattgtcattggtgacattagccgcccggcaccgattaccgtggagtgggcgaagtatgcgcaatcgctgaccgacaaaccggtgaaagggatgctgacggggccggtgaccatactctgctggtcgttcccgcgtgaagatgtcagccgtgaaaccatcgccaaacagattgcgctggcgctgcgtgatgaagtggccgatctggaagccgctggaattggcatcatccagattgacgaaccggcgctgcgcgaaggtttaccgctgcgtcgtagcgactgggatgcgtatctccagtggggcgtagaggccttccgtatcaacgccgccgtggcgaaagatgacacacaaatccacactcacatgtgttattgcgagttcaacgacatcatggattcgattgcggcgctggacgcagacgtcatcaccatcgaaacctcgcgttccgacatggagttgctggagtcgtttgaagagtttgattatccaaatgaaatcggtcctggcgtctatgacattcactcgccaaacgtaccgagcgtggaatggattgaagccttgctgaagaaagcggcaaaacgcattccggcagagcgcctgtgggtcaacccggactgtggcctgaaaacgcgcggctggccagaaacccgcgcggcactggcgaacatggtgcaggcggcgcagaacttgcgtcgggggtaa

SEQ ID NO: 163 - DNA, 213 bp, Escherichia coli
atgaaaaaagatattcacccgaaatacgaagaaattactgctagctgctcttgcggtaacgtaatgaaaatccgctccaccgttggtcatgacctgaacctcgacgtgtgcagcaagtgccacccgttcttcactggcaaacagcgtgatgttgctaccggtggccgtgttgaccgcttcaacaagcgtttcaacatcccgggcagcaaataa

SEQ ID NO: 164 - DNA, 429 bp, Escherichia coli
atggctaagaaagtacaagcctatgtcaagctgcaggttgcagctggtatggctaacccgagtccgccagtaggtccggctctgggtcagcagggcgtaaacatcatggaattctgcaaagcgttcaacgcaaaaactgattccatcgaaaaaggtctgccgattccggtagtaatcaccgtttacgctgaccgttctttcactttcgttaccaagaccccgccggcagcagttctgctgaaaaaagcggctggtatcaagtctggttccggtaagccgaacaaagacaaagtgggtaaaatttcccgcgctcagctgcaggaaatcgcgcagaccaaagctgccgacatgactggtgccgacattgaagcgatgactcgctccatcgaaggtactgcacgttccatgggcctggtagtggaggactaa

SEQ ID NO: 165 - DNA, 705 bp, Escherichia coli
atggctaaactgaccaagcgcatgcgtgttatccgcgagaaagttgatgcaaccaaacagtacgacatcaacgaagctatcgcactgctgaaagagctggcgactgctaaattcgtagaaagcgtggacgtagctgttaacctcggcatcgacgctcgtaaatctgaccagaacgtacgtggtgcaactgtactgccgcacggtactggccgttccgttcgcgtagccgtatttacccaaggtgcaaacgctgaagctgctaaagctgcaggcgcagaactggtaggtatggaagatctggctgaccagatcaagaaaggcgaaatgaactttgacgttgttattgcttctccggatgcaatgcgcgttgttggccagctgggccaggttctgggtccgcgcggcctgatgccaaacccgaaagtgggtactgtaacaccgaacgttgctgaagcggttaaaaacgctaaagctggccaggttcgttaccgtaacgacaaaaacggcatcatccacaccaccatcggtaaagtggactttgacgctgacaaactgaaagaaaacctggaagctctgctggttgcgctgaaaaaagcaaaaccgactcaggcgaaaggcgtgtacatcaagaaagttagcatctccaccaccatgggtgcaggtgttgcagttgaccaggctggcctgagcgcttctgtaaactaa

SEQ ID NO: 166 - DNA, 498 bp, Escherichia coli
atggctttaaatcttcaagacaaacaagcgattgttgctgaagtcagcgaagtagccaaaggcgcgctgtctgcagtagttgcggattcccgtggcgtaactgtagataaaatgactgaactgcgtaaagcaggtcgcgaagctggcgtatacatgcgtgttgttcgtaacaccctgctgcgccgtgctgttgaaggtactccgttcgagtgcctgaaagacgcgtttgttggtccgaccctgattgcatactctatggaacacccgggcgctgctgctcgtctgttcaaagagttcgcgaaagcgaatgcaaaatttgaggtcaaagccgctgcctttgaaggtgagctgatcccggcgtctcagatcgaccgcctggcaactctgccgacctacgaagaagcaattgcacgcctgatggcaaccatgaaagaagcttcggctggcaaactggttcgtactctggctgctgtacgcgatgcgaaagaagctgcttaa

SEQ ID NO: 167 - DNA, 366 bp, Escherichia coli
atgtctatcactaaagatcaaatcattgaagcagttgcagctatgtctgtaatggacgttgtagaactgatctctgcaatggaagaaaaattcggtgtttccgctgctgctgctgtagctgtagctgctggcccggttgaagctgctgaagaaaaaactgaattcgacgtaattctgaaagctgctggcgctaacaaagttgctgttatcaaagcagtacgtggcgcaactggcctgggtctgaaagaagctaaagacctggtagaatctgcaccggctgctctgaaagaaggcgtgagcaaagacgacgcagaagcactgaaaaaagctctggaagaagctggcgctgaagttgaagttaaataa

SEQ ID NO: 168 - DNA, 4029 bp, Escherichia coli
atggtttactcctataccgagaaaaaacgtattcgtaaggattttggtaaacgtccacaagttctggatgtaccttatctcctttctatccagcttgactcgtttcagaaatttatcgagcaagatcctgaagggcagtatggtctggaagctgctttccgttccgtattcccgattcagagctacagcggtaattccgagctgcaatacgtcagctaccgccttggcgaaccggtgtttgacgtccaggaatgtcaaatccgtggcgtgacctattccgcaccgctgcgcgttaaactgcgtctggtgatctatgagcgcgaagcgccggaaggcaccgtaaaagacattaaagaacaagaagtctacatgggcgaaattccgctcatgacagacaacggtacctttgttatcaacggtactgagcgtgttatcgtttcccagctgcaccgtagtccgggcgtcttctttgactccgacaaaggtaaaacccactcttcgggtaaagtgctgtataacgcgcgtatcatcccttaccgtggttcctggctggacttcgaattcgatccgaaggacaacctgttcgtacgtatcgaccgtcgccgtaaactgcctgcgaccatcattctgcgcgccctgaactacaccacagagcagatcctcgacctgttctttgaaaaagttatctttgaaatccgtgataacaagctgcagatggaactggtgccggaacgcctgcgtggtgaaaccgcatcttttgacatcgaagctaacggtaaagtgtacgtagaaaaaggccgccgtatcactgcgcgccacattcgccagctggaaaaagacgacgtcaaactgatcgaagtcccggttgagtacatcgcaggtaaagtggttgctaaagactatattgatgagtctaccggcgagctgatctgcgcagcgaacatggagctgagcctggatctgctggctaagctgagccagtctggtcacaagcgtatcgaaacgctgttcaccaacgatctggatcacggcccatatatctctgaaaccttacgtgtcgacccaactaacgaccgtctgagcgcactggtagaaatctaccgcatgatgcgccctggcgagccgccgactcgtgaagcagctgaaagcctgttcgagaacctgttcttctccgaagaccgttatgacttgtctgcggttggtcgtatgaagttcaaccgttctctgctgcgcgaagaaatcgaaggttccggtatcctgagcaaagacgacatcattgatgttatgaaaaagctcatcgatatccgtaacggtaaaggcgaagtcgatgatatcgaccacctcggcaaccgtcgtatccgttccgttggcgaaatggcggaaaaccagttccgcgttggcctggtacgtgtagagcgtgcggtgaaagagcgtctgtctctgggcgatctggataccctgatgccacaggatatgatcaacgccaagccgatttccgcagcagtgaaagagttcttcggttccagccagctgtctcagtttatggaccagaacaacccgctgtctgagattacgcacaaacgtcgtatctccgcactcggcccaggcggtctgacccgtgaacgtgcaggcttcgaagttcgagacgtacacccgactcactacggtcgcgtatgtccaatcgaaacccctgaaggtccgaacatcggtctgatcaactctctgtccgtgtacgcacagactaacgaatacggcttccttgagactccgtatcgtaaagtgaccgacggtgttgtaactgacgaaattcactacctgtctgctatcgaagaaggcaactacgttatcgcccaggcgaactccaacttggatgaagaaggccacttcgtagaagacctggtaacttgccgtagcaaaggcgaatccagcttgttcagccgcgaccaggttgactacatggacgtatccacccagcaggtggtatccgtcggtgcgtccctgatcccgttcctggaacacgatgacgccaaccgtgcattgatgggtgcgaacatgcaacgtcaggccgttccgactctgcgcgctgataagccgctggttggtactggtatggaacgtgctgttgccgttgactccggtgtaactgcggtagctaaacgtggtggtgtcgttcagtacgtggatgcttcccgtatcgttatcaaagttaacgaagacgagatgtatccgggtgaagcaggtatcgacatctacaacctgaccaaatacacccgttctaaccagaacacctgtatcaaccagatgccgtgtgtgtctctgggtgaaccggttgaacgtggcgacgtgctggcagacggtccgtccaccgacctcggtgaactggcgcttggtcagaacatgcgcgtagcgttcatgccgtggaatggttacaacttcgaagactccatcctcgtatccgagcgtgttgttcaggaagaccgtttcaccaccatccacattcaggaactggcgtgtgtgtcccgtgacaccaagctgggtccggaagagatcaccgctgacatcccgaacgtgggtgaagctgcgctctccaaactggatgaatccggtatcgtttacattggtgcggaagtgaccggtggcgacattctggttggtaaggtaacgccgaaaggtgaaactcagctgaccccagaagaaaaactgctgcgtgcgatcttcggtgagaaagcctctgacgttaaagactcttctctgcgcgtaccaaacggtgtatccggtacggttatcgacgttcaggtctttactcgcgatggcgtagaaaaagacaaacgtgcgctggaaatcgaagaaatgcagctcaaacaggcgaagaaagacctgtctgaagaactgcagatcctcgaagcgggtctgttcagccgtatccgtgctgtgctggtagccggtggcgttgaagctgagaagctcgacaaactgccgcgcgatcgctggctggagctgggcctgacagacgaagagaaacaaaatcagctggaacagctggctgagcagtatgacgaactgaaacacgagttcgagaagaaactcgaagcgaaacgccgcaaaatcacccagggcgacgatctggcaccgggcgtgctgaagattgttaaggtatatctggcggttaaacgccgtatccagcctggtgacaagatggcaggtcgtcacggtaacaagggtgtaatttctaagatcaacccgatcgaagatatgccttacgatgaaaacggtacgccggtagacatcgtactgaacccgctgggcgtaccgtctcgtatgaacatcggtcagatcctcgaaacccacctgggtatggctgcgaaaggtatcggcgacaagatcaacgccatgctgaaacagcagcaagaagtcgcgaaactgcgcgaattcatccagcgtgcgtacgatctgggcgctgacgttcgtcagaaagttgacctgagtaccttcagcgatgaagaagttatgcgtctggctgaaaacctgcgcaaaggtatgccaatcgcaacgccggtgttcgacggtgcgaaagaagcagaaattaaagagctgctgaaacttggcgacctgccgacttccggtcagatccgcctgtacgatggtcgcactggtgaacagttcgagcgtccggtaaccgttggttacatgtacatgctgaaactgaaccacctggtcgacgacaagatgcacgcgcgttccaccggttcttacagcctggttactcagcagccgctgggtggtaaggcacagttcggtggtcagcgtttcggggagatggaagtgtgggcgctggaagcatacggcgcagcatacaccctgcaggaaatgctcaccgttaagtctgatgacgtgaacggtcgtaccaagatgtataaaaacatcgtggacggcaaccatcagatggagccgggcatgccagaatccttcaacgtattgttgaaagagattcgttcgctgggtatcaacatcgaactggaagacgagtaa

SEQ ID NO: 169 - DNA, 273 bp, Escherichia coli
atgaacaagactcaactgattgatgtaattgcagagaaagcagaactgtccaaaacccaggctaaagctgctctggagtccactctggctgcaattactgagtctctgaaagaaggcgatgctgtacaactggttggtttcggtaccttcaaagtgaaccaccgcgctgagcgtactggccgcaacccgcagaccggtaaagaaatcaaaattgccgcagctaacgtaccggcatttgtttctggcaaggcactgaaagacgcagttaagtaa

SEQ ID NO: 170 - DNA, 1602 bp, Escherichia coli
atgactgaacaggcaacaacaaccgatgaactggctttcacaaggccgtatggcgagcaggagaagcaaattcttactgccgaagcggtagaatttctgactgagctggtgacgcattttacgccacaacgcaataaacttctggcagcgcgcattcagcagcagcaagatattgataacggaacgttgcctgattttatttcggaaacagcttccattcgcgatgctgattggaaaattcgcgggattcctgcggacttagaagaccgccgcgtagagataactggcccggtagagcgcaagatggtgatcaacgcgctcaacgccaatgtgaaagtctttatggccgatttcgaagattcactggcaccagactggaacaaagtgatcgacgggcaaattaacctgcgtgatgcggttaacggcaccatcagttacaccaatgaagcaggcaaaatttaccagctcaagcccaatccagcggttttgatttgtcgggtacgcggtctgcacttgccggaaaaacatgtcacctggcgtggtgaggcaatccccggcagcctgtttgattttgcgctctatttcttccacaactatcaggcactgttggcaaagggcagtggtccctatttctatctgccgaaaacccagtcctggcaggaagcggcctggtggagcgaagtcttcagctatgcagaagatcgctttaatctgccgcgcggcaccatcaaggcgacgttgctgattgaaacgctgcccgccgtgttccagatggatgaaatccttcacgcgctgcgtgaccatattgttggtctgaactgcggtcgttgggattacatcttcagctatatcaaaacgttgaaaaactatcccgatcgcgtcctgccagacagacaggcagtgacgatggataaaccattcctgaatgcttactcacgcctgttgattaaaacctgccataaacgcggtgcttttgcgatgggcggcatggcggcgtttattccgagcaaagatgaagagcacaataaccaggtgctcaacaaagtaaaagcggataaatcgctggaagccaataacggtcacgatggcacatggatcgctcacccaggccttgcggacacggcaatggcggtattcaacgacattctcggctcccgtaaaaatcagcttgaagtgatgcgcgaacaagacgcgccgattactgccgatcagctgctggcaccttgtgatggtgaacgcaccgaagaaggtatgcgcgccaacattcgcgtggctgtgcagtacatcgaagcgtggatctctggcaacggctgtgtgccgatttatggcctgatggaagatgcggcgacggctgaaatttcccgtacctcgatctggcagtggatccatcatcaaaaaacgttgagcaatggcaaaccggtgaccaaagccttgttccgccagatgctgggcgaagagatgaaagtcattgccagcgaactgggcgaagaacgtttctcccaggggcgttttgacgatgccgcacgcttgatggaacagatcaccacttccgatgagttaattgatttcctgaccctgccaggctaccgcctgttagcgtaa

SEQ ID NO: 171 - DNA, 1305 bp, Escherichia coli
atgaaaacccgtacacaacaaattgaagaattacagaaagagtggactcaaccgcgttgggaaggcattactcgcccatacagtgcggaagatgtggtgaaattacgcggttcagtcaatcctgaatgcacgctggcgcaactgggcgcagcgaaaatgtggcgtctgctgcacggtgagtcgaaaaaaggctacatcaacagcctcggcgcactgactggcggtcaggcgctgcaacaggcgaaagcgggtattgaagcagtctatctgtcgggatggcaggtagcggcggacgctaacctggcggccagcatgtatccggatcagtcgctctatccggcaaactcggtgccagctgtggtggagcggatcaacaacaccttccgtcgtgccgatcagatccaatggtccgcgggcattgagccgggcgatccgcgctatgtcgattacttcctgccgatcgttgccgatgcggaagccggttttggcggtgtcctgaatgcctttgaactgatgaaagcgatgattgaagccggtgcagcggcagttcacttcgaagatcagctggcgtcagtgaagaaatgcggtcacatgggcggcaaagttttagtgccaactcaggaagctattcagaaactggtcgcggcgcgtctggcagctgacgtgacgggcgttccaaccctgctggttgcccgtaccgatgctgatgcggcggatctgatcacctccgattgcgacccgtatgacagcgaatttattaccggcgagcgtaccagtgaaggcttcttccgtactcatgcgggcattgagcaagcgatcagccgtggcctggcgtatgcgccatatgctgacctggtctggtgtgaaacctccacgccggatctggaactggcgcgtcgctttgcacaagctatccacgcgaaatatccgggcaaactgctggcttataactgctcgccgtcgttcaactggcagaaaaacctcgacgacaaaactattgccagcttccagcagcagctgtcggatatgggctacaagttccagttcatcaccctggcaggtatccacagcatgtggttcaacatgtttgacctggcaaacgcctatgcccagggcgagggtatgaagcactacgttgagaaagtgcagcagccggaatttgccgccgcgaaagatggctataccttcgtatctcaccagcaggaagtgggtacaggttacttcgataaagtgacgactattattcagggcggcacgtcttcagtcaccgcgctgaccggctccactgaagaatcgcagttctaa

SEQ ID NO: 172 - DNA, 294 bp, Escherichia coli
atgaatattcgtccattgcatgatcgcgtgatcgtcaagcgtaaagaagttgaaactaaatctgctggcggcatcgttctgaccggctctgcagcggctaaatccacccgcggcgaagtgctggctgtcggcaatggccgtatccttgaaaatggcgaagtgaagccgctggatgtgaaagttggcgacatcgttattttcaacgatggctacggtgtgaaatctgagaagatcgacaatgaagaagtgttgatcatgtccgaaagcgacattctggcaattgttgaagcgtaa

SEQ ID NO: 173 - DNA, 951 bp, Escherichia coli
atgagtgatatcagtaaggcgagcctgcctaaggcgatttttttgatggggccgacggcctccggtaaaacggcgttagccattgagctgcgtaaaattttaccagtagagttgataagcgttgattctgcccttatttacaaagggatggatatcgggacggcgaagccgaacgctgaagagttactcgccgcgccgcaccgattgctggatattcgcgatccgtcgcaggcttactcggctgctgattttcgccgcgatgcgctggcggaaatggccgatatcaccgcggcggggcggatcccactgttagtgggcggtacgatgttgtatttcaaggcattgctggaagggttgtcgccgctaccgtcggcagacccggaagtacgggccagaattgagcaacaggcggcagagcaaggttgggagtcattgcatcgtcaacttcaggaggtagatccggttgcggcagcaaggattcatccaaatgatccacaaaggctttcccgggcactggaagtttttttcatttcgggtaaaactttaacggaactgacgcaaacgtcaggagacgctctaccgtatcaggtgcatcagttcgccatcgccccggcgagccgtgaactgctccatcaacgcattgagcagcgttttcatcagatgttggcttcaggttttgaagcagaagtccgggcgctttttgcccgaggagatttgcatacggacttgccttccattcgttgcgtgggttatcgccagatgtggtcttaccttgaaggcgaaatctcatacgatgaaatggtttatcgaggtgtttgcgccacgagacagttggcgaagcggcagataacctggctgcgtggttgggaaggggttcactggcttgacagtgaaaaaccagaacaggcgcgtgacgaagtattacaggttgttggtgctatcgcaggctga

SEQ ID NO: 174 - DNA, 309 bp, Escherichia coli
atggctaaggggcaatctttacaagatccgttcctgaacgcactgcgtcgggaacgtgttccagtttctatttatttggtgaatggtattaagctgcaagggcaaatcgagtcttttgatcagttcgtgatcctgttgaaaaacacggtcagccagatggtttacaagcacgcgatttctactgttgtcccgtctcgcccggtttctcatcacagtaacaacgccggtggcggtaccagcagtaactaccatcatggtagcagcgcgcagaatacttccgcgcaacaggacagcgaagaaaccgaataa

SEQ ID NO: 175 - DNA, 396 bp, Escherichia coli
atgcgtcattacgaaatcgtttttatggtccatcctgaccagagcgaacaggttccgggcatgatcgagcgctacactgctgccatcactggtgcagaaggcaagatccaccgtctggaagactggggccgccgtcagctggcttacccgatcaacaaactgcacaaagcacactacgttctgatgaatgttgaagctccgcaggaagtgatcgatgagctggaaactaccttccgcttcaacgatgccgttatccgcagcatggttatgcgtaccaagcacgctgttaccgaagcatctccgatggttaaagcgaaagacgagcgccgtgagcgtcgcgatgatttcgcaaacgaaaccgctgatgatgctgaagctggggattctgaagagtaa

SEQ ID NO: 176 - DNA, 315 bp, Escherichia coli
atgaccaaccgtctggtgttgtccggcaccgtgtgcagggctccccttcgaaaggtcagtccatcaggaattcctcactgccagttcgtgcttgagcatcgttctgtgcaggaggaagccggctttcaccggcaggcgtggtgtcaaatgcccgttattgttagcggacacgaaaaccaggccattactcacagtataacggtcggcagtcgcataaccgttcaggggttcatttcatgccacaaggcaaagaacggactgagcaaaatggttttgcatgccgagcagattgaattgatagattctggagactag

SEQ ID NO: 177 - DNA, 228 bp, Escherichia coli
atggcacgttatttccgtcgtcgcaagttctgccgtttcaccgcggaaggcgttcaagagatcgactataaagatatcgctacgctgaaaaactacatcaccgaaagcggtaagattgtcccaagccgtatcaccggtacccgtgcaaaataccagcgtcagctggctcgcgctatcaaacgcgctcgctacctgtccctgctgccgtacactgatcgccatcagtaa

SEQ ID NO: 178 - DNA, 387 bp, Escherichia coli
atgagcaaaactatcgcgacggaaaatgcaccggcagctatcggtccttacgtacagggcgttgatctgggcaatatgatcatcacctccggtcagatcccggtaaatccgaaaacgggcgaagtaccggcagacgtcgctgcacaggcacgtcagtcgctggataacgtaaaagcgatcgtcgaagccgctggcctgaaagtgggcgacatcgttaaaactaccgtgtttgtaaaagatctgaacgacttcgcaaccgtaaacgccacttacgaagccttcttcaccgaacacaacgccaccttcccggcacgttcttgcgttgaagttgcccgtctgccgaaagacgtgaagattgagatcgaagcgatcgctgttcgtcgctaa

SEQ ID NO: 179 - DNA, 936 bp, Escherichia coli
atggctaatccgctatatcagaaacatatcatttccataaacgaccttagtcgcgatgaccttaatctggtgctggcgacagcggcgaaactgaaagcaaacccgcaaccagagctgttgaagcacaaagtcattgccagctgtttcttcgaagcctctacccgtacccgcctctctttcgaaacatctatgcaccgcctgggggccagcgtggtgggcttctccgacagcgccaatacatcactgggtaaaaagggcgaaacgctggccgataccatttcggttatcagcacttacgtcgatgcgatagtgatgcgtcatccgcaggaaggtgcggcgcgcctggccaccgagttttccggcaatgtaccggtactgaatgccggtgatggctccaaccaacatccgacgcaaaccttgctggacttattcactattcaggaaacccaggggcgtctggacaatctccacgtcgcaatggttggtgacctgaaatatggccgcaccgttcactccctgactcaggcgttagcgaagttcgacggcaaccgtttttacttcatcgcgccggacgcgctggcaatgccgcaatacattctggatatgctcgatgaaaaagggatcgcatggagtctgcacagctctattgaagaagtgatggcggaagtagacatcctgtacatgacccgcgtgcaaaaagagcgtctggacccgtccgagtacgccaacgtgaaagcgcagtttgttcttcgcgccagcgatctccacaacgccaaagccaatatgaaagtgctgcatccgctgccgcgtgttgatgagattgcgacggatgttgataaaacgccacacgcctggtacttccagcaggcaggcaacgggattttcgctcgccaggcgttactggcactggttctgaatcgcgatctggtactgtaa

SEQ ID NO: 180 - DNA, 417 bp, Escherichia coli
atggcaaacccggaacaactggaagaacagcgtgaagaaacacgtttgattattgaagaattactggaagatggcagcgatccggacgcgctgtacaccatcgaacaccatctttccgcagacgatctggaaaccctggaaaaagcagcagttgaagcgtttaaactcggttacgaagtgaccgatccagaagagctggaagttgaagatggtgatatcgtgatttgctgcgacatcctcagcgagtgcgcgttgaatgccgatctgatcgatgcccaggttgaacaactgatgacgctggcagagaaatttgacgttgagtacgacggatggggcacttactttgaagatcctaacggcgaagatggcgacgatgaagattttgtcgatgaagacgatgacggagttcgccactaa

SEQ ID NO: 181 - DNA, 597 bp, Escherichia coli
atgcatcccactcaacgtaagctgatgaagagaataattctgtttctgtcattactgttttgcatcgcctgtccagccattgctggacaggatattgaccttgttgccaatgtaaaaaacagcacctgcaaaagcggaatcagtaaccagggtaatattgatcttggcgtcgttggggtgggatatttttcaggtaatgttactcctgaaagttatcaaccaggtggaaaagagttcactatcactgtatccgactgtgcattacagggaactggcgatgtgctaaatcagttacatattgattttagagcccttagcggtgtcatggctgctggctctaggcaaatatttgctaatgaaatttcgtcaggagcaagtaatgtaggagtagttatattttctactcaggattcggcgaatacattcaatgttcttaatgcttcaggcggatctcgttccgtttatccagtaatgtcggatgacatgaatggttcatcctggaaatttagcacccgaatgcaaaaaatcgatcctgcattgagtgttacatctggtcaacttatgagccatgtgttagtggatatttactacgaataa

SEQ ID NO: 182 - DNA, 699 bp, Escherichia coli
atgagaggtaaaatactactttaccagttaaagtatcgctggcaatcactctctatttttggttgttttttatgcaaaatgacattattcaggtatcaaaaaataatttatgacaccggagtgcatcagatgcgttcatttttttacaccatatgcagtagcgaacagcaagaaagcattacagatcatcactcacttgctgagatatgccaaaaatttaatattctacctgaacatgttgtgatcgagcaggtagatattaaagaggttgtttcagagcaacgtttactcagacaattgattcatcatgaaatgaaccggcaggacacgcttgtcattccagatctaagctgtcttggcagaactgtggaggacttacagaatattttatttttttgccttcaaaaagaaatgtttatctacagctaccatccagcttcaaggatagagccttctgctgaaagttgcttgtcttttttgattgctcgtcaggatacgattgacattcacaatctgaaatcaactaaaagccgatatcgacatgttaagaaaaaattaggacgaaaggagggaagcaaataccgacgtgatatcacaatacttaagaaaggtggatttactcaggctgagattgcaaagaaattgagtatcagtttatcgactgtgaagcggcactggaataacggaatcatcggttaa

SEQ ID NO: 183 - DNA, 855 bp, Escherichia coli
atgtctaatagtgttactaattttgagatgagcagcgttctaccaggaaaaaaaccttgtcaaggcaaaaacaatgagtcacaggtagtacagactactcccataaaaaaacactcagtcacgttcaaaaatcaatcttcattaggagtaattgatcattatgccagactaacaaataaatctcactcttccgtaatagcggaagttgtggatttggctatccctatattagaaaaatgcaatcgtcataactggtcaataaatgaaataaaaaatgacctgttaaagttctctataaaagaaagcatcaatcgaagccgaggtaaaacagaagtaactctggaagagtactgttcgttaatctggaaaacgaacatcatgagtccattaaaaatccccattgcagattactttcaactgaacgctaatgatgaattcatggggaaagatgaaaaaacagttatacgtgaaaggctatcctcgctaagggaaaattacgatatggaaaaagccatttacatttacaatcaaagacattttgatgtaaagcatcaaagtgtctcaggatattcaaacattattcttattcatagaacaacctttgagggttattactttgatgccgggcaggctctactcttgtcaacatcccaattgattatattcgggataaatgaagttcttagaagaaaggggattgttatgccttatccggttgtttgttggattgatatttaccatgtcaatgaaatggtggttatgctgccagtgctccgcaaaacagatgtttccaaccgtgttaatgtaccggatgacatcattataaacccatactcacaagagagcagaacctaa

SEQ ID NO: 184 - DNA, 228 bp, Escherichia coli
atgcaggctgcgccgcaaagggaggagactgagtggcgtgttcagtctaaaagagggttgatgccagcatacaggggcgaagctggtcaacaagtcaacattaagataatggaatattcggagagaaacgtcaggcagttggcctcaaatgaacaggaagaatatatccccaggaaaattaatgttggtgttataaacacaccaacattaatccgatctgattattaa

SEQ ID NO: 185 - DNA, 237 bp, Escherichia coli
atgtttaaaaaatctgttttatttgcaacactattatctggcgttatggcattttccaccaatgcagatgataaaataattctgaaacatatcagcgtctcgtcagtatcagcatcaccgacagttctggaggataccattgctgatatagccagaaaatataatgcttcatcctggaaagtcacatcgatgcgaattgataataattcaaccgcaacagcagtattgtataaataa

SEQ ID NO: 186 - DNA, 816 bp, Escherichia coli
atgatatcattaaaagctccgcacaataatttgatgccatatacgcaacaaagcatacttaatacggttaaaaacaatcagttaccagaggatatcaaaagctccctggtttcctgtgtcgatatattcaaggttttgattaaacaatattatgattatccttatgattgtcgtgatgatttagtcgatgacgacaaactcattcatctcatggctgccgtacgagactgtgagtggtcagacgataacgcactcaccataaatgtgcagtttaatgatttccctggattttatgactggatggattaccctgatcacccggttaagtttgtttttcacatacttgaaaatcaaaaagggacagtttgggtatatgaccaggatgatgcgtttcttgatattaaagcaaacgtgcaggctggacgctttaccgggcttaagaaattagtgcagtttatcgattcagtgcgaacagattgcaaatgtattcttcttgaataccatatgcctttgctgagaattttccctaaagggaaagagtgtatgcatgtggaaaaatggcttcgcgaaatgtcgtctattccggagacagacgcgcccattaagcaggcgcttgcgcatggattattattacacttaaaaaatatctaccctgtttttcctgaatcactggtgatgttattgctctctgttctggacgtaaaaacatacagagatgatgcgcgattaaatgaatggatatctaatagagtgcaggaattaggtgacagatattatcctgtaaataagcacgttaaaatccgctacactctttag

SEQ ID NO: 187 - DNA, 624 bp, Escherichia coli
atgttatctgtagttaaacctcttcaggaatttggtaagctcgataaatgtttgtccagatacggtacgcgcttcgagtttaataatgaaaagcaagttatattttccagtgatgtcaataacgaagatactttcgttattttagagggagttatctctctgcgtagagaagaaaacgtacttatcggtattacccaggctccttatattatggggctggctgatggtttaatgaaaaacgatataccatacaaattaatatcagaaggaaattgtacgggatatcatctaccagccaaacaaaccattacgcttattgaacaaaatcaactctggcgagacgctttttactggttagcctggcaaaatagaattctggaattacgcgacgtgcagctcattgggcataattcctacgaacaaatccgcgcaacattattatcaatgattgactggaatgaagaattgcgatcacgtattggtgtgatgaattatatccatcaacgtacacgcatatcgcgttctgtcgtcgcagaagttctcgctgctttgcgtaaaggcggctatatcgaaatgaataaaggcaaactggtcgctatcaaccgtttgccttcagagtattaa

SEQ ID NO: 188 - DNA, 1050 bp, Escherichia coli
atgaaaatcagtcgggaaacactccaccagctaattgagaataaactctgccaggctgggttaaaacgtgagcacgctgcaaccgtggctgaagtattggtttacgccgatgccagagggatccactctcatggcgcggtgcgcgtggaatactacgcggaacgcatttcaaaaggcggcaccaaccgcgaaccggagtttcgtcttgaggaaaccgggccgtgctcggcaattttacatgccgacaatgccgccggacaggtcgcggcgaaaatgggtatggaacatgccatcaaaaccgcccagcaaaatggcgttgcggtggtcggtatcagccggatgggtcacagcggcgcaatctcttattttgtgcagcaggcagcccgcgccggattcattggcatttcgatgtgccagtccgatccaatggtggtgccgtttggcggcgcggaaatttactacggtactaaccccctggcctttgccgcgccgggagaaggcgacgagatccttacctttgatatggcgactaccgtacaggcatggggaaaagtgctcgacgcccgctcgcgtaatatgtctatcccggatacctgggcggtcgataaaaacggtgtaccaacaaccgatccgttcgcggtacatgctctgctccccgccgccgggccaaaagggtatggcctgatgatgatgattgacgtcctctcaggcgtcttactcggcttaccgttcgggcgacaggttagttcgatgtatgacgatttacacgcagggcgtaatttggggcaattacatatagttattaatccgaactttttctcctccagcgaattattccgtcaacatcttagccagaccatgcgcgaattaaatgccattacccccgcgcccggttttaatcaggtttattatcccggacaggatcaggatattaaacaacgcaaagccgccgtcgaaggcatcgaaattgttgatgatatttaccagtatttaatttccgacgcgctttataacacgtcatacgaaacgaaaaatccctttgcgcaataa

SEQ ID NO: 189 - DNA, 693 bp, Escherichia coli
atgatgactaaaataaagttattgatgctcattatattttatttaatcatttcggccagcgcccatgctgccggagggatcgcattaggtgccacgcgtattatttatcccgctgatgctaaacagactgcggtatggattagaaatagccataccaatgagcgctttctggtcaattcgtggattgaaaacagcagcggtgtaaaagaaaagtcattcatcattacaccgccactgtttgttagtgaacccaaaagcgaaaatactttgcgtattatttacaccggtccaccgctggcagcagatcgtgagtctctgttctggatgaatgttaagacgatcccttcggtagataaaaatgcattgaacggcaggaatgttttgcaactggcgattttatcgcgcatgaaattatttctccgtccaattcaattacaagaattacccgcagaagcgccggacacactcaagttttcgcgatccggtaactatatcaatgttcataatccatcacctttttatgtcaccctggttaacttacaagtgggcagccaaaagttggggaatgctatggctgcacccagagttaattcacaaattcccttaccctcaggagtgcagggaaagctgaaatttcagaccgttaatgattatggttcagtaactccggtcagagaagtgaacttaaactaa

SEQ ID NO: 190 - DNA, 633 bp, Escherichia coli
atgaaaccaacgtcggtgatcattatggatactcatcctatcatcagaatgtctattgaagttctgttgcaaaaaaacagtgaattgcagattgtcctgaaaacggatgattatcgcataaccatcgattatctccgaacccgtcctgttgatttaatcattatggatatagacttgcccggaacagacggttttaccttcctgaaaaggatcaaacaaatccagagcacagtgaaagtgttatttttatcatcgaaatcagaatgcttttatgctggcagagcgatacaagctggtgctaacggttttgtcagtaaatgcaatgatcagaatgatatttttcatgccgttcagatgatcctctccggatacacgttttttcccagcgaaacgcttaactatataaaaagcaataaatgtagtacgaatagttcaacggtcactgtgctatctaatcgtgaagtgaccatattacgttatctggttagcggattatctaataaagaaattgccgataagttattacttagcaataaaacagttagtgcgcataaatctaatatttatggcaagctaggtttgcattcaattgtagagcttatcgactacgccaaattatacgaattaatataa

SEQ ID NO: 191 - DNA, 1527 bp, Escherichia coli
atgaaaaaagccatagcatatatgcgattttcatcaccaggtcagatgtctggcgactcattaaaccgacagagaagacttattgctgaatggttaaaggtaaatagtgattattatcttgataccataacatatgaagatttaggattaagtgcattcaaaggaaagcatgcacaatcaggagctttttcggaatttttagatgctatagagcatggttatatattgccaggaactacattgttagttgaaagtctggacagactttcaagagaaaaagtcggtgaagcgattgaacgtctgaaattgattttgaatcacggtattgatgttataactctttgcgacaatacagtctataatattgactctttgaatgagccatattcattaataaaagccatacttatagcacaaagggcaaatgaagaaagcgagataaagtcaagtcgggttaaattatcatggaagaaaaaacggcaggatgcactggaatcaggtacgattatgacggcgtcttgtccgagatggctctccttagatgacaaaagaacggcttttgttccagaccccgacagggtgaaaactattgagctaatttttaaactcaggatggaaaggcgctcattgaatgcaatagccaagtatttaaatgatcatgctgtaaagaatttctcaggaaaagaaagtgcatggggaccttctgtaattgaaaaattattagcgaataaagctctgataggtatttgcgtaccttcatatcgtgcaagagggaaagggataagtgaaatcgctggctattatcccagagtcatatcagatgatttgttttacgctgtacaggaaattcggttggcaccttttggtattagcaatagtagcaagaatcctatgctaataaatctacttcgaacagttatgaagtgtgaggcttgtggtaataccatgattgttcatgcggtatctggaagtttgcatggctattatgtttgtccgatgagaagattacatcgatgtgacaggccatcaataaaaagagatttggttgattataatatcattaatgaattgctttttaattgtagcaaaattcaaccagttgaaaacaagaaagatgctaatgaaactttagagttaaaaattattgagcttcagatgaaaattaataatttaatcgttgcattgtctgtcgcgcctgaagttaccgctatagcagagaaaataagactattagataaggaattacgaagggcttcggtatcattgaaaactttgaagagtaaaggtgtaaattcattcagtgatttttatgctattgacttaaccagtaaaaatggacgagagttatgccgtacacttgcctataaaacattcgaaaaaatcataattaatacggataataaaacctgtgatatctattttatgaatggcattgtttttaaacactatcctttaatgaaagtaatatccgcccagcaggcgataagtgctctcaaatatatggttgatggtgagatttatttctaa

SEQ ID NO: 192 - DNA, 216 bp, Escherichia coli
atgaaatccatggataagttaacaacgggtgtcgcctatggcacctcagcaggtagtgccgggtactggtttttacagctgctagataaagtcactccctcacagtgggcagcaataggtgtgctgggtagcctggtatttggcctgctgacgtacctgacaaacctttatttcaagattaaagaagataagcgcaaggctgcgagaggtgaataa

SEQ ID NO: 193 - DNA, 411 bp, Escherichia coli
atggctcaggttgccatttttaaagaaatattcgatcaagtgcgaaaagatttaaactgtgaattgttttattctgaactaaaacgtcacaatgtctcacattatatttactatctagccacagataatattcacattgtgttagaaaacgataacaccgtgttaataaaaggacttaaaaaggttgtaaatgttaaattctcaagaaatacgcatcttatagaaacgtcctatgataggttgaaatcaagagaaatcacatttcagcaatacagggaaaatcttgctaaagcaggagttttccgatggattacaaatatccacgaacataaaagatattactatacctttgataattcattactatttactgagagcattcagaacactacacaaatctttccacgctaa

SEQ ID NO: 194 - DNA, 750 bp, Escherichia coli
atggattatgtttgctccgtagttttcatctgtcaatcatttgatttaattataaacaggagagttatctcgttcaaaaaaaattcattgtttattgtaagcgacaaaattagaagggagttaccagtatgcccctctaaactaagaattgttgatatagataagaaaacatgtttatccttttttatcgacgtgaataatgagctgcctggcaaatttactcttgataagaatggctatattgctgaagaggaacctccattatcgcttgttttttctctgtttgaagggattaaaatagcagactcacactccctttggttaaaagaaagactatgtatatccttacttgccatgttcaaaaaacgcgaaagtgtaaattcatttatactaacaaatataaatacatttacctgtaaaattactggaataatcagttttaatattgagcggcaatggcatttaaaagatattgcggaattgatttatacgagtgaaagtttaataaaaaaaagattaagggatgaaggaacgtcatttactgaaatattgagagatactaggatgaggtatgcaaaaaaactcataacttcaaactcttattctatcaatgtcgtagcccagaaatgtggctataacagtacttcatatttcatatgtgcatttaaagattattatggtgtcacgccatctcattattttgagaaaataatcggcgtcacagatggaataaacaaaacaattgactga

SEQ ID NO: 195 - DNA, 762 bp, Escherichia coli
atgcaattgagcagcagtgaaccttgcgtggtgatcctgaccgaaaaagaggtagaggtaagcgtcaataaccatgctacgtttacccttccgaaaaactacctggccgccttcgcgtgcaacaataacgtcattgaactctcaacgttaaatcacgtattaatcacccacatcaaccgtaacatcatcaacgattatctgttgtttttaaataagaacttaacctgtgtaaagccctggtcgcggctggcaaccccggttatcgcttgtcatagccgtacaccggaagtgttccggctagccgccaaccacagcaagcagcaacccagcagaccctgcgaagcggagttgacgcgcgcattgctttttaccgtattgtctaactttcttgagcaatcgcggtttattgccctactgatgtatatcttacgcagcagcgtccgcgacagcgtctgccgcattattcaaagcgatattcagcattactggaatctgcgaattgtcgccagttcgctatgtttaagccccagcctgctcaaaaagaaattaaaaaacgaaaataccagctatagccagattgtcacagagtgtcgtatgcgttacgccgtacagatgttattgatggataacaaaaatatcactcaggtggcgcaattatgtggctatagcagcacgtcgtactttatctctgtttttaaggcgttttacggcctgacaccgttgaattatctcgccaaacagcgacaaaaagtgatgtggtga

SEQ ID NO: 196 - DNA, 903 bp, Escherichia coli
atggccaatctctacgacttgaaaaagttcgacttaaatcttcttgtcatatttgagtgtatttaccagcatttaagcattagcaaagctgctgaatcactatatatcaccccatcagccgtgagccagtcgttacaacgcttacgtgcgcaatttaatgaccctttattcattcgctcaggaaaaggtatcgcgccgacgacaacagggttaaatctgcatcaccatcttgagaaaaatctcagaggccttgaacaaacaattaatatagtcaataagtccgaactaaagaaaaactttattatctacggccctcagctcatttcttgctctaataatagtatgctgatccgctgcctacggcaagattcctctgtcgagattgagtgccatgatatcctcatgtcagcagagaatgctgaagaactgttggttcaccgcaaagccgatctggtgatcacccaaatgccagtgatcagccgttccgtcatttgcatgccattgcatacgattcgcaatactctaatttgtagtaataggcatccacgaattactgacaatagcacttatgaacaaattatggcagaagagttcacccaattaatatctaaatcagcaggggttgatgatattcaaatggaaatagacgagagatttatgaatcgcaaaatctcatttcgtggttcctctttgctgacaatcattaatagcattgcagttacagatttactgggaatagtcccctatgaactttataattcctaccgtgactttcttaacttaaaagagataaaactagaacatccgttaccttcaataaagctttacatttcctataataaatcttctttaaataatttggtgttctcccgatttattgaccgtctaaatgagagtttttga

SEQ ID NO: 197 - DNA, 708 bp, Escherichia coli
atggacatggagtcgcaaaaaatattgtttgcactttccactccgatggaaatacgcaatgaatgctgtttaccttcgcattcatcacccaaaatgtatttaggtacatgcttttttgacctttcttcctcatggggaattgatgaccgtgatgacctgctgcgcacaattcaccgaatgatcgataacggtcatgccgctcggttggcagggttttatcaccgctggtttcgttattcgccatgtgaatggcgtgactatcttgctgaactaaatgagcaaggtcaggcttatgcgcaatttgtcgccagcaccgccgaatgctgtggcgaagggggaatcaaagcctgggattatgtccggatgggttttttaagccgaatgggcgtacttaataactggttgagcgaagaagaaagtctatggatccagtcgcgcattcatctacgggctctacgttattatagtaactggcggcaatactttgccggttatacctttggtcggcaatattggcagtctcccgaagatgatcatctgcctttattacgcgaattcttagcgcgtaaagaatacgacgattccggcaatgatatgttttatcaattatttgccagtgatgatgcgtattaccctaccttgtcctggcaaccattggcttactattctgcatgcccggaaacgcttaaggatatgagcgacctatga

SEQ ID NO: 198 - DNA, 555 bp, Escherichia coli
atgaataaaaaattaatgtatatattcgcaatttttatagttgcagcaattacctgtattagccaacccaagaaaacgacgttgcgtgataaagccatggtgaattatgcctttgattatttaagctcaccgggcagtcttccattcaccacggcagccacggagctttccgcgattcatggtcactcaacgtcgcaatatcgccttggagaattttatcttcatggtagcgacggtaaaccactggattatacacaggcgagatactggtatgagcaatcagcggaacaggaaaatccacgcgcgcaaagtaaactggggtggatctacctcaaaggtctgggggtcaaacccgacacccgtaaagcaattctctggtataaggaagcagctgaacaagggtatgctcatgctcaatatactttaggtttgatctacagaaatggctcaggtattaatgttaaccattatgaatctcaaaaatggttaaaactgaccgccaaacaacattacaaaaatgcggaaagattacttgccgggcttcccgcacattaa

SEQ ID NO: 199 - DNA, 327 bp, Escherichia coli
atgaaatatattatttttttattcagagctatatggctggctttatcgcttttaatactattcttttccatgcatagactttcactattagactccactcgtgatgtgagcgagttaattagtctcatgtcttatggaatgatggtaatatgttttccaacaggcatagtattctttattgctctaatatttatagggactgtatcagacattattggcgtaaggattgatagtaagtatattatggcgataataatatggctttattttctgtcaggagggtatattcaatggtttgtattaagtaagcgcattataaacaaataa

SEQ ID NO: 200 - DNA, 1062 bp, Escherichia coli
atgagtgctggcaagggattgttgctcgtcatctgcctgttatttctgccgttgaagtctgcaatggcgctgaactgctattttggtacatctggtggcgcagtagaaaaatcagaagcgattcaaccgtttgctgtaccaggcaatgccaaacccggtgataagatctgggaatctgacgatattaaaattcccgtctattgtgacaacaataccaacggcaactttgaaagcgagcatgtctacgcctgggtaaacccctatccgggggtgcaggatcgttattatcaactcggcgtgacatacaacggtgtcgattacgatgccagtctgggaaaaagtcgcatcgacactaaccagtgtatcgacagtaagaacattgatatttatacccctgagcagatcatcgcgatgggatggcagaacaaaatttgctcgggcgatcccgctaatattcatatgtcgcgtacctttctcgctcgcatgcggttatacgtcaaaatacgagaaatgccgccgcatgattatcaaagtacgcttagcgactatatcgtcgtgcaatttgacggtgccggtagcgttaacgaagaccctactgcccaaaacctgaaatatcatattactggtctggaaaacattcgcgtgctggattgcagcgtcaatttttccatttcaccggaaacacaggtgattgattttggtaaatttaatttgctggatatacgtcgccacacaatgtcgaaaacgttcagtattaaaacgaccaagagccaaaacgatcaatgcaccgacggatttaaagtcagttcctccttttataccgaagaaacgttggttgaagaagataaagcattgttgattggtaatggtctgaagctacgtttactggatgaaaacgcctcgccttataccttcaataaatatgctgaatacgccgatttcaccagtgacatgttggtctacgaaaaaacctatacggctgaactttcgtccattccaggcacccccatcgaggctggccccttcgatacagtggtgctttttaagattaactataactga

SEQ ID NO: 201 - DNA, 1053 bp, Escherichia coli
atgaaaaaaataccctgcgtgatgatgcgaggtggaacctcgaggggcgcgttcctgttagcggaacatttacccgaagatcaaacgcagcgcgataaaatattgatggcaattatgggttccggtaacgatctggaaattgacggtattggcggcggtaatccactgaccagtaaagtcgccattattagccgttccagcgatccgcgtgctgatgtcgattatctgtttgcgcaggtaatcgttcatgagcaacgtgtcgataccacgcctaactgcggcaatatgctgtctggtgttggggcattcgccattgaaaatggtttgattgcagcgacttcgccagttactcgcgtacgtatccgcaacgtcaatacgggtacgttcatcgaagctgatgtgcaaacgccaaatggtgttgtcgagtacgagggtagcgccagaattgacggcgtaccgggtactgccgcaccggttgcgctcactttcctgaatgccgctggaaccaaaaccggaaaagttttcccgactgataatcagattgattattttgacgatgtcccggtgacctgtatcgatatggcgatgccagtcgtcattattccggctgaatatctgggaaaaacaggttatgaattaccggcggaactggatgccgacaaagcattattagcccgcattgaatctatccgtctacaagcgggtaaagcaatgggcttaggtgatgtcagtaatatggttatccctaaacctgtgcttatttctccagcgcagaaaggcggggcaattaatgtgcgttattttatgccgcattcttgccatcgcgcgctggcgataaccggtgctattgctatttccagtagttgtgcattggaaggcaccgtcacccgacaaatcgtcccttctgtaggatacggcaatatcaatattgaacaccccagtggtgcgctcgacgttcatttaagtaatgaaggtcaggatgccacgacgttacgcgcatctgttattcggacgaccagaaaaatattttccggtgaagtttatcttccctga

SEQ ID NO: 202 - DNA, 1257 bp, Escherichia coli
atgggtagtaatatacatggaattagttgcactgcaaataattatttgaaacaggcctggaacgatataaaaaatgagtacgaaaaaaatcaaacatattcaatcacgctttttgaaaacacactggtgtgttttatgcggttatacaatgaactcagacgtaaagtaaatgaagaggatactccatgtctggaatgtgaatcactagaaaaagaatttgaggaaatgcagaatgataatgatctatcattatttatgagaatattgcgtactaatgatacacaaatttattcaggggtttcaggaggtattacatatactatacaatatgttcgagatattgatattgttagagtgtccttgccgggcagagcttcagagtctatcacagattttaaaggttattattggtataactttatggagtatattgaaaacattaatgcgtgtgatgatgttttttctgagtattgttttgatgatgaaaatataagtgtccagccagagcggataaatacgccgggaatatctgatttggattctgacattgatttgtctggtatatcttttattcagcgtgaaactaaccaggcattaggattaaaatatgctcctgtagatggcgatggatattgtctgttaagagctatactggttttaaaacaacatgattattcatgggcgctggtcagttataagatgcaaaaggaagtttacaacgaattcattaaaatggttgataaaaaaacgatcgaggctcttgttgatacggcattctataatctcagggaagatgtaaagacgttatttggcgttgatctacaatctgacaaccaaattcaggggcagagtagtcttatgtcatggagctttctgttttttaaaaaacaattcattgatagttgcttgaataacgaaaaatgtatcctgcatttacccgagtttatatttaatgataacaagaacttgcttgctttagataccgacacgtcggataggattaaagcggtgaagaattttcttgttgttctttcagatagcatttgctcattatttattgttaatagtaatgtggcatcaatctccttggggaatgaatccttttcaacagatgaagatcttgagtatggttatttaatgaacactggcaatcattatgacgtttacctccctcctgaactttttgctcaggcttacaagttaaacaataaggaaatgaatgcgcaactcgactatttaaatcgttatgcaatttaa

SEQ ID NO: 203 - DNA, 495 bp, Escherichia coli
atgaacattgtcgatcaacaaacttttcgcgatgcgatgtcctgcatgggcgcggcggtcaatattatcaccacggacggtccagccgggcgcgccgggttcaccgccagcgccgtctgcagtgtgaccgatacgccgcccacattactggtgtgcctgaatcgtggggcgtccgtctggccggcattcaatgaaaatcgaacgctgtgtgtaaatacacttagcgccgggcaggagccgctttcaaacctttttggcggcaaaacgcccatggaacaccgctttgccgccgcccgctggcagacgggggtgaccggatgcccgcaactggaagaggctctggtttcgtttgactgccgtatcagccaggtggtgagcgtcggcacccacgacattctgttttgcgccatcgaagcgattcatcgtcacaccacaccctacgggctggtgtggttcgatcgcagttatcacgcgctgatgcgccctgcttgttaa

SEQ ID NO: 204 - DNA, 2019 bp, Escherichia coli
atgttacgtaatggaaataaatatctcctgatgctggtgagtataattatgctcaccgcgtgcattagccagtcaagaacatcatttataccgccacaggatcgcgaatctttactcgccgagcaaccgtggccgcataatggttttgtagcgatttcatggcataacgttgaagacgaagctgccgaccagcgttttatgtcagtgcggacatcagcactgcgtgaacaatttgcctggctgcgcgagaacggttatcaaccggtcagtattgctcaaattcgtgaagcacatcgaggaggaaaaccgctaccggaaaaagctgtagtgctgacttttgatgacggctaccagagtttttatacccgcgtcttcccaattcttcaggccttccagtggcctgctgtatgggcccccgtcggcagttgggtcgatacgccagcggataaacaagtaaaatttggcgatgagttggtcgatcgagaatattttgccacgtggcaacaagtgcgagaagttgcgcgttcccggctcgttgagctcgcttctcatacatggaattctcactacggtattcaggctaatgccaccggcagcttattgcctgtatatgtaaatcgtgcatattttactgaccacgcacggtatgaaaccgcagcagaataccgggaaagaattcgtctggatgctgtaaaaatgacggaatacctgcgtacaaaggttgaggtaaatccacacgtttttgtttggccttatggcgaagcgaatggcatagcgatagaggaattaaaaaaactcggttatgacatgttcttcacccttgaatcaggtttggcaaatgcgtcgcaattggattccattccgcgggtattaatcgccaataatccctcattaaaagagtttgcccagcaaattattaccgtacaggaaaaatcaccacaacggataatgcatatcgatcttgattacgtttatgacgaaaacctccagcaaatggatcgcaatattgatgtgctaattcagcgggtgaaagatatgcaaatatcaaccgtgtatttgcaggcatttgctgatcccgatggtgatgggctggtcaaagaggtctggtttccaaatcgtttgctaccaatgaaagcagatatttttagtcgggttgcctggcaattacgtacccgctcaggtgtaaacatctatgcgtggatgccggtattaagctgggatttagatcccacattaacgcgagtaaaatacttaccaacaggggagaaaaaagcacaaattcatcctgaacaatatcaccgtctctctcctttcgatgacagagtcagagcacaagttggcatgttatatgaagatcttgccggacatgctgcttttgatggcatattgttccacgatgatgctttgctttcagattatgaagatgccagtgcaccggctatcacggcttatcagcaagcaggctttagcgggagtctgagcgaaattcgacaaaacccggagcaatttaaacagtgggcccgctttaaaagtcgtgcgttaactgacttcactttagaacttagtgcgcgcgtaaaagccattcgcggtccacatattaaaactgcacgaaatatttttgcacttccggtaatacaacctgaaagtgaagcctggtttgcacagaattatgctgatttcctaaaaagctatgactggaccgctattatggctatgccttatctggaaggtgtcgcagaaaaatcggctgaccaatggttaatacaattgaccaatcaaattaaaaacatccctcaggctaaagacaaatctattttagaattacaggcacaaaactggcagaaaaatggtcagcatcaggctatttcttcgcaacaactcgctcactggatgagcctattacaactgaatggagtgaaaaactatggttattatcccgacaattttctgcataaccaacctgaaatagaccttattcgtcctgagttttcaacagcctggtatccgaaaaatgattaa

SEQ ID NO: 205 - DNA, 2424 bp, Escherichia coli
atgtattcaagtagcagaaaaaggtgcccgaaaaccaaatgggctttgaaacttcttactgccgcatttttagcagcgagtcccgcggcgaagagtgctgttaataacgcctatgatgcattgattattgaagctcgcaagggtaatactcagccagctttgtcatggtttgcactaaaatcagcactcagcaataaccaaattgctgactggttacagattgccttatgggccgggcaagataaacaggttattaccgtttacaaccgctaccgtcatcagcaattaccagcgcgtggttatgcagctgtcgccgtcgcttatcgtaacctgcaacaatggcaaaactcgcttacactgtggcaaaaggcgctctctctggagccgcaaaataaggattatcaacggggacaaattttaaccctggcagatgctggtcactatgatactgcgctggttaaacttaagcagcttaactctggagcaccggacaaagccaatttactcgcagaagcctatatctataaactggcggggcgtcatcaggatgaattacgggcgatgacagagtcattacctgaaaatgcatctacgcaacaatatcccacagaatacgtgcaggcattacgtaataatcaacttgctgccgcgattgacgatgccaatttaacgccagatattcgcgctgatattcatgccgaactggtcagactgtcgtttatgcctacgcgcagtgaaagtgaacgttatgccattgccgatcgcgccctcgcccaatacgctgcattagaaattctgtggcacgataacccagaccgcactgcccagtaccagcgtattcaggttgatcatcttggcgcgttattaactcgcgatcgttataaagacgttatttctcactatcagcgattaaaaaagacggggcaaattattccgccctgggggcaatattgggttgcatcggcttatctcaaagatcatcagccgaaaaaagcacagtcaataatgaccgagctcttttatcacaaggagaccattgccccggatttatccgatgaagaacttgcggatctcttttacagccacctggagagtgaaaattatccgggcgcgctaactgtcacccaacataccattaatacttcgccgcctttccttcggttaatgggcacgcctacgagcatcccgaatgatacctggttacaggggcattcgtttctctcaaccgtagcaaaatatagtaatgatcttcctcaggctgaaatgacagccagagagcttgcttataacgcaccaggaaatcagggactgcgcattgattacgcgagtgtgttacaagcccgcggttggcctcgtgcagcagaaaatgaattaaaaaaagcagaagtgatcgagccacgtaatattaatctggaggttgaacaagcctggacagcattaacgttacaagaatggcagcaggcagctgtcttaacgcacgatgttgtcgaacgtgaaccgcaagatcccggcgttgtacgattaaaacgtgcggttgatgtacataatcttgcagagcttcgtatcgctggctcaacaggaattgatgccgaaggcccggatagtggtaaacatgatgtcgacttaaccaccatcgtttattcaccaccgctgaaggataactggcgcggttttgctggattcggttatgccgatggacaatttagcgaaggaaaagggattgttcgcgactggcttgcgggtgttgagtggcggtcacgtaatatctggctcgaggcagagtacgctgaacgcgttttcaatcatgagcataaacccggcgcgcgcctgtctggctggtatgattttaatgataactggcgtattggttcgcaactggaacgcctctctcaccgcgttccattacgggcaatgaaaaatggtgttacaggcaacagtgctcaggcttatgttcgctggtatcaaaatgagcggcgtaagtacggtgtctcctgggctttcactgatttttccgacagtaaccagcgtcatgaagtctcacttgagggtcaggaacgcatctggtcttcaccatatttgattgtcgatttcctacccagtctgtattacgaacaaaatacagaacacgataccccatactacaaccctataaaaacgttcgatattgttccggcatttgaggcaagccatttgttatggcgaagctatgaaaatagctgggagcaaatattcagcgcaggtgttggtgcctcctggcaaaaacattatggcacggatgtcgtcacccaactcggctacgggcaacgcattagttggaatgacgtgattgatgctggcgcaacgctacgctgggaaaaacgaccttatgacggtgacagagaacacaacttatacgttgaattcgatatgacattcagattttaa

SEQ ID NO: 206 - DNA, 333 bp, Escherichia coli
atgaatacgttattactccttgcggcactttccagtcagataacctttaatacgacccagcaaggggatgtgtataccattattcctgaagtcactcttactcaatcttgtctgtgcagagtacaaatattgtccctgcgcgaaggcagttcagggcaaagtcagacgaagcaagaaaagaccctttcattgcctgctaatcaacccattgctttgacgaagttgagtttaaatatttccccggacgatcgggtgaaaatagttgttactgtttctgatggacagtcacttcatttatcacaacaatggccgccctcttcagaaaagtcttaa

SEQ ID NO: 207 - DNA, 141 bp, Escherichia coli
atgaggccgtttttacaggagtatttaatgcgtcggctgttgcactatctcatcaataatattcgcgagcatctgatgctttatctttttctctggggattgttggcaattatggatctgatctatgtgttttatttttag

SEQ ID NO: 208 - DNA, 789 bp, Escherichia coli
atgaaaaaattcattatactgctcagtttactgatactcctgcctctgacagcagccagcaagccattaattccaataatgaagacactttttacggacgttaccggtactgtaccagatgctgaagagatcgcgcataaagccgagctttttcgccaacaaacgggaattgcaccgtttattgtggttttacccgacattaataatgaagccagtctcagacaaaatggtaaagcgatgctggcgcatgcgtcatcttcattgagtgatgtaaaaggaagtgttctgttactatttactacccgcgaaccacggttaattatgatcaccaacggccaggttgaaagtggtctggacgataaacatctcggccttctgatagaaaatcacacgctggcttatttaaatgcagatctctggtatcagggaatcaataatgcattggctgttctacaagcacagatattaaaacaatcgacgccgccactaacgtattatccgcatccaggacaacagcatgaaaatgctccccccggcagcaccaacacattaggttttatcgcctgggctgcgacgtttatcttattttccaggatcttttactacacgactcgttttatttatgcgttaaaatttgcagtggcgatgactattgccaatatgggttatcaggctttatgtttgtatatcgataatagctttgcgattaccagaatatcgccactctgggcagggctaattggtgtctgtacgtttattgccgcattgttattgacgagtaaacgataa

SEQ ID NO: 209 - DNA, 666 bp, Escherichia coli
atggtacttgctttgaactataatatgcacggagttaatattcgctcagagaatgcagcaaaacctcatacgatgccctctagatatctttgcgagtatattagaagcattgagaaaaatggccacgcccttgattttggctgcggaaaacttagatattctgatgaattaatcagtaaatttgatgaagttacttttctagactcgaaaaggcaacttgaaagagagcaaattattagaggaattaaaactaaaattattgactatgtcccacgatattataaaaatgcaaatacagttgctttcgaggatgtcgacaaaataattgggggttacgatttcatcctttgctctaatgttctctctgccgttccttgtcgggatacaatcgacaaaatagttcttagcatcaagagattactaaaatcaggaggtgagactcttattgtaaatcaatataaaagctcatacttcaaaaaatacgaaacaggaagaaaacatctttacggatacatttacaaaaattcaaaaagtgtttcttactatggattactcgatgaactcgcagtgcaagaaatatgttcttcacatggccttgaaatattaaagtcgtggagtaaagcaggaagttcatatgtcactgttgggagttgtaatgcaatataa

SEQ ID NO: 210 - DNA, 894 bp, Escherichia coli
atgcgctcaccaatttgtcatcttttctcagcaattaattcatcaccatttaagattgcaccagagaaggagcaagatcttaaaacgatagttgacgacaaaaaaattataatttcagttgtgagtgaacctggttttaatatccgagtcaggaagaatgagagtaataattcacatgaaatagttctaacagtagcttcacttgaatatatttgggcattttccaatttcttttgggtttttacgcaagagtactccaaatctcagaaaaataatgatgagcactttgatttaacaggaaaaaataggcttaaaaagtctgatgaacttcttaaatgggcaaggaaaaacttgcaaacaacaggttgcgaatcatggcctaaaaaatgtcccaagccagaagcatatttacaaggaagcgaagactcacaagttgctagcgagatatttctttgtgctattgcttggattcttcatcatgaaataagtcatgttgttttacagcatccattggtcactacagcattctccactcaagaggagcgtgaagcagattcacatgctacaaaatggatattaggcaacctgtatgaatccgctcctgaattaaagaaacgtgcacttggcattgctacggcagtgctttgtatacaaagcttagaagttgaaaattacttctgtttacaaaatacacacccagctgcatatgagcgtatatattcgaatatttcatgctaccctgtcggaaatgaagagttgattgaagctctatgtacagtgatgcttcaatatcttttccatggcaaaaatatcaatgtgaatctagatggggagtccttttcatcgattttaggtgatcttctctgtgatatttcacgtcttaccagtaactga

SEQ ID NO: 211 - DNA, 1128 bp, Escherichia coli
atggcagccagaccgcgtaagaataatgtttcagtccctaacttatatccgctttatagtaggaaggtaaataaagtctattggcggtataagcatccagtgacaggaaaattccatgctttgggaacaaacgaagctgaagctatcgctattgccactgaggccaacactcgcctggctgaacaaagaacccggcagattctggctatcagtgacaggatcgcaaccagcaaaggaaaggctatcacaacgtcaacctggttagatcgctatcaagcgatccaggatgacaggcttaaaagtggtgatataagactcaacacctataaacaaaaagctaaaccagtatccttgctcagagaacgagcaggaatgaagttgatctcagccgttgatgtcagagatatagcacaattgcttgatgagtatatcgccgctgggcggccaagaatggcacaagtagttcgctccgtcctgattgatgttttcaaagaggcgcagcactacggagaagtacctcctggctataacccagcattagccactaaacaaccaagaagaaaaattacccgacaacggctgagccttgaagaatggaaaaaaatcttcgatatcgcagacgctactcatcgttacatgggaaatgccatgctgttagcgctggttactggtcagcggttaggtgatatttcgcgtatgaaatttagcgatatttgggatgatcatcttcatgtcattcaggaaaagaccgggagcaaaatcgcaattcctctttctcttcgcctcaatgcgattaactggagtttacgcgatgtagtagcccgctgccgtgactatgcagtcagtgcatacttagtgcatttttttcgttcaacttcacaagcagagcgcggagcgcaggttaaagccaatacattgacgatgaattttagtaaagcgagagatttagcaagaattgactggggagagggttcacctgcgacattccatgagcaaaggtctttatctgaacgtctgtataaagaacaggggttagacacacaaaaactacttggtcataaaacacaacaacaaaccgatcgttatcatgatgatcgaggtaaaggatggagcaaagtagcgttgtga

SEQ ID NO: 212 - DNA, 834 bp, Escherichia coli
atgcatgtttttgataataatggaattgaactgaaagctgagtgttcgataggtgaagaggatggtgtttatggtctaatccttgagtcgtgggggccgggtgacagaaacaaagattacaatatcgctcttgattatatcattgaacggttggttgattctggtgtatcccaagtcgtagtatatctggcgtcatcatcagtcagaaaacatatgcattctttggatgaaagaaaaatccatcctggtgaatattttactttgattggtaatagcccccgcgatatacgcttgaagatgtgtggttatcaggcttattttagtcgtacggggagaaaggaaattccttccggcaatagaacgaaacgaatattgataaatgttccaggtatttatagtgacagtttttgggcgtctataatacgtggagaactatcagagctttcacagcctacagatgatgaatcgcttctgaatatgagggttagtaaattaattaagaaaacgttgagtcaacccgagggctccaggaaaccagttgaggtagaaagactacaaaaagtttatgtccgagacccgatggtaaaagcttggattttacagcaaagtaaaggtatatgtgaaaactgtggtaaaaatgctccgttttatttaaatgatggaaacccatatttggaagtacatcatgtaattcccctgtcttcaggtggtgctgatacaacagataactgtgttgccctttgtccgaattgccatagagaattgcactatagtaaaaatgcaaaagaactaatcgagatgctttacgttaatataaaccgattacagaaataa

SEQ ID NO: 213 - DNA, 405 bp, Escherichia coli
atggatcaggtcgttgtttttcaaaagatgtttgagcaagtgagaaaagagcaaaacttctcctggttttattcagaattaaaacatcaccgtattgcacattacatttattatctggctacggataacatcagaattattactcacgatgatacggttttgttattaagaggaaccaggaacctgttaaaagttagtacgaccaagaaccctgctaaaataaaagaggccgcattgcttcatatttgcggaaaatctacatttcgggaatactgttcaacactggcaggcgcgggcgttttccggtgggttactgatgttaatcataacaaacgcagttactacgccattgataatacgcttttatatattgaagatgtagaaaataataaaccattaatctag

SEQ ID NO: 214 - DNA, 249 bp, Escherichia coli
atgaataattcaatcccagagagatttatttttcaatgtgctttgtttaaaaatctcgagagggaggtgttcatgacgcatgggtatgttgatagtcatattattgatcaggctttacgcttgcgtttaaaagatgaaaccagtgtgattctttctgatctctatctgcaaatattgcagtacattgaaatgcataagactacactaacggatatcattattaatgacagggaatccgtgctctcttag

SEQ ID NO: 215 - DNA, 1524 bp, Escherichia coli
atgcgcaatacactcatacccatcctcgttgcgatatgcttgtttattaccggtgtcgctattttgaacatccagctctggtattccgcaaaagcagagtacctggcgggagcgagatatgccgccaacaatatcaatcatatacttgaagaagcgtcacaagcgactcaaacagcggttaacattgccgggaaggaatgcaacctcgaggagcaatatcagcttggcactgaagcagctctgaaacctcacctgcgcacaatcatcattctcaaacagggaatagtctggtgtacatccctgcctgggaatcgggtcctgttgtctcgtattcctgttttcccggacagtaatttactgttggctccagcaatcgacaccgttaatagattacctatcctgctctatcagaaccaatttgcagatacgcgcattttggttacgataagcgatcagcatattcgtggggcacttaatgtacccttgaaaggggtaaggtatgtattacgcgtggcggatgacattattggaccaacgggtgatgtgatgacgcttaatggacattatccctataccgagaaggttcactccacaaaatatcatttcactattatctttaacccgccgccactctttagcttctacagacttatcgataaaggctttgggattttaatatttattctgttaatcgcctgcgccgctgccttcctgcttgatagatatttcaataaaagcgcaacgcctgaagagatcctgcgacgggcaataaataatggggagatcgtccctttttaccaacctgtggtaaatggtcgggaagggacattgcggggagttgaggtgttagcccgctggaaacaacctcacggtggatatatatcacccgcggcatttattccacttgctgaaaaatccggattaatcgttccgcttacgcaaagcctgatgaatcaggttgccagacagatgaacgctatcgcgagtaaattgccggaaggttttcatattggaattaattttagcgcttcgcatattatttcgccgacgtttgtcgacgagtgtttaaatttccgtgacagttttacccgccgcgatttaaaccttgttctggaagtcaccgagcgtgagccattgaatgttgatgaaagtctggttcagcggttgaacatactgcatgaaaatggttttgtcatcgcactggatgatttcggtactggctactcagggctttcttatcttcatgacctgcatattgattatatcaaaattgatcacagtttcgttggccgcgtaaacgcagacccagaatcaacccgaattctggattgtgtattggatctggcgcgtaaactttcgatcagtatcgtcgctgaaggtgtcgaaacgaaagaacaacttgactatctgaaccaaaattatatcacatttcagcagggttattatttctataaacctgttacatacatcgacctggtcaaaattatcctttctaaaccgaaggtgaaggttgtggttgagtga

SEQ ID NO: 216 - DNA, 1680 bp, Escherichia coli
atgaaacagaaaattacggattacctggacgaaatctacggtggaacatttaccgcaactcatttacagaaacttgtaacgcgtcttgagagtgcgaaacgattaattacacagcgacgtaaaaaacactgggatgaaagtgatgtcgtgttaattacctatgccgatcaatttcacagcaatgatttaaaaccattacccacatttaatcagttttaccatcaatggctgcaaagcattttttcacatgttcatttgttgccgttttatccatggtcatctgatgatggcttttcggtaattgattatcatcaggtcgccagtgaagcgggggagtggcaggatattcagcaactcggtgaatgcagtcatttaatgtttgattttgtctgcaaccatatgtcggcaaaaagtgaatggtttaaaaactatttacaacagcatccaggttttgaagatttttttattgccgttgacccgcaaaccgatctcagcgccgtcactcgcccgcgtgcgttaccgttattaacgccattccagatgcgcgatcattcaacgcgccatttatggaccacctttagtgacgatcaaattgacctgaattaccgtagccctgaagtgttgctggcgatggtggatgttttactctgttaccttgcgaaaggtgctgagtatgtccgcctggatgccgttggctttatgtggaaagagccgggaacaagctgcatccatctggaaaaaacacatctgattatcaaactgttacggtcgattattgataacgttgcgccaggtacagtgatcattaccgagaccaatgttccgcataaagacaacattgcttactttggcgcaggcgatgacgaagcacatatggtgtaccagttctcgctgccgccactggtgctgcatgcggtgcaaaaacagaacgttgaggcgctttgtgcgtgggcgcaaaacctgacactaccttccagcaacaccacctggtttaacttcctcgcctctcacgatggcatcgggctaaacccgctacggggcttgttgcctgaaagcgaaatattagagctggtcgaggcgttacagcaggaaggtgcattagtaaactggaaaaataatcccgacggtacacgcagtccgtatgaaataaatgtgacctatatggatgcgttaagccgccgtgagagtagcgatgaagaacgttgcgccaggtttatccttgcccatgcgattttgttaagtttccccggtgtgccagcgatatatattcaaagtattcttggctcgcgtaatgattacgcaggtgtcgaaaaactcggatataaccgtgcgattaaccgtaaaaaatatcacagtaaagagataacccgagaactgaacgatgaagctacattaaggcatgcggtatatcatgagttgtcgcgtttaattacacttcgtcgcagccataacgagtttcatccggataataattttaccattgatacgattaattcatccgtaatgcgtattccaagaagtaacgctgatggtaattgtctgactggattgtttaatgtcagtaaaaatattcagcatgtaaatattactaatctgcatggtcgggatctgattagtgaagttgatatattgggtaatgaaataacgctgcgcccctggcaggttatgtggattaaataa

SEQ ID NO: 217 - DNA, 216 bp, Escherichia coli
atggcacaagtaatctttaatgaagagtggatggttgaatacggcctgatgcttcgcactggtctgggggccagacaaattgaagcataccgccagaactgttgggtggagggcttccacttcaaacgagtatctcctttaggtaagccagacagcaaacgagggattatctggtacaactatccaaagataaatcagtttatcaaagactcatga

SEQ ID NO: 218 - DNA, 210 bp, Escherichia coli
atgtataaaattaccgccactattgaaaaggaaggtggcactcctactaactggacaagatattcaaaatctaaactaacgaaatcagaatgcgaaaaaatgctctcaggtaaaaaagaagcaggcgtttccagagagcagaaagtaaaactgataaattttaattgcgagaaacttcagtcctcgagaattgcattgtattcaaattaa

SEQ ID NO: 219 - DNA, 276 bp, Escherichia coli
atgattaccaattatgaagccactgttgtaactaccgatgacattgttcacgaggtgaatctggaaggaaagcgcattggctacgtaattaaaacagaaaataaagaaaccccattcactgtggttgatatcgatggtccatcaggcaacgtaaaaacacttgatgaaggtgtcaaaaaaatgtgcctggtgcatatcggaaagaatctgcccgcagaaaaaaaagccgaatttctggcaactctaattgcaatgaaattaaaaggtgaaatctga

SEQ ID NO: 220 - DNA, 222 bp, Escherichia coli
atgattgcacatcacttcggaactgatgaaataccacgtcagtgtgtgactcctggcgattatgttcttcatgaaggccggacatatattgcctcggcaaacaatattaaaaagcgaaaactatatattcgtaacctgaccacaaaaacattcattactgaccgcatgattaaagtcttcctcggtcgtgatggtttacctgtaaaggcggagtcatggtga

SEQ ID NO: 221 - DNA, 489 bp, Escherichia coli
atgttggatgtatttactccattgttgaaactttttgctaacgagccactcgaaagacttatgtatacgattatcatttttggtctcactctctggctgataccgaaagagtttactgtcgcattcaatgcttatactgaaataccttggctctttcagattatcgtttttgccttttctttcgtggtcgccatttccttctcaagattgcgagcacatattcaaaagcattattcattactaccagagcaacgagtattgcttcgtttatctgagaaagaaatcgctgtatttaaagatttccttaaaacaggaaatcttattatcacttctccttgccgtaacccggttatgaaaaaattagaacggaagggcatcattcaacatcagagtgatagcgcaaactgttcttattatctcgtcaccgaaaaatactcccattttatgaagttattctggaacagcaggagtagacgttttaatcgttag

SEQ ID NO: 222 - DNA, 297 bp, Escherichia coli
atgaaaaaagagaactattcattcaagcaagcttgtgctgttgtcggtgggcaatcagcaatggctaggcttttaggtgtatcacctccaagcgtaaatcaatggatcaaaggggtacgtcaattgcctgccgagagatgtccagcaattgaacgtgcaacaagaggtgaggttctgtgcgaagaacttcgtcctgatattgactggtcatatttacgacgttcggcatgttgttcgcagaatatgtcagtgaagcaactaaatgacagtaacaaatcctcatttgatcatacctga

SEQ ID NO: 223 - DNA, 1458 bp, Escherichia coli
atgaatacatctcatgtaagagttgttactcatatgtgtgggttcctggtttggctctatagtctttcaatgttgccaccaatggttgtagcattgttttataaagaaaaaagcctgtttgttttctttataactttcgttatatttttttgcattggtggcggagcgtggtatacaactaagaaatctggcattcaattacgtacccgtgatgggtttattataattgtaatgttttggattttgttttctgttattagtgcattccctttatggattgactcagaacttaatttaacgttcattgatgctctgtttgaaggggtttctggaataacaacaacaggagcaactgtaattgatgatgttagttcattacctcgggcatatttgtactatcggtcacagttaaattttataggtggtttaggagttattgttctggcggttgctgtattgccattattgggtattggtggtgcaaagctttatcagtcagaaatgccggggccatttaaggatgacaaactcactccccgcctggccgatacgtcacggacactgtggataacttattctttattaggtattgcttgtattgtctgttatagacttgcaggaatgcctttgtttgatgctatttgtcacgggatttccacagtttcgcttggtggtttctcaactcatagcgagagtatcggatattttaataactatttggttgagctggtggctggttctttttccctgctatcggctttcaacttcactctttggtatattgttattagcaggaaaacgataaaacctttaatcagagatattgaacttcgtttctttctgttaatagccttaggggtgatcattgttacctctttccaggtctggcatataggtatgtatgacttgcatggaagttttattcattcgttttttcttgccagctccatgctcactgataatggtttagctacgcaggattatgcaagttggcccacgcacacgatagtgtttttgctgttgtcaagtttctttgggggatgtataggttcaacttgtggtggaattaagtcacttcgatttcttatacttttcaaacaaagcaaacacgagataaatcagctttctcatcccagagcgttgttgagtgtaaatgtaggagggaagatagttacagatcgtgtaatgaggtctgtatggagtttcttttttctttatactctcttcacggtgttttttatactggtgttaaatggtatgggatatgattttcttacatcatttgcaacagtggctgcatgtattaataatatgggattaggttttggggctactgcatcgtcattcggagtgcttaatgacattgcaaaatgcttaatgtgcatagctatgattcttggtcgccttgaaatttatcctgttattatattgttttcaggttttttttggcgctcctaa

SEQ ID NO: 224 - DNA, 897 bp, Escherichia coli
atgctggaaaaatctctggcaacacttttcgcgttgttaattttagcaacgctgataaaccgttttctgctatggcggttaccggagagaaaagggggtgaggttacattacgtattcgtacctggtggggcatcgtcatttgtttttcaatggtgatttcaggtccacgctggatgacgttgacgttttttgcgctgataagttttctggcattgaaagaatattgtacgcttatatctgtacattttccgcgttggttatattggggtattcctcttaactatttgcttatcggttttaattgctttgagctgtttctgttatttatacctttggctgggtttctgatattagccaccgggcaagttttagtgggtgacccctctggttttctgcataccgtgagcgccattttttggggctggataatgaccgttttcgccttgagtcatgccgcctggttattaatgttgccaaccacaaatatccagggcggggcgttactggtgttatttcttttggcattaaccgagtcaaacgatattgcacagtatttatggggaaaatcctgcggcagaagaaaagtggtccctaaagtcagcccgggaaaaacattggaaggtctgatgggcggcgtcatcaccatcatgattgcgtcactgattatcggaccgttactgacaccgctaaatacattacaggcattattagcgggtttgttaattggtattagtggtttttgcggcgatgtcgtgatgtcagccatcaaacgagatattggtgttaaagatagcggaaaactattgccaggacatggcggactccttgacaggattgactcattaattttcaccgctccggtatttttttattttatacgctactgctgttactga

SEQ ID NO: 225 - DNA, 174 bp, Escherichia coli
atgtctctctatcaacacatgcttgttttttatgcggttatggcagcaatcgcatttcttatcacctggtttctttctcacgataagaaacgcatccgtttcttaagcgcctttctggtgggggcaacatggccgatgagtttcccggtggcgctgttgttttcactgttttaa

SEQ ID NO: 226 - DNA, 213 bp, Escherichia coli
atggtatgttttttaatttatatcactctccttttcattcagcgtgtctatttcatttcctctgaaaagaaactaactattcacatcgtgcagatgtttcagttgttatcacaggcattctataatctcaaaatgtttttaatgatggatatgctcggagttggagatgcaattaatattaatacaaataaaaatatccggcaggtatgctaa

SEQ ID NO: 227 - DNA, 336 bp, Escherichia coli
atgcagctcatgttatttaatttgttttccccagcacttaagcttaatactggcctggcaattctttcgcctggtgcatttgaagttcactctgacggaatagatgtggataacgaattgtttcactatcctattaaaaaagcatataccccatataatatacacacttacaagacagaggaagttgtaaaccagatgaatataaaagttaaaaacatgaccttagatgaaataaacaatacttactgtaataacgattattacaatcaggcaataagagaggaaccgatagaccttctggacagatcgttttcctccagttcatggcctttttag

SEQ ID NO: 228 - DNA, 1158 bp, Escherichia coli
atgcacgttacagccaagccctccagttttcaatgtaatctcaaatgtgattactgtttttaccttgaaaaagagtcgcagtttactcatgaaaaatggatggatgacagcactctgaaagagttcatcaaacaatatatcgcagcgtctggcaatcaggtctattttacctggcaaggcggtgaacccactctggctggcctggattttttccgtaaagttattcactatcaacaacgctatgcaggccaaaaacgtatttttaatgcattacaaacgaatggcattttattgaataatgaatggtgtgcctttctcaaagaacatgaatttctggttggtatctcgatcgatggcccccaggagttacatgaccgttacagacgcagtaattcaggtaacggtacttttgcaaaagtgatagcagccatcgagcgtctgaaatcatatcaagtagagtttaatacgttaaccgtcattaataacgttaatgtccattaccctcttgaggtttatcattttttaaaatctatcggcagtaaacatatgcaatttatcgaattgctagaaaccgggacgccgaatattgatttcagtggtcatagtgagaacacattccgtatcattgatttttctgtgcctcccacggcttatggcaagtttatgtcaaccatttttatgcaatgggttaaaaacgatgtgggtgaaattttcatccgtcagtttgaaagctttgtcagccgttttttggggaatgggcataccagttgtattttccaggagtcctgcaaggataatctggttgttgaaagtaatggagacatttacgaatgcgaccattttgtctatccacagtacaaaattggaaacattaataaatctgaactcaaaacgatgaacagtgtacaactgacagcgcaaaaaaaacggattccagcgaaatgtcagcaatgtgcatataaacctatctgcaatggcggttgtcctaagcatcgtattactaaagtaaacaatgagactgtttcttatttttgcgaaggttataaaatccttttttcaaccatggtaccttatatgaacgccatggtagagttagctaagaacagagtaccgctttaccacattatggatgttgcaaaacaaatggagaataattaa

SEQ ID NO: 229 - DNA, 762 bp, Escherichia coli
atgtcgctcgtttgttctgttatatttattcatcatgccttcaacgctaacattttagataaagattacgccttctctgacggcgagatcctgatggtagataacgctgttcgtacgcattttgaaccttatgagcggcattttaaagagatcggatttactgaaaataccattaaaaaatatctacaatgcactaacatccagacagtgacggtgcctgttcctgcgaagtttttacgtgcttcaaatgtaccgactggattgcttaatgaaatgattgcttatctcaactcggaagaacgcaatcatcataatttttcagaacttttgcttttttcttgcctgtctatttttgccgcatgcaaaggtttcattacactattaactaacggtgtgctatccgtttctgggaaagtgagaaatattgtcaacatgaagccggcgcacccatggaagctgaaagatatttgtgactgcctgtacatcagtgaaagcctgttgaagaaaaaacttaagcaagagcaaacgacattctcacagattcttttagatgcaagaatgcagcacgcaaaaaatttgatacgcgtagaaggttcagtcaataaaattgccgaacaatgtggttatgccagtacatcttattttatttatgcgttccgcaaacatttcggcaacagtccgaagagagtttctaaggagtaccgttgtcaaagtcacacgggtatgaatacgggcaacacgatgaatgctttagctatttga

SEQ ID NO: 230 - DNA, 915 bp, Escherichia coli
atgggtaaaacaatcagtataaaggtcctgttcggtatttatcttctattaatggcaggcaaagtttttgccttcagttgtaatgtcgatggcgggtcaagtattggagcaggtacaacctctgtttatgttaatctcgaccctgtaatacagccgggccagaatctggttgtagacttgtctcagcatataagttgctggaatgattacggcggctggtacgacactgatcatataaacctggtacaaggctcagctttcgcaggctccctacagtcatataaaggatcgctgtactggaataatgtgacctaccccttcccgttgacgacaaataccaacgtattggatattggtgataagacaccgatgccattaccgttaaaactctatattaccccagttggggcggccggtggagttgtcataaaagcgggggaagtcattgcccgtattcatatgtataaaattgcaacattaggaagcggaaatccgcgtaattttacgtggaatattatttcaaataacaatgttgttatgccaacaggcggctgcaccgttgatagtcgaaatgtcaccgtggatctcccggactttcctggaagcgcagaaataccccttggcgtatattgctcaagcgaacaaaagctctcattttatctttcgggtgccaccactgacagtagccgacaagtgtttgctaacacagcacctgatgcaacaaaagcatcgggagtgggtgtcactctaatgcgtaatggaaaaatactggctacgggagaaaatgtctccctggggacagtaaataaaagcaaagtacctctgggtttaagcgcaacctatggacaaacaggaaacaaggtttcagccggaaccgtccagtcagtcattggtgtcacttttatctatgaataa

SEQ ID NO: 231 - DNA, 504 bp, Escherichia coli
atgaaaagacttcacaagaggttcctgttagctacgttttgcgcgttattcacagcaactctccaggccgccgatgtcactatcactgttaatggtcgggtagtcgctaaaccctgcactattcaaaccaaagaagctaacgttaatctcggggatctttatacgcgcaatctgcaacaacctggttctgcatctggctggcacaatattactttgtcattaaccgattgtccggttgaaacaagtgcagtgacggcaatcgtgacaggttcaactgacaatacgggttattacaaaaatgaaggtactgccgaaaatattcagatagagctgagggatgaccaggatgctgcgttaaaaaatggcgatagcaaaacggttattgttgatgagatcactcgtaatgcacagtttccacttaaggcaagagctatcacggtgaatggaaacgcaagccagggaacgatcgaggcgctaatcaatgtgatctacacctggcaataa

SEQ ID NO: 232 - DNA, 1116 bp, Escherichia coli
atggttacgccagtaagcatcagcaattacatatctcttcctgatgattttcccgtacgtaatattgcaccgcaggtaaaagaagttttaaaggattttattgatgcacttagtacaataatatgtaatgaagagtggcgcacgtctttaaacatcaactcagccacaaaaaagatatttaataaccttgacaacttatcatatattcagaggacttcttttcggggtaacgacacgctatacaatgaaaaggttcagtttaaactcacttatcccgccaggaatggaagacacaaagaaaatattgaatttcaggtagtaataaatttaagccctatttatttagataattttcgccatgatggagaaattaatattttttgcgctcccaacccaaagcctgtcactatggggcgcgtatttcagaccggcgtcgagcgtgtactctttctgtttctgaatgattttattgaacaatttccaatgatcaaccctggtgttcccatcaaaagagcgcatacaccacatattgaacccctgccttcggatcaccataccgctgcagattacttacgccagtttgatttgcttgtcctgaattttatctctcgcggtaattttgtcatactcccccgattatggaataactctgaggttcacagatggttcgtcaataaagatcctaacttgatcaccgccattctcgacataacggacagcgaattaaaagaggatttgttgcaaagcctgatggattcattaggttctaacaaacatgtactacccgaagtctgcatctgctttttatcccttttagcagaacaagaatctcctcattttcagaacttgtttttatttttcgccaatatgttattgcactatcaccaatttatgaatcccaatgaaagtgatttgaatgacgtgttgatgccagcatcattaagtgatgataaaattatcaaacatatggcgcgcaggaccctcaaactgtttgtaaaaaatgaaacaccgccaaaagttactcacgaagacctggtgaaaaacaggcctcgctcccctgtcagaccacctatacccgcaaccgccaaaacgccagacctccctgaacgtcattaa

SEQ ID NO: 233 - DNA, 411 bp, Escherichia coli
atggatcaggtagtcatttttaaacaaatatttgataaagttcgaaacgatttaaactatcaatggttttattctgagctaaaacgtcacaatgtctcacattacatttactatttagccacagagaatgttcatattgtattaaaaaatgataatacagtgttattaaagggcctaaaaaacattgtgtctgtcaaattttcaaaggataggcatcttatagaaacgacctctaataagctgaaatccagagagatcacatttcaggaatacagaagaaaccttgctaaagcaggagtttttcggtgggttacaaatatccacgaacaaaaaagatattactatacctttgataattcattactatttactgaaagcatccagaaaactacacagatcttaccacgctaa

SEQ ID NO: 234 - DNA, 156 bp, Escherichia coli
atgcgtgaatatccaaatggcgaaaaaacacaccttactgtaatggccgcagggtttccatctctgaccggagatcataaagtcatttatgtagccgcggatcgacatgttacttcagaagaaattctggaagcagcaataaggctcttgagttga

SEQ ID NO: 235 - DNA, 213 bp, Escherichia coli
atgtctaacaaaatgactggtttagtgaaatggtttaaccctgaaaaaggttttggtttcatcacgccgaaagatggcagcaaagatgtgtttgtccatttctcagcaattcagagcaacgatttcaaaacattaactgagaatcaggaagttgaatttggtattgagaacggacctaaaggtcctgccgctgttcatgtagtggcgctttga

SEQ ID NO: 236 - DNA, 312 bp, Escherichia coli
atgactcaagactatgaactggttgtgaaaggagtccgtaattttgagaataaagttacggtaactgtagccttacaggacaaagaacgctttgacggtgaaatttttgacctggatgtcgccatggaccgtgttgaaggagctgcgctggagttttatgaggcagcagccagaaggagcgtccggcaagtcttcctggaagtagcagaaaaattgtcagaaaaagttgagtcttatctgcagcatcagtactcctttaagattgaaaatcctgccaataagcacgagcgtcctcatcataaatatctatga

SEQ ID NO: 237 - DNA, 216 bp, Escherichia coli
atgtcaaataaaatgactggtttagtaaaatggtttaacgctgataaaggtttcggctttatttctcctgttgatggtagtaaagatgtgtttgtgcatttttctgcgattcagaatgataattatcgaaccttatttgaaggtcaaaaggttaccttctctatagagagtggtgctaaaggtcctgcagcagcaaatgtcatcattactgattaa

SEQ ID NO: 238 - DNA, 189 bp, Escherichia coli
atgaaaacgttattaccaaacgttaatacgtctgaaggttgttttgaaattggtgtcactatcagtaacccagtatttactgaagatgccattaacaagagaaaacaagaacgggagctattaaataaaatatgcattgtttcaatgctggctcgtttacgtctgatgccaaaaggatgtgcacaatga

SEQ ID NO: 239 - DNA, 1020 bp, Escherichia coli
atgaaaagcatattaattgaaaaaccgaatcaactggcgattgtcgaacgtgaaatacccaccccgtcagcgggtgaagtacgagtaaaagtgaaacttgccggaatttgtggttcagatagccatatttatcgtgggcataatccttttgcgaaatatccgcgcgtcattggtcatgaattctttggcgtcattgatgcagtgggtgaaggcgtggaaagcgccagagtcggtgaacgtgttgctgtcgatccggtggtcagctgtgggcattgctatccgtgctctataggtaaaccgaacgtttgtacgacactggctgtattaggtgtgcacgctgacggtggtttcagtgaatatgccgtggttccggcaaaaaatgcgtggaaaattcctgaagcagtggccgatcaatatgcggtaatgatcgaaccttttaccattgcggctaacgtaaccggacatggtcaaccgactgaaaatgataccgttctggtttatggtgccggtccaatcggcctgacgatcgttcaggtattaaaaggcgtctataacgttaaaaatgtgattgttgccgatcgcattgatgaacgactggaaaaagcgaaagagagcggggctgactgggcgattaataacagccagacaccgcttggcgagattttcactgaaaaaggcatcaagccgacattaattatcgatgcggcttgtcatccttctatcctgaaagaggccgtaacgctggcttctccagcggcacgtattgtattgatggggttctccagtgaaccgtctgaagtgattcagcaaggaattaccggaaaagaactctctattttctcttcacgcttaaatgcaaataaattcccgatcgttatcgactggttaagtaaagggttaattaaaccagaaaaattaattacccatacgtttgatttccagcatgttgctgatgccattagtttatttgaacaggatcaaaaacattgctgcaaagtcttactcactttttctgaataa

SEQ ID NO: 240 - DNA, 1215 bp, Escherichia coli
atgaagatcgtaaaggctgaagtttttgttacctgtccggggcgtaatttcgtcacattaaaaatcaccactgaggacggtattacgggccttggggatgccaccctcaatggacgtgagctttccgtggcctcttatttgcaggatcacctttgtccgcagcttattggtcgcgatgcgcaccgtatcgaagatatctggcagtttttctataaaggtgcttactggcgtcgcggtccggttacgatgtcggccatttcagcggttgatatggcgctgtgggatattaaagccaaagctgccaacatgccgctttaccagttactcggcggcgcgtctcgtgaaggggtgatggtttattgccataccaccggtcacagtattgatgaagctctggatgattatgcccgtcatcaagagcttggattcaaagccatccgcgtgcagtgcggaatccctggtatgaaaaccacctacggcatgtcgaaaggtaaaggtctggcttatgaacccgcaaccaaaggacagtggccggaagagcagctgtggtcgacggagaaatacctcgatttcatgccgaaattgtttgacgcggtacgtaacaagtttggttttaatgaacatttgctgcatgacatgcaccatcgcttaacgcctattgaagcggcgcgctttggtaaaagcattgaagattatcgcatgttctggatggaagacccgacgcctgcggaaaaccaggaatgcttccgtctcattcgccaacataccgtcacacccatcgcagtgggtgaagtcttcaacagcatctgggactgcaaacaactgattgaagagcaactcatcgattatatccgcaccacgctgacccatgcaggcggaattaccggtatgcgccggattgccgattttgcttcgctgtatcaggtacgtactggctcacacggtccttccgatttgtcaccagtctgcatggctgcggcgctgcactttgatctgtgggtccccaatttcggtgtccaggaatacatgggttattccgaacaaatgctcgaagtcttcccgcacaactggactttcgataacggctatatgcatccgggagacaaaccgggtcttggtatcgaattcgatgaaaagctggcggcgaaatatccctatgaacctgcttatctaccagtcgcacgtctggaagatggcacgctgtggaactggtaa

SEQ ID NO: 241 - DNA, 2103 bp, Escherichia coli
atggctaacggttggacaggtaatatattaagagtcaatctcacgacaggaaatattaccctcgaagattccagtaagtttaaaagttttgtcggtggcatgggcttcggctacaaaattatgtatgacgaagtaccgccaggcacgaaacctttcgatgaagcgaataaattagtctttgctaccggcccattaactggatctggtgccccctgtagttctcgcgtaaatatcacctcactttctacttttaccaaaggaaatttagtcgtcgatgcccatatgggtggcttttttgcagcgcaaatgaaattcgctggatacgacgtcattattatcgaagggaaggcgaaatcaccggtatggctgaagattaaagatgacaaagttagcctggaaaaagccgatttcttatggggaaaagggacgcgcgcaacgacggaagaaatttgtcgattgaccagtccggaaacctgtgtggcggctattggtcaggctggggaaaaccttgttcctctctctggcatgttgaatagccgtaaccacagcggcggtgcgggaactggcgcaataatgggttcgaaaaacctgaaagcgattgcggttgaagggacgaaaggggtcaacattgccgatcgtcaggagatgaagcgtctcaatgattacatgatgactgaacttattggtgcgaataacaaccatgtcgtgccaagtacgccacaatcgtgggcagagtattcagatcccaagtcacgctggacagcacgtaaagggctgttttggggcgcggctgaaggtggtccgattgaaacgggtgaaattccgccaggcaatcagaatacggtcggctttcgtacctataaatccgtttttgacttaggaccggcggcagagaaatacacagtaaaaatgagcggctgccactcttgcccgatccgttgtatgacccaaatgaatattcctcgggtgaaagagtttggcgtgcccagcacaggtggtaacacttgtgtagcaaactttgtccataccaccatcttcccgaacgggccgaaagattttgaagataaagacgatggtcgtgtgattggtaacctggtgggtctgaatttgttcgatgactacggcctatggtgtaactacgggcagttgcatcgcgactttacttattgttacagcaaaggtgtgttcaagcgtgttctgccagctgaagagtatgcagaaattcgctgggatcaactggaagcgggtgacgttaacttcattaaagatttttactaccgtctggcgcatcgtgtgggtgagctgagtcacctggctgatggttcatatgccatcgcagaacgctggaatttgggtgaagagtactggggctacgcgaaaaataaactctggtcgccgtttggctatccggttcaccatgccaatgaagcgtcagcgcaggtcggttccattgttaactgtatgttcaaccgtgactgcatgacgcatacccatatcaactttattggttccggcttgccattgaaactgcaacgtgaagtggcgaaagaactttttggttctgaagatgcttacgatgaaaccaaaaactacacgccaatcaatgacgcaaaaattaaatatgcaaagtggtcgctgttgcgggtctgtttgcataacgccgtcaccctgtgcaactgggtctggccaatgaccgtttcgccgctgaaaagccgtaattaccggggcgatctggcgcttgaagccaaattcttcaaagcgatcaccggcgaagagatgactcaggaaaaattagatttagctgcagagcgtatttttacgttgcatcgtgcctacacggtaaaactgatgcaaaccaaagatatgcgtaatgaacacgatcttatctgttcctgggtattcgacaaggatccgcagatcccggtctttactgaaggtactgacaaaatggatcgtgacgatatgcatgcttcgctcacgatgttctacaaagaaatgggctgggacccacagcttggttgtccaacccgcgaaacattgcagcgtctggggctggaagatattgccgccgatctggcagcacacaatctactgcctgcgtaa

SEQ ID NO: 242 - DNA, 1215 bp, Escherichia coli
atgaaaaatccctatttccctaccgcacttgggttgtattttaattacctggtgcatggtatgggcgtccttttgatgagcctgaatatggcctcgctggagacactttggcagactaatgccgcgggtgtctcgatagttatctcatcgctgggcattggtcgattaagtgtcttgctttttgcaggattattatccgatcgctttggtcgccgcccttttatcatgctcgggatgtgctgctatatggccttcttttttggcatcctgcagaccaataacatcattatcgcttatgtttttggctttctggcgggaatggcaaacagttttctcgatgcaggcacttatcccagtttgatggaagcttttccacgctcacctgggacagccaatattttaattaaagcatttgtttccagcggacaatttttattaccgctaatcattagcctgttagtgtgggctgaactgtggttcggttggtcctttatgattgctgcaggcattatgtttattaacgctctgtttttataccgttgtacgttcccaccccatccgggtcgtcgcttacctgtcataaagaaaaccaccagctctacggaacatcgctgttcaattatcgatttagccagttataccttatatggctatatctcaatggcaacgttttatctggttagccagtggctggcacagtacggacaatttgttgcaggcatgtcatacactatgtcgatcaaactactcagtatctacaccgtgggttcgctgctttgtgtatttattaccgctccactcattcgtaataccgttcgcccaacaacattactgatgctgtacacctttatctcatttattgctctgtttaccgtctgcctgcatcccacattttatgtggtgataatatttgcttttgtcattggttttacctctgctggaggtgttgtgcaaattggcctgacgttaatggctgaacgtttcccttacgctaaaggtaaagctacagggatctattacagtgcgggcagtattgcgacctttactattccgttgattacggctcatctgtcccaaagaagtattgccgatattatgtggttcgataccgccatcgctgccatcggttttttactggcactgtttatcggcttacgcagccgcaaaaaaacgcggcatcactcgctaaaggaaaatgtcgctccgggtgggtaa

SEQ ID NO: 243 - DNA, 1266 bp, Escherichia coli
atgtctcaaaataaggctttcagcacgccatttatcctggctgttctttgtatttacttcagctacttcctgcacggcattagtgttattacgcttgcccaaaatatgtcatctctggcggaaaagttttccactgacaacgcgggcattgcctacttaatttccggtatcggtttggggcgattgatcagtattttattcttcggtgtgatctccgataagtttggtcgtcgggcggtgatattaatggcagtaataatgtatctgctattcttctttggtattcccgcttgcccgaatttaactctcgcctacggtctggcagtgtgcgtaggtatcgctaactcagcgctggatacgggtggctaccccgcgctcatggaatgctttccgaaagcctctggttcggcggtcatactggttaaagcgatggtgtcatttgggcaaatgttctacccaatgctggtgagctatatgttgctcaataatatctggtacggctatgggctgattattccgggtattctatttgtactgatcacgctgatgctgttgaaaagcaaattccccagccagttggtggacgccagcgtaactaatgaattaccgcaaatgaacagcaaaccgttagtctggctggaaggtgtttcatcggtactgttcggtgtagccgcattctcgaccttttatgtgattgtggtgtggatgcccaaatatgcgatggcttttgctggtatgtcagaagctgaggcattaaaaaccatctcttattacagtatgggctcgttggtctgtgtctttatttttgccgcactactgaaaaaaatggtccggcccatctgggctaatgtatttaactctgcactggcaacaataacagcagccattatctacctgtacccttctccactggtgtgcaatgccggagcctttgttatcggtttctcagcagctggcggcattttacagctcggcgtttcggtcatgtcagagttttttcccaaaagcaaagccaaagtcaccagtatttatatgatgatgggtggactggctaactttgttattccactgattaccggttatctgtcgaacatcggcctgcaatatatcattgttctcgattttactttcgcgctgctggccctgattaccgcaattattgtttttatccgctattaccgcgttttcattattcctgaaaatgatgtgcggtttggcgagcgtaaattttgcacccggttaaacacaattaagcatagaggttaa

SEQ ID NO: 244 - DNA, 912 bp, Escherichia coli
atgtatcaacgctgttttgataacgccagtgaaacgctgtttgtcgccggtaaaacgccacggctttcacgttttgcatttagcgatgatccaaaatgggagtccggacatcacgttcatgacaatgaaaccgagttgatttacgtcaagaaaggggttgcaaggtttaccatcgattcttcgttatatgtcgcacatgcggatgacattgtggtgatagaacgcggcaggctgcatgcggtggcctctgacgttaacgatccggcaacgacgtgtacctgtgcgctgtacggctttcagtttcagggggctgaggaaaatcagctactgcaaccgcattcttgtccggtaattgccgcggggcagggaaaagaagtcataaaaaccttatttaatgagctaagtgtgattttgccgcaaagtaaaaatagccaaacatcttcgttatgggatgcatttgcctatacgttagccattctttactacgaaaattttaaaaatgcttatcgttcggagcaggggtatattaaaaaagatgttctgataaaagatattcttttctatctgaataataattatcgcgaaaaaatcactttagaacagttatcgaaaaaatttcgtgccagcgtcagttatatttgccatgaatttaccaaagagtatcgtatttcccctattaactatgttattcaacggcgtatgacggaagcaaaatggtcactcactaatactgaattatcacaggcagagatctcctggcgtgtgggttatgaaaatgtcgatcactttgccaaactgtttttgcgccatgtcggttgttcgcccagcgattaccgtagacaatttaaaaactgttttgcggaacaagaaatcctatctgaatttcctcaaccggtaagtcttgttggataa

SEQ ID NO: 245 - DNA, 804 bp, Escherichia coli
atgttttctacaaacttaatacagagtaattatggtgatttaaatattaaaagcctggctttcgactcttttaaagaaaggctgcagtctactatgacagcactcactttctttatatcaacgggtcaatgtgactgcgatgaaatagcagaatcaaactttaattatatgattgcctatatgtctaacattaactatgatgcctcaaagccaggagcgccagcacttagttttgatacatatctgcaggacaatgttaaatatagagtaataattaataatctttatggtagtgaaattcggataagaggtataaataaagattttattggaatggatgtcacttctgtatttcgcccagaaaaaatgaccaatttgatcagtataaaaaacaggttggttattcactatttaaggactatatactatgaacaaaattatatacatcctgtcgggagcatttttgctgcgattcaaaaaaatgagagtctcctaaagtttccttcgataatatcaatgcttaatatcaatcttctttttaatccactaaatcttccgggaatgggaagtggtgtgcttgaagatattatgagtattccagatagttcacttagaaaacgtctcgggtatgaggttttaagcttctcgctacaggcacattcattgagccaggaatgtattgataagttggacatttttttcgctgacgatctgtttaaatatgagtcagtatgcatcgccgcgatggaacatttaaaaagtaaggcaacggcccctatacaaaacggaccgttgccagcataa

SEQ ID NO: 246 - DNA, 105 bp, Escherichia coli
atgaacgatcaaatgtttgtcgagacactgattatcacgtcatcgttttttgccattgctgttgtactggttttgtccgttcttcttatcgaacggaccggctag

SEQ ID NO: 247 - DNA, 1359 bp, Escherichia coli
atgaaaagactatctataaccgtccgtttaaccttgctttttatattgctactgtctgttgctggcgccggaattgtctggactctctataatggcctggcaagtgagttgaaatggcgcgatgatacaacactcattaaccggacagcgcagatcaagcagttgttaattgatggggtaaatccagatacgttacctgtgtactttaaccggatgatggatgttagtcaggatatcttgattattcatggtgatagcatcaataaaattgttaaccggacaaatgtcagtgatggcatgttaaataacatacctgctagtgagacaatcagcgcagctggcatttacagaagcattattaatgatacagagatagatgctttacgaattaatattgatgaagtttcgccatcattaacggttactgtggctaaattggcttcagccagacataacatgcttgaacagtataaaattaatagcattataatttgcattgtcgccattgtactttgctcagtattaagtccgctgttaatcagaacgggattacgagagatcaaaaagttgagtggtgtaacggaagcgctgaattataacgatagccgagagcctgttgaggttagcgcattaccgagagaactaaaacctcttgggcaggcgttgaataaaatgcatcatgctttagtcaaagattttgagcgtctaagtcagtttgctgacgatctcgctcatgaacttagaacgccaattaatgcattactgggtcagaatcaggttacgctcagtcaaaccagaagtatcgctgaatatcaaaaaacaattgccggaaacattgaagagctggaaaatatttcgcggttaacagagaacatactgtttcttgccagggcagataaaaacaatgttttggtgaaactggactcgctttctctcaataaggaagtcgaaaatttgttggactatcttgaatacctttcagacgagaaagagatttgctttaaggtcgagtgcaatcagcaaatctttgcggataaaattttactacaacgaatgttatcgaatcttattgttaatgccattagatattcgccagaaaaatcgcgtattcatataaccagttttcttgataccaacagctatcttaatattgatatcgccagccctggaacgaaaattaatgagcctgaaaaactcttccgtagattttggcggggagataattcgcgtcattccgtaggtcagggactaggcctttctttagtcaaagcgattgccgaattgcatgggggaagtgctacgtatcactatctcaataagcataatgtgttccggattacgttaccgcaaagaaattaa

SEQ ID NO: 248 - DNA, 747 bp, Escherichia coli
atgttgcttagcataatcactgtcgcgtttcgtaacctcgaagggatagtcaaaacacatgcctcgctggcgcatctggcgcaggtggaagatatcagcttcgaatggattgttgtcgatggcggttccaacgacggcacccgtgagtatctggaaaatctcaatggtatctttaacctacgctttgtcagcgagccagataacggtatctacgacgccatgaacaaaggcattgcgatggcacaaggcaagttcgcgttgtttctcaattcgggcgatatttttcatcagaatgccgcaaattttgtccgtaagttaaaaatgcaaaaagataacgtgatgatcaccggcgatgcgctgctggattttggcgacgggcataaaattaaacgtagcgccaaaccgggctggtatatttatcacagcctgcccgccagtcatcaggcgatatttttccctgtatccggcttgaaaaaatggcgttatgacctggaatataaagtttcttccgactacgcgctggcagccaaaatgtataaagccggttatgcatttaaaaaactcaatggcctggtgtctgaattttccatgggtggggtatctaccaccaataatatggaattgtgtgctgacgcgaaaaaagtccaacgacaaatattacatgtgcctggcttttgggctgaattatcctggcatttacgccaacgtactacctcaaagacgaaagccttatataacaaagtctga

SEQ ID NO: 249 - DNA, 1218 bp, Escherichia coli
atgtcaacttctatcagaatctgtagctacctgttgctgccgctgatttatctgctggttaacgtcaaaatcgcccagcttggcgaaagtttccccatcaccatcgtcacttttttacctgtcttgttactgctgtttttagaacgcatcagcgttaaaaaattgatgattgccttagggattggcgcgggactcacggcgtttaactatctgtttggtcagtcgctggatgccagtaaatacgtcacttcaactatgctgtttgtctatattgtgatcattattggcatggtgtggagtattcgttttaaaacaatttcgccacacaaccatcgcaagatattacgtttcttttatctggtggtcgggctggtggtggcgctggcggcggtggagatggcacaaattatcctcaccggtggcagcagtattatggagtcgatttcgaaatatctgatttacagcaacagctatgtgctgaatttcattaaattcggcggcaagcgcacgacagcactttatttcgaaccggcatttttcgctctggcattaatctcaatttggctcagcatcaaacagtttggtatcaaaacgcctaaaacagatgctatgattctcgcagggataatattatccggatcgttttcaggggttatgacctttatcctgttttatttgctggagtgggcatttcaatatctgaataaagaggcgattaagaaaaagttaccgttagcattgatttctctggctgtattcctggttggtgtggtaatcgcgtttccttatatttccacccgtctgggcgatttaggtacggaaggatcgtcatcatattatcgtattgtcggtccgctggtgatggtcggttattctttgacccatattgacggtgtagtcagatttggctcactttatgaatatgtcgcatcattcggaatatttaacggtgcggatgtcggaaaaaccatagacaatggtttgtatctgctgattatttatttttcctggttcgcggtgtttttatcactgtggtacatggggaaagtgataaaaatgatgatcaacgcttttggtgataaccgcaattttcgcgtgcaattatatctttttactccggtatcgctgttttttaccggttcgatatttagcccggaatatgcatttttaatcgtctgtccgtttattttgcgaaaagcgttaaatattacgaggtaa

SEQ ID NO: 250 - DNA, 1035 bp, Escherichia coli
atggaaattcgcataatgctatttatattaatgatgatggttatgcctgtgagctatgcggcatgttatagtgagttatctgttcagcacaacttggttgttcagggggattttgcacttactcaaacacaaatggcgacatatgagcataattttaatgattcgtcatgcgtaagtacaaatactatcacccctatgagcccgtcggatattattgttggactttataacgataccataaaattaaatttacattttgaatggaccaataaaaacaacatcacgttgtcaaataatcagaccagtttcaccagtggttattcagttacggtgacacctgcggccagtaatgcaaaagtgaatgtttctgcggggggcggcggttcagtgatgattaatggtgttgcgacattatccagtgcttcatcatcgacacgcgggagtgccgcagtacaatttctactgtgtttattaggtggcaagtcatgggatgcatgtgtaaatagctacagaaatgcattggcacaaaatgcaggtgtctattcctttaatctgacattgtcatacaacccgataaccacaacctgcaaaccggacgatttattaattactttagacagtattcccgtttcacaattaccagccacaggtaacaaagcaacaataaatagtaaacaaggggatattattctgcgttgtaaaaatttattaggtcaacaaaatcaaacatcacggaaaatgcaggtgtatttatcaagttctgacttgttaaccaacagcaacacaatactgaaaggtgcggaagataatggcgtaggatttattcttgaaagtaatggttcgccagtcacacttttaaatatcactaacagcagtaaaggatatacaaatttaaaggaagttgcggcgaagtcaaaacttacagatacaacggtttcaattccgataacagccagttactacgtctacgatacaaacaaagttaaatctggcgcactggaggcaaccgcattaatcaacgtgaaatacgactaa

SEQ ID NO: 251 - DNA, 720 bp, Escherichia coli
atggccgctatcccatggcggccttttaatttaagaggcattaaaatgaaaggattattatctttactcattttttctatggtccttcctgcacatgccggaattgttatctacgggacgcgcattatttacccggcagaaaataaagaagtgatggtgcagttgatgaaccagggaaaccgttcttcgctgctgcaggcgtggattgatgatggcgatacgtcattaccaccagaaaaaattcaggttcctttcatgttaacgccaccagtggcaaaaataggggcaaattccgggcagcaagtaaaaatcaaaattatgccgaataaactgcccactaataaagaaagcattttttatctgaatgttctggatattccaccaaatagtccagagcaagaaggtaagaatgcactgaagtttgcgatgcaaaacagaattaagttgttttaccggccagcgggtattgctccggtaaataaagcgacatttaaaaaattgctggtaaatcgcagtggcaatggtttggtgataaaaaatgactcagctaattgggtgacgatttcggatgtcaaagctaataatgtcaaagtcaattatgaaactattatgattgcccccttagaaagtcagagtgttaatgtcaaaagtaataatgcaaataactggcatctgaccattatcgatgaccatggcaactatattagtgacaaaatttaa

SEQ ID NO: 252 - DNA, 543 bp, Escherichia coli
atgaaacgttcaattattgctgccgctgtcttttcttctttttttatgagcgctggagtatttgctgcagacgttgataccggaacattaactattaaggggaatattgcagaatctccgtgtaaattcgaagcgggtggtgattcagtaagtattaatatgccgactgtaccaaccagtgtctttgaaggtaaagctaaatattctacctatgatgatgcagtcggtgtaaccagcagcatgttaaaaattagctgcccgaaagaagttgctggtgtaaaactctcgttgattaccaacgataaaataaccggtaacgataaggcgatagccagtagcaacgataccgtgggttactatctctatttaggtgataacagcgatgtcctggatgtttctgcaccttttaacattgagagttataaaacagcggaaggtcaatatgctattccgtttaaagcaaaatacctgaaactgacagataactcagtgcaatcaggtgatgtgttatcttctctggttatgcgtgtggcgcaggattaa

SEQ ID NO: 253 - DNA, 2592 bp, Escherichia coli
atgcatcaatctggttctgtttctctttgtcgttccgcaatatctgttctggtggctacagcgttatattcacccatagcattggcatcaactgttgagtatggtgagacagttgatggtgttgtcctggaaaaagatatccagctggtttatgggaccgccaataatacgaaaatcaatcctggcggagaacagcatataaaagaatttggtgtaagtaataatactgaaattaacggagggtatcagtacattgaaatgaatggcgccgcagaatactcagtattaaatgacggttatcaaattgttcaaatgggtggcgcggcaaaccagactacgctcaataatggtgtgctacaggtttatggcgcagcgaatgataccacgattaaaggcgggcgcttaatcgttgaaaaagatgggggggccgtctttgtcgctatcgaaaagggaggactactggaggttaaagaggggggatttgcatttgcggtagatcagaaagcaggcggtgctattaaaacaaccacgcgggccatggaggtattcggaacaaaccgtctcggtcagttcgatatcaagaatggtattgctaataatatgttgttggaaaacggcggaagtttgcgagttgaagaaaatgacttcgcttataataccactgtagatagtggcggcttactggaggttatggatggcgggactgtaactggcgttgataaaaaagcaggcggaaaattaattgtctcaacgaatgcgctggaagtgagtggtccaaacagtaaaggccaatttagtataaaagatggtgtgtcaaaaaattatgaactggatgatggttccgggctcattgttatggaggacacgcaggccattgatactatccttgataagcatgccactatgcaatcgctgggaaaggatactggtacgaaagtgcaggcaaatgcggtatatgatctcggtcgatcatatcagaatggaagtatcacgtattcctcaaaagccatctctgaaaatatggttatcaacaatggccgcgctaacgtctgggctggcacaatggttaacgtttcagtcagagggaatgatggcattcttgaggtcatgaagccgcaaataaattatgcacccgcaatgttggtgggtaaggtagtggtttctgagggcgcttcttttagaacgcatggtgccgtggataccagcaaagcggacgtttcgctcgaaaatagcgtatggaccatcattgccgatatcactacgacgaaccaaaacaccctcctcaacttagccaaccttgcgatgtctgacgcaaatgtgattatgatggatgagccagtgactcgttcatcagtgacggcaagtgcggaaaatttcattacgttgaccaccaataccctgtcgggaaacggcaatttttatatgcgtaccgatatggctaatcatcagagcgatcagctcaacgtcaccggtcaggcaacaggtgatttcaaaatattcgtgacggacaccggtgccagcccggcagcaggagatagccttacactggtaacaacgggcggcggtgatgctgcatttacgttgggcaatgccggaggcgttgttgatatcggtacgtatgaatataccttgctggataatggcaaccatagctggagtctggcagagaatcgcgcgcaaattaccccttcaaccactgatgtgctgaatatggcggccgcacaaccgctggtatttgatgcagaactggacaccgtgcgtgagcgtcttggtagcgtaaaaggcgttagttacgatacggcgatgtggagttcggcaattaacacccgcaacaacgtgaccactgatgcgggagctggttttgagcaaacattgacgggcctgacgctcggtatcgatagccgtttctcccgtgaagaaagcagtacaattcgcggcttgatctttggttactctcattctgatattggttttgatcgcggcggcaaaggtaatatcgatagctataccctgggggcttatgccggttgggagcatcagaacggtgcctatgttgatggggtggtgaaagttgaccgttttgccaacaccatccatggcaagatgagtaatggggcaacagcgtttggcgattacaatagtaacggcgcgggtgctcatgttgagagcgggttccgttgggttgacggattgtggagtgttagaccctatctggcctttaccggctttaccacagatggtcaggactacacgttatcaaacggcatgcgcgcggatgtgggaaatacccggatattacgcgctgaagcgggaacggcggtaagctatcacatggacctgcaaaacggtacgacgctggaaccctggctgaaagcggccgtgcgtcaggaatacgccgattctaaccaggtgaaagttaatgacgatggcaaatttaataatgatgtggctggaaccagtggcgtttatcaggctggtataaggtcatcgtttaccccgacgttaagcggtcatttgtcagtcagctatggcaatggcgcaggggtagaatcgccgtggaatactcaggcgggtgtggtctggacgttctga

SEQ ID NO: 254 - DNA, 717 bp, Escherichia coli
atggaatggttaagtgaaattcgtaaacttcggaagaacgtacctgtcggtatccaggttgccagacgtttgttagagaggactggcggtgatgttgatgaagccatcaagttgtttcatattgaccaaatcaatatattgacggcaaaagcagacgtcactcatcaggaagcagagaatgttttgttggctacaaactatgatattgcagaagctcttcggcgtattgatgaacaacgctatacactgacggaattgattttgcgtaaaaataaggatgccggagatgccttaaacaatatagcattggcgattgaatatgagtgggatctcaagcgtaagttttggtttggttttgcagatatccaattattaccgccagttttacaaacatttatgctggtttatgaatggcatgaatatgttggttgggaaggaatggagtgtgggatattttttgaaagtgatcatactcaccagcaattgcaagctttggggttattagaactcgcccaaaaaatggttactgcaagaatccgatatgatgagctaaaagacaaggccgaaaattttcacgagattacagaggatgacatattcaaaatgcttataatacattgtgaccaacttgcaagagaggttgattctatattactgcaatttgtgaaggacaatattgatgttttcccgtgtcgccataacagacacgagttataa

SEQ ID NO: 255 - DNA, 423 bp, Escherichia coli
atgacacctttagaacgcattacccaacttgttaatatcaatggtgatgttaataatcctgatactcctcgtccattgttatctcttgaggatttttttattgacaataatatccatggttcaatatgttgcaatgtgattccagaacaatctccgcaagctatctatcaccattttctgaaaatacgtgagcgtaacaatgttagtgatgttttggtagaaattacgatgttcgatgacccagactggccctttagtgaaagtattttagttatcaccactgcttcaccagaagaagttcagagctggtttgtagaagaaattgcccctgatgagtgctgggaaggatggtcagaagatacggagcatggatgggttgaagtccctgtgggtatgcatccggttacttgttggtgggattaa

SEQ ID NO: 256 - DNA, 849 bp, Escherichia coli
atgaaacttattcctcgcagtagtgatatttcacctggcattgatggaatttgcccggggccttttcctccgaacggatttaccgtacttacagatgcagcatatggtaacggagactgtttcggtttgtactggcctattggtcaggagcataaactacctatagtgtgcgaaacgtaccatgacgaatggcgaatcgtacctgccttttccagcattaagaagttcgaagaatggctggaagtgaatgatgatgatccccatgaaaatggcatcagcatcgaagatcaagactttgcagcaaatctcttccgtgttgctcggaaatgtctttcaacgggaaggcttgatgacgcactgccactgttacagcgagcaacagaacaattgcctgaagtcagcgaatattggttagcactggcaatccagtatcgccgatgtaaaaaaacagaagctgcagcacaggctgcgcttaatgcttatcttggcaattgggcatttggtgttcctgacaataaagtcattcatttgctgtcacaggccgcagatgtcccgaatttccaggatgatcctgtgattcagtgcattaaagaacaaggattagatcttagctttggaggaacaaaggaaaataataattaccccttgatgcagatgtgtgttgatacttattttgcgcagagaaaaccgcttcaggcattaaccctgttacataattatgcctggataatgtccagtgaaacgactgcatttcaggaacgctatgattttaatatcgatgaatggcgggcaaaattcaggcagttatgtttagagtattttggcgatagtcgtacacagttcacttaa

SEQ ID NO: 257 - DNA, 489 bp, Escherichia coli
atgagaaagactttcttaaccctgctttgtgtcagtagcgccatagctcatgctgctgatgaagacatcacctttcacgggacattattgtcaccgccaacctgtagcatcagcggtggtaaaaccattgaagtcgaatttcgcgatctcattatcgacgacatcaacggcaactatggtcgtaaagaggtgccatatgaactcacttgtgactcgacgacccgtcatccagattgggagatgaccctcacctggactggtacacaaaccagttttaatgatgcagcaattgaaactgatgtacccggttttggtatcgagcttcagcacgatggtcagcgttttaaactcaatactccgcttgctatcaacgccactgattttacgcaaaagccgaagctggaggccgtaccggtaaaagcgagtgatgctgtgttaagcgatacgaatttttcggcttacgcaacattacgggtggattatcaatga

SEQ ID NO: 258 - DNA, 564 bp, Escherichia coli
atgagtaagtttgttaaaacagctattgctgcggcaatggtgatgggcgcgttcacctctacggcaacaatcgctgcgggtaacaacggtactgcacgtttttacggcaccattgaagactcagtgtgttctatcgttccggacgatcacaaactggaagttgatatgggtgatatcggtgccgaaaaactgaaaaataacggcaccaccacgccgaaaaatttccagattcgcctgcaagattgcgtatttgatactcaggaaacaatgaccactacctttactggtaccgtttcttctgcaaatagcggcaattattacaccattttcaataccgataccggtgcggcatttaacaatgttagcctggcgatcggtgactctctgggtacctcttacaaaagcggcatgggtattgaccagaaaatcgtgaaagatactgccactaataaaggcaaagcgaagcagactctgaactttaaagcctggctggtcggcgcagctgatgcgccagatctgggtaatttcgaagcaaataccaccttccagattacttacctgtaa

SEQ ID NO: 259 - DNA, 1059 bp, Escherichia coli
atgctaccatctatttcaatcaacaataccagcgcagcttacccagaatccatcaatgaaaataacaatgatgaagttaatggattagtacaagagttcaaaaacctttttaatggtaaggaaggaataagcacctgtattaaacatctacttgagcttataaaaaacgccatacgagtaaacgacgatccttatagatttaatattaataattcctcagttacttatattgatattgactccaatgatacagaccatattactattggtatcgacaaccaagaaccaatagaattacctgcgaactataaagacaaagaactcgtccgtactatcattaatgacaacatagttgagaagactcatgatatcaataacaaggaaatgatcttcagcgcattaaaagaaatatatgatggagatcctggttttatcttcgataagatatcacacaaactcagacatacggtaacggaatttgatgagagcgggaaaagcgaaccaacggacttatttacctggtacggtaaagataaaaaaggcgactctctcgctattgtaattaaaaataaaaacggaaatgattacttatctctcggttactacgatcaggacgactaccacattcaaagaggaattcgtattaatggtgatagtctcacccaatattgtagtgaaaacgccaggagtgcttcagcgtggtttgaaagcagtaaagctatcatggcagaatcatttgcaactggttccgatcatcaggttgtaaacgagctcaacggggaaagactgagagaaccaaacgacgtttttaaacgttatggtcgagcaataagatatgattttcaagtggacgatgcaaaatataaatgcgaccatctaaaagaaatagtttctactttagtcggtaacaaaattaacgttggccattctcaaaaaatatataagcattttaaggatctcgaaggtaaaattgaagaaaggcttcaaaatcgccaggctgaatatcaaaatgaaattaatcaaccatctgcgccaggtgttaattttgatgatatttaa

SEQ ID NO: 260 - DNA, 306 bp, Escherichia coli
atgaccacatttaccaataaagaactgattaaagaaatcaaagaacgaatcagcagcctagaggttcgagacgatattgagcgccgtgcttatgaaatcgcactcgtatctctggaagtagagccagatgaacgcgaagcctatgaattattcatggaaaagcgtttcggtgacttagtagatcgtcggagagcaaaaaacggcgataacgaatacatggcatgggatatgactctcggttggatcatctggcagcaacgagctggtatccatttttcaacaatgtcacaacaagaggtgaaataa

SEQ ID NO: 261 - DNA, 1539 bp, Escherichia coli
atggcaatcactaaatcaactccggcaccattaaccggtgggacgttatggtgcgtcactattgcattgtcattagcgacatttatgcaaatgttggattccactatttctaacgtcgcaataccgacaatatctggctttctgggagcatcaacagacgaaggcacctgggttatcacctcgtttggtgtagcaaatgccattgcgatccctgttactggcaggttggcacaaagaataggcgaattaagattatttttactttcagtcacttttttttcgctgtcttcattaatgtgtagcctatcgaccaatcttgatgtgctgatattttttagagtcgttcaggggttaatggcggggccgttaattccactgtcacagagtttattattaaggaattatccgccagaaaaaagaacatttgctctggcattatggtcaatgaccgtgattatcgctccgatatgtgggccgatattgggcggttatatttgtgataactttagctggggttggatatttttaatcaatgtccctatggggattatcgtcctgacattatgcttaaccttacttaaaggaagagaaactgagacttcaccggtcaaaatgaatctaccaggactgaccctgttagtgctcggtgttggtggcttgcaaattatgcttgataaagggcgcgatctggattggttcaactcgagtacaataataatattaacagtagtatcagttatttctctgatctctttagtcatttgggagtcgacctcagagaacccgattcttgatctcagtttgtttaagtcccgtaacttcaccattggtattgtgagtatcacatgcgcgtatttattttactctggagcgatcgtccttatgccgcagttactccaggaaacgatggggtataatgcgatatgggccggacttgcttatgcgcccatcggcatcatgccactattaatttcacctttgataggacgttatggcaacaaaatagacatgcggttgttagtgacatttagttttttgatgtatgcggtttgctattactggcgttctgtgacatttatgccaacgattgattttacaggcatcattttgccgcagttttttcagggattcgccgttgcctgtttctttttacccttaacaacgatttcgttttcaggcttgccagataataaatttgccaatgcctcgagtatgagtaatttttttcgtaccttgtcaggatcagttggtacgtcgttgacaatgacgctgtggggacgacgcgaatcgttacaccatagtcagttgacagcaaccatcgatcaatttaaccccgtgtttaattcatcgtcacaaattatggataaatattatggttcgctttcaggagttcttaatgaaattaataatgaaataacccagcagtcactttctatttctgcaaatgagattttccgtatggcggctattgcttttatcttacttacggttttggtttggtttgcgaaaccgccgtttacagcgaaaggcgttgggtga

SEQ ID NO: 262 - DNA, 3594 bp, Escherichia coli
atgaagtttttaccctatatttttcttctctgttgtggtctttggtcgaccataagtttcgcagacgaagattacatcgaatatcgtggcatcagtagtaacaaccgtgtcacacttgatccactacgtctgagcaacaaggaattacgttggttagcgagcaaaaaaaatcttgtgattgcagtacataagtcccaaacggctacgttgttgcataccgattcgcagcaacgggttcgtggtattaatgctgattatttaaatcttttaaaaagagcgttaaatatcaaattaacactccgggaatacgcagatcatcaaaaagcaatggacgcgcttgcagaaggtgaagtcgatatagtgttatcacatttagttacttcgccgcctcttaataatgacattgctgcaaccaaaccattgataattacctttccggcgctggtaaccacccttcacgactcaatgcgaccgcttacctcaccaaaaccagtaaatattgctcgggtagcaaattaccccccagacgaggtaattcatcaatcatttccaaaagcaacaattatctcttttacaaatttatatcaggcattagcatccgtctcagctgggcacaatgattactttattggtagtaacatcattaccagcagtatgatttcccgctatttcactcactccttaaatgtagtgaaatattataactcgccgcgtcaatataattttttcttgaccagaaaagaatctgtcattcttaatgaagtactcaatagatttgttgatgctttaacaaatgaagttcgctatgaagtatcacaaaattggcttgatacaggaaacctggcctttctgaacaaaccattagaactcactgaacatgaaaaacagtggattaagcagcatcccaatttaaaggtgctggaaaatccttactcgcccccctattctatgacggatgaaaatggctcggttcggggcgttatgggggacattcttaatattattaccttgcaaacaggtttaaatttttctccgatcaccgtttcacacaatatccatgctggaacacagcttagccccggaggatgggatataatacctggcgctatttatagtgaagatcgagaaaataatgttttatttgctgaagccttcataacaacgccttacgtttttgtcatgcaaaaagcgcctgacagtgaacaaacattaaaaaaaggaatgaaagttgccattccatattattatgagctgcattcgcaattaaaagagatgtatccggaggttgaatggatacaggtcgataatgccagcgctgcatttcacaaggttaaggaaggtgaacttgatgctctggtcgcgacacagctaaattcgcgttacatgatcgatcattactatcctaatgaactttatcattttcttattcctggcgttccgaatgcatcgctttcgttcgcttttcctcgcggagaaccggaacttaaggatattattaataaagcactgaatgcaattcccccaagcgaagttctgcgcctgacggaaaaatggattaaaatgcccaatgtgaccattgacacatgggacctatatagcgagcaattttatattgttacgacattatccgttttattagttggcagtagccttttatggggattctacctgttacgctcagttcgtcgtcgtaaagtcattcagggtgatttagaaaaccaaatatcattccgaaaagcactctcggattccttaccgaatccaacttatgttgtaaactggcaaggtaatgtcattagtcataatagtgcttttgaacattatttcactgcggattactacaaaaatgcaatgttaccattagaaaacagtgactcaccctttaaagatgttttttctaatgcgcatgaagtcacagcagaaacgaaagaaaatcgaacaatatacacacaggtatttgaaattgataatggcatcgagaaaagatgcattaatcactggcatacattatgcaatcttcctgcaagtgacaatgcagtatatatttgtggttggcaagatattactgaaacgcgtgatctaattaatgcactcgaggtagaaaaaaataaagcgataaaggctaccgtagcaaaaagtcagtttctggcaacgatgagtcacgaaataagaacaccaataagctctattatgggcttcctggaacttctgtcgggttctggtcttagcaaggagcaacgggtggaggcgatttcacttgcctacgccaccggacaatcactcctcggcttaattggtgaaatccttgatgtcgacaaaattgaatcgggtaactatcaacttcaaccacaatgggtcgatatccctactttagtccagaacacttgtcactctttcggtgcgattgctgcaagcaaatcgatcgcattaagttgcagcagtacgtttcctgaacattacctggttaagatcgaccctcaggcgtttaagcaggtcttatcaaatttactgagtaatgctctcaaatttaccaccgagggggcagtaaaaattacgacctccctgggtcacattgatgacaaccacgctgttatcaaaatgacgattatggattctggaagtggattatcgcaggaagaacaacaacaactgtttaaacgctacagccaaacaagtgcaggtcgtcagcaaacaggttctggtttaggcttaatgatctgcaaagaattaattaaaaatatgcagggcgatttgtcattagaaagtcatccaggcataggaacaacatttacgatcacaatcccggtagaaattagccagcaagtggcgactgtcgaggcaaaagcagaacaacccatcacactacctgaaaagttgagcatattaatcgcggatgatcatccgaccaacaggctattactcaaacgccagctaaatctattaggatatgatgttgatgaagccactgatggtgtgcaagcgctacacaaagtcagtatgcaacattatgatctgcttattactgacgttaatatgccgaatatggatggttttgagttgactcgcaaactccgtgagcaaaattcttccttacccatctgggggcttacagccaacgcacaggctaacgaacgtgaaaaagggttaagttgcggcatgaacttatgtttgttcaaaccgttgaccctggatgtactgaaaacacatttaagtcagttacaccaagttgcgcatattgcacctcagtatcgccaccttgatatcgaagccctgaaaaataatacggcgaacgatctacaactgatgcaggagattctcatgactttccagcatgaaacgcataaagatctacccgctgcgtttcaagcactagaagctggcgataacagaactttccatcagtgtattcatcgcatccacggtgcggctaacatcctgaatttgcaaaagttgattaatattagccatcagttagaaataacacctgtttcagatgacagtaagcctgaaattcttcagttgctgaactctgtaaaagaacacattgcagagctggaccaggagattgctgttttctgtcagaaaaatgactaa

SEQ ID NO: 263 - DNA, 276 bp, Escherichia coli
atgaaagtaaacttaatacttttcagcttatttttattggtctctattatggcatgcaatgtttttgcattttccatttcgggtggtggaagtgagaggagctataaagagactgaaaaaacatcagcgatgacgaccacacactctacaaaacttcagccatcacaggcgattttgtttaagatgagagaagatgcgccaccattaaacctcacagaagaaatgccgcccccttttccgacaaaggcgaattatcttattcatcctgtgcgatag

SEQ ID NO: 264 - DNA, 378 bp, Escherichia coli
atgaaacttttaatcgcaatcatcctgatggtgctgactggtgtttgctttgcagatgttggtgattacaggctgaacggggaggataacgcaagaattgaatcagtcgttactgataactgtgaaaaaacagccgtattggtaggcggtgacaggcttgcgagggttgagatcgaatatatagcgacattgtgcaagccggtggctttggtgattatttacgacagatttgacgatatagcggcaatccctcttaaggtgacgttgaaaaaggtattgaaagagaatagcgatgaaaagattaacctattgaacaagatgggggatctggctggtcgtatcgttgcagagcagtatttaggcatgagttttgagtaa

SEQ ID NO: 265 - DNA, 948 bp, Escherichia coli
atgagacaaactctttgcgacggatatctggtcatttttgcgttagcacaggccgtgattctgctgatgctaaccccactttttacgggtatttcccggcagatacgcgcgcgtatgcactcccgccgcgggccggggatctggcaggattatcgcgatatccacaaactgtttaaacgccaggaagttgcgccgacatcttcaggtctgatgttccgcctgatgccgtgggtattaatcagcagcatgctggtgctggcgatggccttaccactgtttattaccgtttccccttttgcgggcggcggcgatctgatcacccttatctatcttcttgccctgtttcgttttttctttgctctttccgggctggataccggaagtccgtttgcgggagtcggtgccagtcgcgagttgacgctcggcattctggtcgaaccaatgcttattctctcactgctggtattggcgctgatagcaggttccacgcatatcgagatgatcagcaatacgctggcgatgggctggaactcgccgctaaccaccgtactggcgttactggcctgtggttttgcctgcttcattgagatgggaaaaattccctttgatgttgctgaagcagaacaggaattacaggaaggcccgctgaccgaatattccggtgccgggctggcgctagcgaaatgggggctggggctgaaacaggtcgtgatggcatcactgtttgtggccctgtttctgccctttgggcgcgcgcaagaactttctctcgcctgcctgctgacttcacttgtcgttacgctgctcaaggttttgctgatttttgtactggcctcaatcgcagaaaacacgctggcacgcgggcgttttttactcattcaccatgtgacctggcttggcttcagccttgctgcgcttgcatgggtcttctggttaaccggtctgtaa

SEQ ID NO: 266 - DNA, 957 bp, Escherichia coli
atgggtatctttaaggcaaaaaacccatgtaccaaaaatacaatttttacaacctctaatacattgatttatggtggttttatgatttctctgaatgatttttatgaacaaatttgtagaaaacgacgtgatctcgcctatcacatgtccgaatgcgaatgggcggtggatactgatgttctagaggaagatcatccggaaatacggattgagctaggcagaatgcgagagcaattctggagctctgagaaaataggtactcgtgtgaggttatattcctgcgatgtaccatgggaaacaaggcaccatacagtgaatgggcaactggagataaaggaagaatacactgaattatatgatccagctcaagaatgctggaaaaatctaagttcaaaccttaccaaggaaacgtttttacctcttgttatcgagccattttccattaatgacattttcaaggcacaccttatgttcgcctcaatctcttttttctggggaaaatctatcatgtctgaaaatgaaaacgttgcctttaaagcatttcatcgggctgcggagttatttgataagtgcataggtatgacttggtttaacatctctgtttgtaatcaaaaaaaattatcagaagtcaggcggagtgcaggaaagaagggtggcaaaagcaaagcggaagtgtaccatatcattcaactgaagttggttgagctaattaatgactctgttccgaatgatgggtggaaaaataaggttgtagcagttaatgaacttatcgaaccgctatgggattttattcaaatgtcagagtttgagataaataatcaaaataaaaaatatcgtgtagcaacaatgagtcaagatgctttggttgatactattttaaatcaatggtctttaaaaaatgaagatgtaaaacaagctttcgatagcgctgttcgtagaaaaaaaagaagtaaataa

SEQ ID NO: 267 - DNA, 1410 bp, Escherichia coli
atgttcaatggtcgtcctttccctgtagatgcatttcctaaaattatcaggaatgcaatttatgaagtggaacagcatacgcaggcccctcaaggtttgattgctgcttctgctcttggggtaatttctcttgcctgtcagaaccggattgatgtttgccgattgaataatctacgtggcccggtatcacttttcttaatgactctggctgaatcaggtgaacgtaagagtacggttgataaactgctgatgaagccattatatcaactggaagaggatttatttgaaaaatacacccacgatcttaccgcatggagaaatgatgaagcaatttttaatattgaaaaaaaagcactgatgtcaaaacttaaatcagatattcgacgtaacaaagatcacttggcaacaaatgaaagacttaaagaactacttacgacaaacccgaaagctccagtgagattcaaatttttatttaacgatgccacacctgcagctattaaagctcatctctgtgggcactggcgatcagtcggcatcatgtctgatgaagctgggatcatttttaatggttacacacttaacgagctgccgtttatcaataagatgtgggatggttcaatatttacggtggaaaggaaaaacgagcccgagaaattaattagagatgcaagaataacactgtcgctgatggtccagcctaatgtttttaagggttatatcgacaggaaaggagatatggcaaaggggattggattttttgcacggtgcctcatgtgccagcctgcttcaacacaaggtaacagaaaaatttccaacccaattttttcaaatgaacatttgccggtatttcaccaacgtcttatggaaattgttaatgagagcatcattaaaattaatgaaaataatcgcatctgcctccgattctctgcagaagcagaaagacattggatcgaattctacaaccaggtcgagtcagaaatgagaatgattggccttctttatgattttaaggattatgcttctaaaatggcggagaacatggcgaggcttgctgccttacttcattacttcagcggtgatggaggcgatatatctgttaccgcagtaaaagcagcagtggagatagtggcttggtatattgaagaatacatccgcttgttctctaaaaaagaagagttttctttagatgtttcagaagcagatgagctttattgttggataaaagattactgcacgcaaaaattttcttcctgcatcaagaaaaatattatcttacaatttgggccaaataaatttagaaatcgtgacaaggcaaatgaattaattagaatcttaatttcacaaaacaaaatatttatatcttcatggggtaaaacaaaaataataaacataactcattgtgttttttga

SEQ ID NO: 268 - DNA, 627 bp, Escherichia coli
atgacatacgatagtgaattcggatcacatgtatccctatatcgggatagaatcaaacaggttattgatgactccctaaacgaacatcttaactcaatgattctacgtgttgatctgcatgacccaattgatacagaaaatatggataacccattctttcaacccagggttgactctggtgctatatctcgctttaccagtgcgttaaaagcaaagcttaaacatgataagcatattaaaactcaacggaaagactggcctgatagtcgacattccactttacgttacgcatgggtcagagaatataccaaaaatagaaagcggcattaccatttgatactgtgtttcaatcaggatgcttattatcatttaggtgattacgacttaaaccgtaacacgttacgtacaatgataacgacagcttggtacagtgcacttggcatccctatagatagctcggggaagttagttaattacccgccaaatggcaaataccttctcaatcgtaaaagggacaactttgagcagacttatagcgatttgatgaatagggtggattacatgaccaaagtaaggactaaaatagtcggtgacggagaccgtaatttcggctgcagtcgcgggtaa

SEQ ID NO: 269 - DNA, 1704 bp, Escherichia coli
atggcttttgtatcagaaagagaaattgtaagaaagatatttagcaaaaaaattgactttacgatcttggcatttttctatatttcctctattttttttcttctttgtagtggcgttctctttcaatattttaccgctgccttcacaaaaggtaattgttatgaatgctcaatgaaacttgattacataaaacaattttatttttcactggaaaccgcatggtacctcatatctgctgttgcagtatttattgcatctgtttttatacagcatagaattaaagcttatttaacattattagctattacatggattgtactaacaataacagatgtggcgttaatacacgccttagacaatatagccatgaataatattttgttaaatatactatataatctttttggggcgattttattgtcactgtttatgtgtttatcaaattccctccttttccaccttaataagataaaacatattccaatgattttatcggcaatgattccattagtttccgcaataataatagccatactcataaccgctgttatatatttattgtttgcccggcaggcggtagagattgagatggatatatctgaaggttcagacatcgcatatgtaggtgtaaaagataatgaggaatcatttgggtttttaaatgataaaaaaacagacacaccaacgtatctggatgtaatcaaaaatggtagtttgatatataatgatacacagggtttaagtggtgctgatatttatattgtctccggttgttatgcccttccagatttacttcgcaatgtaccgcttgatgctaaaaaatcttttctgaatgtaaaaaagctagaaatcacacagaaacttccaatgatggggttcatacaaggtgaatccgctgatgtgatgcctaaagcagcatccaggttaagtttgagcaagcaagatgataaatttatgctagcctcaagtgttactgactctcaaataaaatttaaatcaaacaatgcacaattgatggttgctttcgcatttatgccaataacaacgaatggtattttacatgattatacatacgatataataataaatgataaaaaatataaaattgaaaatcatgttgcacctctatctaggcttgataaaaataagaagatgaagtgtgaataccagcaaatatcggatttaacaaatacgtataacattaatgcaaattacttaacgggttttttacttgtcctaaaaccagatgatattattaattacaacaatagcccttccgtactactcaagactgattttgcgttctataaaaaaacataccagaagcttgataaaatatatgatgacataagcaatggaaaattatcttcactgagagcaacaggtatctcccagtttagtatcaacgggaaacatttgtcgttaaggccagaatcggagattattatttctgaagggagtttgtatggactagttaataaaagcaaaaaaatcaaaatatatggcacagcagatcttgtttttgttgataacaagataatgaaccttcgtaaaataacttatttgcaatctaagctagaaatttttggttcttctattatggatatattaaagtatatatttggtttaggtctgctagcaatttctataaaattcattcattcttactttaagaatgatgtgaatgaaaatttattcttgtaa

SEQ ID NO: 270 - DNA, 330 bp, Escherichia coli
atgaacactctacctgctacaatttcgcaggcggcgaagccctgcctgtcgccagtggctgtctggcaaatgctactgacacgcctgctggaacaacactatggcctgacactgaacgacacgccgttcagtgatgaaactgttattaaggaacatatcgatgctggtatcactctggccgatgcagtcaattttctggtggaaaagtacgaactggtacgtatcgatcacagaggattttcgtggcaacaacagtctccatatatttccgtagtagatattctgcgagcaaggcgctctaccggcttgctaaaaactaatgtgaaataa

SEQ ID NO: 271 - DNA, 873 bp, Escherichia coli
atgcgctatttcatactaatgttcactttcgtatgttcctttgttgcagcccaaccaactattgtcccacaattacagcaacaagttacggatcttacgagtagcttaaactcacaagaaaagaaagaactgacgcacaagttagaatctattttcaataatacccaagtgcaaattgccgtattaattgttcccacaaccaaagacgagacaattgaacaatatgctacaagagtttttgacaattggcgtttaggagatgccaaacgtaatgatgggatactgatcgttgttgcctggtcggatcgcactgtccgcatccaggtaggttatgggctggaagaaaaggtaaccgatgctctggctggagatatcatccgtagcaacatgatacccgcatttaaacaacaaaaattagctaagggattagagctagctataaacgctttgaataaccaactcacttcacaacaccaatatccgactaatccttcagaaagtgaatcagcgtcttccagtgatcattattactttgctattttttgggtatttgcagtgatgttcttccctttctggttttttcatcaaggcagtaatttttgtcgcgcatgtaaaagtggagtctgtatttcagcaatctatcttttagatttattcctgttctccgataaaattttttccattgctgtattttccttcttttttactttcaccatatttatggtctttacctgtttatgtgtacttcagaaaagagcatctggtagaagttatcattcagacaacagcggttccgctggaggctcagatagcggcggatttagcggcgggggcggttcttctggaggtggcggcgcatccggccgctggtaa

SEQ ID NO: 272 - DNA, 633 bp, Escherichia coli
atggggctttgtagtcgttataaaagtcttacatgcaatagttgctcaatgcattgccaaataatgccagaagagtcaccgcgtttgcagtattgcgcaaactcgtgtttttgtatgtggcccgaagaaagttcatattttaatcgtggtgtggtagaaggtatcttaacaaaaaaccacaatgcgagattaagcggatatatttttgtcgatttttcagtaagttttttacgtctattccttgaaaaagactggattgactatcttgcaagtactgacatggggattgttttagtcagcgaccgcaatatgcaatcgttagctaattactggcgaaaacacaactcagcaatatctgctgtcatatataatgatgatggtcttgatgttgccaatgaaaagatcagacaactatttattggtcgttatttatcatttaccggaggtaacacattaactcagatggaattcaccataatggggtatatggtttctggttataatccatatcagattgctgaagttctggatatggatatccgtagcatctacgcgtacaagcaacgaatcgaaaagagaatgggtggtaaaataaacgaattatttattcgttcacattcggtccaacattga

SEQ ID NO: 273 - DNA, 810 bp, Escherichia coli
atgtactggattattaacgataatatcgagttctggcctgagcaccgaaaattaatatcggtacataacgccgatcttaacgtcgttctgacaacgccagccagtcgatgtttatcacttctacttgaagcttttcctgatgtggttgcacaacaagattttttcaccagagtctgggaagaagaaggtatgcgtgtgcctactaacacgttatatcagaacatatccattatcagacgcggatttcgcgctgttggtgatactacccactcgctaattgcaaccgtgccgagaagaggattcaagatccataatgacattaacatacaaaatcatgtaataaactcgtcaacagacgcacatacacacaatgccccacctgccataaaagttaatgcgggatacaaagagagcattggtggcgcaaagaatttcaataacaaaatcctcaaacatataaaaagtcatctaattatgttgagcgcatttgtcataggcgcatattctgcatattggctatggaataataatcaaccgaagccatttttcaaggattacaagactgttgcggaaattaatggctgccattttaatgtaacagaagatacaattgatgggttgaaagagttcgataaatataaaacacggatactggattcggggattaactgtaaaaaacatccgtggttatacttccctcttgcaaaatcctcaccggggatgattgttatggcatgcaataaaaactataaccaacatgaagtggcaaactgtttaaccctgtcttaccgtgaggttaatcgtgattga

SEQ ID NO: 274 - DNA, 426 bp, Escherichia coli
atggacattgaattttcgcagattcatgaaatggtctatatgcatgatattgtaaattcggactcgaaaaagaaaccaaggattccgttaaaaaaattccttaatgctgagaatgttctcacgcaaacaacatcatggacattaaattcaagatatgtgaatgttaattctgtcaataaagtcaacgtaaagagtaaagttaaaaacagttatatctcacgatctgtcaatgatgagtttagtttaacagatgatgaaatcaattcttttaaagaaacgttagtcctttcctctattgattcactgagtaaactggttcttaataatcctctttctgtattgtttacatcgactgtacgaaggaataataatcgagctaagatgaatgtcgagttcgactcatggatttgcaccagatgttgttga

SEQ ID NO: 275 - DNA, 492 bp, Escherichia coli
atgaagccacgaaatattaataatagcctaccactgcaaccattagttcctgatcaggagaacaaaaataagaaaaatgaagagaaatccgttaatccagttaaaatcacaatggggtctggtttaaattatattgaacaagaatctcttggaggaaaatatctaacacatgatttgtcaataaagatagcggatatttctgaagagataattcagcaagcaatattatctgctatgagcatatataaattttcgataacagatgatttaatgagtatggctgtaaatgaactcataaaactgaccaaaatagagaataatgtagacctgaataaattcactactatatgcacagacgttctatccccccgcgtcaccagacataataaagaaaaaaaaacaaacgacattctacccttctcaaaaatcccctttttaattttcattgaaaaaatggcaattgatactatgaatccaggtcatacacattaa

SEQ ID NO: 276 - DNA, 492 bp, Escherichia coli
atgagcacagaaacaattgaaatattcaataatagtgatgaatgggcaaatcaactaaaacacgcattatcgaaaggagaaaatctggcattactacatggtttaactcctgatatccttgatagaatatatgcatatgcattcgactaccatgaaaagggtaatataacggacgcagaaatttattataaattcttgtgcatttatgcgttcgaaaatcatgagtatctaaaagattttgcatcagtatgtcagcccaaaaagaaatatcaacaagcatatgacctttacaaactaagttacaattacttcccgtatgatgactattcagttatttatcgtatgggtcaatgtcagattggggctaaaaatatcgataacgcaatgcaatgtttctatcacattattaacaattgtgaggatgatagtgttaagagtaaagcgcaggcatatattgaactcttaaacgataattcagaagataatggctaa

SEQ ID NO: 277 - DNA, 1377 bp, Escherichia coli
atggacttagaaaataaattctcatatcattttcttgagggattaacgctcacggaagatggaattcttactcaaggaaatgagcaagtttatattccacagaaagagttaggtgtattaatagtattacttgaatccgctggtcatgttgtactgaaagatatgatcatcgaatcagtatggaaaaatattattgttagtgacgagtccctgacaagatgtatctattctttgcgctgcatttttgaaaaaattggctatgatcgttgcatagaaacaatctaccggaaaggttatcgtttcagcgggcaggttttcaaaactaaaattaatgaagataatacttcagactattccatagctatattccctttcactacttcattgaatacactggatccattaatacttaatcaggaattagtgcaaatcatttcaaataaaaaaatcgatggtctctatacctatccgatggctgcgacaaatttttgtaatgatcacatatctcaaaattcattcttgagcagattcaagccagattatttcgttacaggaagaataaaccagaataatgcagtgaacactttatacattgagttgatcgacgctaaaaaccttttcctcatcgccagtaatcatctccctgttgatgaactacataatacatcacaatttattatagataatatccttcaaacggtacataaaccagaacgatctgtaagattagctaagcaggaccaaggatataagaatcattatttatcagatgaaatgttagccggaaagaaagaactttacgacttcacccctgaaagcatttacagggccatgactatatttgatagattacaaaataaaagtgatatacagacgctaaaaacagaatgttattgccttctagcggaatgccatatgtctttggcacttcatggaaaaagtgaacttgaacttgctgctcaaaaagcattagagcttttagattatgtatcagacataaccactgtcgatggaaaaattttagctattatgggactgataactggtctgtctggacaagcaaaagtatctcatatcttatttgaacaggctaagatacactcaactgatatagcctctctctactactatagggcactagtccactttcataatgaaaaaattgaagaggcaaggatttgtatagacaaatcactacaactcgaacccagaagacgaaaagcagttgtgataaaagaatgtgtagatatgtatgtgcctaacccgctcaaaaacaacattaaactctactataaagaaactgagagtgaaagccatcgagttataattgacaacattttgaaattaaagcagctgacgagaatttgtatgcgataa

SEQ ID NO: 278 - DNA, 219 bp, Escherichia coli
atgactaatccaatcggtatcaataatttatctcaaagttcaaatatagcgaatgcaacgggtgatgaagtcgtatcattagataaacacatcaacaccagtgctactgatacagatcaaatacaagcatttatagtttcaacatggatggcgccttttcaaaatgatatgtattcagaagataatcctatctcaccttactataaaattgagtggtag

SEQ ID NO: 279 - DNA, 504 bp, Escherichia coli
atgcgctcaccaaaagttaaattcttaaccatcttcacgttttgtatatttattacaaaaatgtctttcgccagcaactcttgctctaatgaagcaggaacaatgttcagaatcgaaccaaatttaattaaagctatcgctcttgttgaaagcaatctaaaaaaggatagcataggcaagaacagagataagaataacaatataaagagtttagattattggttaatgcagataaaccagatgcatattcccctgttaaaaaaacgtggaataataaaagatgaacgagatttgttagataacccttgtctgaacattaaaataggaaccgagattttatataaccatttttcacgttgtggagtaacgtggcaatgcctggggacttataatgcgggttttgcaatggataaccaaaaaaagagacagcaatatgccccaaaaatatatattgtatataccaggcttaatgaactagacaatcgtaaggcttcagcaaaatga

SEQ ID NO: 280 - DNA, 708 bp, Escherichia coli
atgcgaaaaaaaatagagatgagcttgataaaatctcctgcaaatggtgttgtgattaaaagaaaaatttctgatggattgaaagaaatagtttctcttaaagaaaaaatccttcttgaaaccaccgcaaaaattcagagtattgaggaaaagagagaagaaaaatttattcaaggttattatgatggctatacaaaaggcattattgatgagatggataattttatacccttgataagcttgctatgctcagaacttgaaaaaaaaagaataaacatgataaacgatctgaagagtatattgttaaaaccttcagaagaagttgatgtttttatcaaaatttttgaaagttgggtaacaaaattaccatcaatatcaggtcctgtaaatctccatatacctaccagtttcaaagataagtctcttgaagtagagtcatattttgtcgacaaatcaatatggaatgtccatattacatttcatgatgataagcgttttgtgttttttaccgatcaatttattgctgaatttagtccgcaggaatttgtggataattgtgagcaatatttaattaataatcattgtttctcccctgacaaggttaacgaaatctgcgaacaagccagacattatttagttgaaaaaatgtttgaaacacattctttggatatgaataattctgttttggcaagccctgaggacttatag

SEQ ID NO: 281 - DNA, 1191 bp, Escherichia coli
atgatgaaaactgttaatgagctgattaaggatatcaattcgctgacctctcaccttcacgagaaagattttttgttaacgtgggaacagacgccagatgaactgaaacaagtactggacgttgccgcagcattaaaagcactgcgtgctgaaaacatctcaaccaaagtctttaatagtggattaggtatttccgtattccgcgacaactccacccgtacccgcttctcttatgcttccgcgcttaacctgctcggccttgcacaacaagatctcgacgaaggcaaatcacaaatcgctcacggcgaaaccgtgcgtgaaaccgccaatatgatctccttctgcgccgacgctattggtattcgcgacgatatgtatctgggcgcaggcaacgcctatatgcgtgaagttggcgctgcacttgatgacggttacaagcagggtgtactgccacagcgtccggctttagtgaacctgcaatgcgatattgaccacccgactcagtcaatggctgacctcgcgtggttacgtgaacactttggttcactggaaaacctgaaaggtaaaaaaatcgccatgacctgggcctactctccaagctatggcaaaccgctctctgtaccacaaggcatcatcggtctgatgactcgcttcggtatggatgtcaccctggcccatccggaaggctacgacctgatcccggatgtggttgaagtggcgaaaaacaatgctaaagcctccggtggtagcttccgtcaggtcaccagcatggaagaagccttcaaagacgcagacatcgtttatccgaagtcatgggcaccttacaaagtgatggaagagcgtactgaattgctgcgtgcgaacgatcacgaaggcttaaaagcactggaaaaacagtgtctggcacagaacgcgcaacacaaagactggcattgtactgaagagatgatggaactgacccgtgatggcgaagccctgtacatgcactgcctgccagctgatatcagcggcgtatcctgtaaagaaggtgaagtgactgaaggcgtattcgaaaaataccgtatcgctacctacaaagaagccagctggaagccttatatcatcgccgcgatgatcctgtcccgtaaatacgccaaaccaggtgcactgctcgagcaactgctgaaagaagcgcaagaacgcgtgaaataa

SEQ ID NO: 282 - DNA, 444 bp, Escherichia coli
atgcggcttagtgattattttccagaatcatcaatctcagttatacattcagcaaaagattggcaggaagctatcgatttctcgatggtatcattgctggataaaaactatatcagcgagaattacattcaggcaattaaagattccaccattaacaatggcccttattatattctcgcaccaggcgtggcaatgcctcatgcgcgaccggaatgtggggcgcttaaaaccgggatgtctttgacattacttgaacaaggtgtttattttccggggaatgacgaaccaattaaattactcatcggactctctgctgccgatgccgattcgcacattggcgctattcaggcgttaagtgaattactgtgcgaagaagaaatactcgaacaactcttaacagcatcatcagaaaaacaattagcggacattatcagccgcggataa

SEQ ID NO: 283 - DNA, 258 bp, Escherichia coli
atgaaaacgattttcaccgtgggagctgttgttctggcaacctgcttgctcagtggctgcgtcaatgagcaaaaggtcaatcagctggcgagcaatgtgcaaacattaaatgccaaaatcgcccggcttgagcaggatatgaaagcactacgcccacaaatctatgctgccaaatccgaagctaacagagccaatacgcgtcttgatgctcaggactattttgattgcctgcgctgcttgcgtatgtacgcagaatga

SEQ ID NO: 284 - DNA, 333 bp, Escherichia coli
atgttaaagcagaaaattaaaacaatatttgaagcattgctatatataatgcttacttattggttaatagattctttttttgctttcaataagtatgactggatgcttgagtcgggaggaaatatttgcagtataccttccgtttcaggcgaagatcgtatattgcaagcaatgattgcagcattttttcttcttacgccacttattattcttatcttaagaaaactctttatgcgggaaatgttcgagttttgggtatatgtattctcgctcggtatttgtctggtttgtggttggtggcttttttggggacggtttatattttgctattag

SEQ ID NO: 285 - DNA, 750 bp, Escherichia coli
atgcgctacttaaatacaaagaatatcattgcagcaggagtattactctcctgtatgagcagcattgcctggggtgccatcatcccggatcgtacccgtatcataatgaatgagtcagataaaggcgaagcattaaaacttactaatcaaagtaaaaacctgccctatctggcccaaacatggatagaagatacgaaaggcaataaatcgcgtgactttattgtcactgttcctccaatggtgcgtttaaatcccagtgagcaaattcaaataagaatgataactcaggaaaaaattgctcaacttcctaaagacagagaaacgctcttctattttaacgtgcgagaaataccgcccaaaacagataaaaaaaatgtgatgcaagtcactatgcagcacgcattgaaactattctggcggccaaaagccattgaattagaagacgatggggtaatgacttacgaaaaagttgaaatcattcgtagaaatgacggttcgatccgctttaacaataagatgccttatcacgttacgctgggttatatcggaacaaatggggtaacgatgttaccacaaacgcaaagcttaatggtaaccccttttagctatgcaaatacgcagtttaaaaatgttccgtcaacttttcaggtgggttatatcaatgactttggtggattaagtttttatgaaataaactgccctgtagtaaataacatttgtaatatttctgtagccaaccgagatcaataa

SEQ ID NO: 286 - DNA, 1065 bp, Escherichia coli
atgcgctacttgttaattgttattactttttttatgggttttagttcattacctgcatgggcaatggactgctatgctgaacatgaaggtggaaataccgttgtcattggttacgtaccaagaatctctatccccagcgatggtaaaaaaggtgataaaatctggcaaagcagtgaatattttatgaatgttttctgtaataatgcactaccaggcccatctccaggagaagaatacccatctgcatgggcaaatataatgatgttgttagcatcaggtcaagacttttataatcaaaactcttatactttcggtgtaacttataatggggttgattatgattctacatctccactacctattgcagcacctgtatgtattgatataaagggagccggaaccttcgggaatggctacaaaaagcccgcagtctgtagtggcggtcctgaaccgcaattatcagtaacttttccagtacgagtgcagctatatattaagctagctaaaaatgccaataaagtaaataaaaaacttgtattacctgacgaatatatagcacttgaatttaaaggtatgagcggagcaggtgctatagaagtagataaaaatctgaccttcaggattcgcggattaaataacattcatgtccttgactgctttgttaatgttgatctggaaccagctgatggcgttgtcgactttggtaaaataaattcccgaacaattaaaaataccagcgtgagtgagacgtttagcgtagtcatgaccaaagatccgggtgcggcctgtactgagcagtttaatattttagggagttttttcactacggatattttgagtgattatagccatctggatataggtaatggtctgctattgaagatatttcataacgatggaacagcaacggaatttaaccgcttctcacaatttgcttctttttcatcgtctagtgcgccttcggtcaccgcaccattcagggcagaactgagtgcgaacccggcagaaacggttgttgagggaccgtttagtaaagacgtaatcctgaaaatcacctataactag

SEQ ID NO: 287 - DNA, 219 bp, Escherichia coli
atgagcaagttctcaaattttattataaataaaccattttcagtgataaataatgcggcatgtcacattttttcacgctatttgttggagaacaaacatttattttatcaatattttaaaatttcgaatacatgtattgatcatctcgaacaattgattaacgtcaactttttctcttctgacaggacgtcattttgtgaatgcaatcgttttccataa

SEQ ID NO: 288 - DNA, 540 bp, Escherichia coli
atgaaaggcttcccaattgcgcatatttttcacccttcaatcccgccaatgcacgcagtggttaacaatcacaatagaaatattgattattggacggtaaaaagaaagtttgcagaaattgtctccaccaatgacgttaataaaatttacagtataagtaatgaactgcggagagtattatctgcaataactgcattgaatttctatcatggcgatgttccttctgtcatgatccgaatccaaccggaaaatatgagtccattcattatagatatttctacaggagaacatgatgattatatcatacaaacattagatgtaggcacttttgcaccttttggtgaacaatgtacttgctcagccgtcaataaaaaagagctggaatgtattaaggagacgatttctaagtattgtgcaaaattcacccgaaaagaagccatcttaaccccccttgtgcactttaataaaaccagcattacttcagattgttggcaaattctctttttttcacccgatcattttaataatgatttttattga

SEQ ID NO: 289 - DNA, 1188 bp, Escherichia coli
atgttccctgtttcatcaattggtaatgatattagtagtgatttagtccgtcgaaaaatgaatgaccttcctgaaagcccaacaggaaataacctcgaagcactagcaccaggtatagaaaaactaaaacagacctctattgaaatggtcactttacttaacacgttacaacctggtggaaaatgcattatcactggtgattttcaaaaagaattagcgtacttacaaaatgtaattctttataatgtctcgtctcttcgtctggattttttaggttataacgcccaaattattcaacgatcggacaatacttgtgaacttaccattaatgaaccgttaaaaaaccaggaaatatccacaggtaatatcaatattaattgcccattaaaagatatttacaatgaaatcaggaggttaaacgtaatttttagttgtgggactggagatatcgttgatctatcctctctggacttacgtaatgtcgatttagattattatgatttcacagataaacatatggctaatactattttaaatccttttaaattgaattcaacaaattttactaatgccaacatgtttcaggttaattttgttagttcaacacaaaacgccacaatctcctgggattatttactaaaaataacgcctgttttaataagcattagcgatatgtattctgaagaaaaaatcaagtttgtcgaaagttgtttaaatgagcctggagacattaccgaagaacaattaaaaattatgagatttgcaattataaaatctataccaagggcaactcttacagataaattagaaaatgaattaacaaaagaaatatataaaagctcatcgaaaatcatcaattgcttgaacagaattaaattaacagagatgaaagaattctcatcagaaaaaatatatgattacatcgatataatcattgaagattatgaaaataccaaagaaaatgcttatctggtcgtcccccaaattaattatactatggatttaaacatagaagactctagctcagaagagttactttcagataataccctcgagaaagacgaaaattctccggacaatggctttgaggtcggggaatataacacatatgaagcatataactcagagaagcaatattttaccagagaggactatacgtatgattacgaccttttaaatgcaatatag

SEQ ID NO: 290 - DNA, 477 bp, Escherichia coli
atgaccagtccaaatattctcttaacccgtattgataaccgtctggttcacggtcaggttggcgtgacctggacatccaccatcggtgcaaatctgctggtagtcgtggatgatgttgtcgctaacgatgatattcaacagaaattaatgggtattaccgcggaaacctacggctttggcattcgtttctttactatcgaaaaaaccattaacgtcatcggcaaagctgcaccacatcagaagatcttcctgatttgccgtacgccacaaacggtacgtaaattggtagaaggtggtattgacctgaaagatgtcaacgtcggcaatatgcatttctcggaagggaaaaagcaaatcagcagtaaagtttatgtcgatgaccaggatctcacggacttacgttttattaaacaacgtggcgtgaatgttttcattcaggacgtccctggcgatcaaaaagaacaaatccctgactaa

SEQ ID NO: 291 - DNA, 2517 bp, Escherichia coli
atgccacaacgacaccaccagggacataaacgcacaccgaaacagttggcgctcatcatcaaacgttgtttgccgatggtgctcactggcagcggcatgctttgcactaccgctaacgccgaagagtattatttcgaccccattatgctggaaaccacaaaaagtggtatgcaaacaaccgatctgtcgcgtttttcaaaaaaatatgcacaactaccaggaacttatcaggttgatatctggctgaataaaaagaaggtttcacagaaaaaaattacatttaccgccaatgcagagcaacttctgcagccacagtttacggtagaacaactacgtgagctgggtattaaggtggatgaaatcccggcgctggctgaaaaagatgacgatagcgtgatcaactcgcttgaacaaatcattcccggtacagctgctgaatttgatttcaatcatcagcaacttaatttgagcattccccaaattgcactgtaccgtgatgcaagaggttacgtctccccttctcgttgggacgatggtataccaacgctgtttaccaactactcgtttacaggttctgataaccgttaccgccagggcaatcgtagccaacgacagtacctgaatatgcaaaatggtgctaattttggcccctggcgattacgcaactattccacatggacacgcaacgatcagacatcaagctggaataccatcagtagttatttacaacgtgatatcaaggcgttgaagtctcagttgcttctgggagaaagcgccaccagcggcagtattttttccagctacacctttactggcgtgcaactcgcttccgacgataatatgttgccaaacagccagcgcggatttgccccaacggtacgcggtatcgcaaacagtagtgcaatcgtgactatcaggcaaaatggttatgtgatctatcaaagcaacgtgtcagcgggtgcctttgaaattaacgatctctacccctcttccaacagcggcgatttagaagtcacgattgaagaaagtgacggtacacaacgtcgctttatccagccttattcttcattacccatgatgcagcgacctgggcatctaaagtatagcgcgaccgctggacgctatcgcgctgatgcaaacagtgatagcaaggaacccgaatttgctgaagccacggcaatatatggtttgaataatacttttacgctgtatggcggcctgctcggttctgaagattattatgcgctggggatcggtatcggcggcacacttggcgcactgggcgcgttgtcgatggatatcaacagagctgacacccaattcgataaccagcactcttttcatggctatcaatggcgtacgcagtacatcaaagatatcccggaaaccaacaccaatatcgctgtcagctactatcgctataccaacgatggctattttagttttaatgaagccaatacccgcaattgggactataacagtcgccaaaaaagtgaaattcaattcaacatcagccagacaatatttgatggggtaagtctgtatgcctccggttcgcagcaagactattggggcaataacgataaaaacaggaatatctctgttggggtttccggccagcaatggggagttggttacagcctgaattatcaatacagccgctacactgatcaaaataatgaccgcgcactctctttgaatctcagtattccgttagaacgctggttaccgcgtagccgggtttcctatcagatgaccagccagaaagatcgcccaacccaacatgaaatgcgtcttgatggctcactgctggatgatggtcgcctgagctatagcctggaacaaagtctggatgacgataacaaccataacagtagcctgaacgccagttaccgttcaccttatggcaccttcagtgccggatacagctacggtaatgacagcagccaatacaattacggcgttaccggcggcgtggttatccatcctcatggcgtgacgctctcgcaatatctgggcaacgcttttgcgcttatcgatgctaacggagcatctggcgtgaggatacaaaactatccggggattgctaccgatccttttggctatgcagtggttccttatctcacaacttatcaggaaaaccgtctctcggtagatactacgcagctgcccgataacgtcgatcttgaacaaacaacacagtttgtggtgcccaacagaggtgcaatggtagcggcgcgtttcaacgccaatatcggttatcgcgtacttgttacagtcagcgatcgcaacggtaaaccgttgccctttggcgctcttgccagcaacgatgatacggggcaacaaagtatcgtcgatgagggcggcatactatatctctctgggatatcgagtaaatcacaaagctggactgtacgctggggaaatcaggcagatcaacaatgtcagtttgctttcagtacaccggattcagaacctacaacctctgtattacaaggcacagcgcagtgccattaa

SEQ ID NO: 292 - DNA, 675 bp, Escherichia coli
atgctcagacacattacattcactgtatttataacaacatcaatgaataccttagccacagggatggttcctgaaacatcagtattgctggttgatgaaaagcgtggtgaagctagtattaatattaagaatacagatgatcatccttcattgctttacaccaccattgttgatttgcctgaaagcaataaatcaattcgtttaatcccgactcagcccgttattcgtgttgaagccggtcaagtacaacaggttcgatttttacttcaggcgactgttcctctgcaatcagaagagctgaaacgcgtaacgttcgaaggtattccaccaaaagatgacaagagcagcagagttactgtttcaattcgtcaggatctacctgtactgatccacccggcttccctgccggaagagcgagagacctggaaattcctggaatggcgtaaaaatggcgaccaaattgagattagcaaccccagtaattatgtcgttcgtatgaccttacaatttaaaacgctcccttcaggaaaaacgggggctataaataagacctattttctaccacacaccagtacaactactgcattaacaaacgctacggatacaaaagtcgagttttacccagccagccgatatggttatcgcggtaataaatatgtcactgacttaaaataa

SEQ ID NO: 293 - DNA, 663 bp, Escherichia coli
atggcaaaaagaaccaaagccgaagctctgaagacccggcaagaactgattgaaactgccatcgcccagtttgcgcagcatggcgtaagcaagacgacgctcaacgacattgccgacgccgctaacgttacgcgtggcgctatctactggcacttcgaaaacaagactcaactgtttaatgagatgtggttgcaacagccttcattgcgggagttaatccaggaacacttgacggctggattagagcatgacccgtttcaacaattgcgtgaaaaattgattgtcggcttgcaatatattgccaaaattccccgccagcaggcgttgctgaaaatcttatatcacaaatgtgaatttaatgatgagatgctggccgagggagtgatacgcgaaaagatgggctttaatccgcagactctccgcgaagtattgcaggcgtgtcagcaacaaggttgtgtagcaaataacctcgatttagatgttgtgatgattattattgatggtgccttcagcggaattgttcaaaactggttaatgaatatggcgggttatgatctttataaacaagcccccgctctggtcgataacgtattaagaatgttcatgccagatgaaaacataacgaaattaattcatcaaacgaatgaattaagtgtcatgtaa

SEQ ID NO: 294 - DNA, 1179 bp, Escherichia coli
atgagtaatattgtttacctgacagtaacgggagaacaacaaggaagcatctccgcaggttgtgggacttctgagtctacaggtaatcgttggcagagcgggcatgaggatgaaatatttacattctcactcttaaataatattaataatacggggcttggttcacagttccatggtataacattttgtaaattaattgataaaagcactccattatttattaattccattaacaataatgaacaattatttatgggatttgacttctatcgaataaatagatttggtagattggaaaagtattattatatacaactaagaggcgcttttttatcggctattcatcaccagatcattgaaaaccaactggatacagaaacaataactattagttatgaatttatcctctgtcaacatcttatcgcaaataccgagttcagctatttggcactccctgaaaattataaccgtttgtttttaccaaattcaaaaaaccaaacaaataatcgtttcaaaacgttaaacagcaaagctattggcaggctacttgctgctggtggcgtatacaatgggaacattgaaggattcagagatactgcggaaaaactgggtggagatgcaataaaaggctatgatcaaatactaaatgaaaaaacagcgggcatagcgatagcaacagcatctattcttttaacaaagcgttctaatgttgatacatatacagaaataaatagttacttaggcaaacttagaggtcaacaaaaacttcttgatggtatagacataatagaaataatatacattaagagaccttcaaaagacttagctaacttacgaaaggagtttaataaaactgtaagaaaaaattttcttatcaaacttgcaaaaacctccgaagcatctggaagattcaacgccgaagaccttttaagaatgagaaagggcaatgttcctctaaattataatgttcaccataaactatctctagatgatggtggtactaatgatttcgaaaatttagtattaatcgaaaacgaaccatatcataaagtttttactaacatgcaatcacgaatagctaagggaatattagtaggtgaaagcaaaatcactccctgggccattccatctggctcaatttatcctcccatgaaaaatattatggaccacacaaaatga

SEQ ID NO: 295 - DNA, 495 bp, Escherichia coli
atgatgactaaaacccaaataaataaattaataaaaatgatgaatgatttagactatccatttgaagcaccgctcaaggaatcatttattgaaagtataatccaaatagaatttaattctaattcaactaattgcctggagaagttatgtaatgaagttagtattctttttaagaatcaacctgattatcttacttttttaagagcaatggatggattcgaagttaatggattacgattatttagcctctcgattccagaaccttcagttaaaaacctttttgccgtaaatgaattttatagaaataatgatgatttcataaaccctgatctacaagaacggttagtgatcggggattatagcatttcaatatttacttatgacattaaaagtaacttttttgaaattagagataatattggcacagaaaatatattcagttcgtttagtgatttctcttcattcttaaacgaaatcatggacagttgttcataa

SEQ ID NO: 296 - DNA, 4236 bp, Escherichia coli
atgagcggaaaaccggcggcgcgtcagggtgacatgacgcagtatggcggtagcattgttcagggttcagccggggtacgtattggtgcccccaccggcgtggcctgttcggtgtgccccggcggagtgacgtccggccatccggtcaatcccctgctcggtgcaaaggtccttcccggtgaaaccgacatcgccctgcccggcccgctgccgttcatcctctcccgcacctacagcagttaccggacaaaaacgcccgcgccggtggggagcctcggccccggctggaaaatgcctgcggatatccgcttacagctgcgcgataacacactgatactcagtgataacggcggcagaagcctgtattttgagcacctgtttcccggtgaggacggttacagccgcagcgagtcactgtggctggtgcgcggcggcgtggcgaaactggatgaaggtcaccggctggccgcactctggcaggcgctgccggaagaactccgcttaagtccgcatcgttatctggcgacaaacagtccgcaggggccgtggtggctgctcggttggtgtgagcgggtgccggaagcggatgaggtgctgcctgcgccgctgccgccgtaccgggtactgaccgggctggtggaccgcttcgggcgcacacagacgttccaccgcgaagccgccggtgaattcagcggcgaaatcaccggcgtgacggatggtgcctggcgtcacttccggctggtactgaccacgcaggcgcagcgggcagaagaagcccggcagcaggccatttccggcgggacggaaccgtccgcttttcctgataccctgccgggttacaccgaatatggccgggacaacggcatccgtctgtctgccgtgtggctgacgcacgacccggaatacccggagaatttacctgccgcgccgctggtgcgctatggctggacgccacgcggcgaactggcggtggtgtatgaccgtagtggcaaacaggtgcgcagctttacttacgatgataaataccggggccggatggtggcgcaccgtcacacgggccggccggaaatccgttaccgttacgacagcgacgggcgggtgacagaacagctaaacccggcaggcttaagctacacgtatcagtatgagaaagaccgcatcaccatcaccgacagcctggaccgccgtgaagtgctgcacacgcagggcgaagccgggctgaagcgggtggtgaaaaaggaacacgcggacggcagcgtcacgcagagtcagtttgacgccgtgggcaggctcagggcacagacggatgccgcaggcaggacaacagagtacagcccggatgtggtgacgggcctcatcacgcgcataaccacgccggatggcagggcatcggcgttttactataaccaccacaaccagttaacgtcagccaccgggcctgacgggctggaattgcgccgggaatatgatgaattgggccgtctgattcaggaaactgcccctgacggcgatatcacccgctaccgttatgataatccacacagtgacttaccctgcgcaacggaagatgccaccggcagccggaaaaccatgacgtggagccgttacggtcagttgctgagcttcaccgactgttccggttatgtaacccgttatgaccatgaccgcttcgggcagatgacggcggtgcaccgcgaggaagggctgagtcagtaccgcgcatacgacagccgtggacagttaattgccgtgaaagacacgcagggccatgaaacgcggtatgaatacaacatcgccggtgacctgaccgccgtcattgccccggacggcagcagaaacgggacacagtacgatgcgtggggaaaggccgtccgtaccacgcagggcgggctgacgcgcagtatggaatacgatgctgccggacgggtcatccgcctgaccagtgaaaacggcagccacaccaccttccgttacgatgtacttgaccggctgatacaggaaaccggctttgacggccgcacacagcgttatcaccacgacctgaccggcaaacttatccgcagcgaggatgagggtctggtcacccactggcactatgacgaagcagaccgcctcacgcaccgcaccgtgaagggtgaaaccgcagagcggtggcagtatgacgaacgtggctggctgacagacatcagccatatcagcgaagggcaccgggtggcggtgcattacaggtatgatgagaaaggccggctgaccggtgagcgtcagacggtgcatcacccgcagacggaagcactgctctggcagcatgagaccagacatgcgtacaacgcgcaggggctggcgaaccgctgtataccggacagcctgcccgccgtggaatggctgacctacggcagcggttacctggcaggcatgaaactcggcgacacaccgctggtggagtacacccgcgaccgcctgcaccgggaaacgctgcgcagcttcggccgttatgaactcaccaccgcttatacccctgccgggcagttacagagccagcacctgaacagcctgctgtctgaccgcgattacacctggaacgacaacggcgaactcatccgcatcagcagcccgcgccagacccggagttacagctacagcaccaccggcaggctgaccggcgttcacaccaccgcagcgaatctggatatccgcatcccgtatgccacagacccggcaggtaaccgcctgcccgacccggagctgcacccggacagcaccctcagcatgtggccggataaccgtatcgcccgtgacgcgcactatctttaccggtatgaccgtcacggcaggctgacagagaaaaccgacctcatcccggaaggggttatccgcacggatgatgagcggactcaccggtaccattacgacagtcagcaccggctggtgcactacacgcggacacaatatgaagagccgctggtcgaaagtcgctatctttacgacccgctgggccgcagggtggcaaaacgggtgtggcggcgtgaacgggacctgacgggctggatgtcgctgtcacggaaaccgcaagtgacctggtacggctgggacggcgaccggctgaccacgatacagaacgacaggagccgcatccagacgatttatcagccggggagcttcacgccactcatcagggtcgaaactgccaccggtgagctggcgaaaacgcagcgccgcagcctggcggatgcccttcagcagtccggcggcgaagacggtggcagtgtggtgttcccgccggtgctggtgcagatgctcgaccggctggaaagtgaaatcctggctgaccgggtgagtgaggaaagccgccgctggctggcatcgtgcggcctgaccgtggagcagatgcaaaaccagatggacccggtgtacacgccggcgcgaaaaatccacctgtaccactgcgaccatcgcggcctgccgctggcgctcatcagcacggaaggggcaacagcgtggtgcgcagaatatgatgaatggggcaacctgctgaatgaagagaacccgcatcagctgcagcagcttatccggctgccggggcagcagtatgatgaggagtccggcctgtattacaaccgccaccgctattatgacccgctgcaggggcgatatatcactcaggatccgattggactgaaggggggatggaacctgtatggatatcaattgaatccgatatcagacatcgaccccctgggtttatctatgtgggaggatgcaaaatcgggggcatgtactaatggtctttgcggcacactatccgctatgataggtccagataaatttgattctatagatagcaccgcatatgacgccttaaataaaataaatagccaatctatttgcgaagataaagagttcgctggtttaatatgtaaggataatagtggcagatatttctcaacagcacctaaccgaggagaaagaaaaggatcatatccattcaatagcccttgccctaatggtactgagaaagtatcagcttatcatactcatggtgcagatagtcatggagaatattgggacgaaatattttcaggtaaagatgagaaaatagttaaaagtaaagataacaatatcaagtcattttatttaggtacgcccagtggtaattttaaagcaatagataaccacgggaaggaaataacaaacagaaaaggattacctaatgtctgcagagttcatggtaatatgtaa

SEQ ID NO: 297 - DNA, 384 bp, Escherichia coli
atgtctgcagagttcatggtaatatgtaaaaaaatattgtttaggaactgtgtcattgtatctttgtttgtttttacatacaacacatgggcgcagtgtaataataatattaaaataatgcgcaagtatgaaagtgaaggtaaatataccgttagaaatttggttaaaaataaagctatagcattggaattagctgagatatatgttaagaatcgttatggacaggatgccgcagaagaagaaaaaccatacgaaatcactgagttaacaacaagttgggttgttgaaggtaccattcactcagaccaaattgctggtggggtttttattatagaaataggcaaaaatgatgggagaattctgaattttggccacggaaaataa

SEQ ID NO: 298 - DNA, 1623 bp, Escherichia coli
atgaaaattggaactgtggcaggcactaacgacagtacaacgacaatcgcaacaaatgatatggtgcaagagcatgttaccaacttcactaaagaactgtttgggtatattgcaaatggtataggtgatgatatatcaagtattgccaggacaatgctcggtgaggttgtggaaaaaatagatgattggcaaatagaacggttccaacaatctattcaagatgacaaaatttcatttaccatacaaacggatcattcagaaaaatatagtatgctatcgggcatgcgtgctcatattctacgtaggaataataattatcagtttattgtgacaattaatagcaaaaattacggttgctctcttgataataccgatattaattggtgcagtattgtttatttacttaataatatgacagtaaatgataatgctaatgatgttgcagttactgagtcgtacaaacccatctggaactggaaaatatcgcaatataatgtatctgatattaaattcgaaacaatgataaaaccccagttcgctgacagaatctatttctccaattgtttacccgttgatcccacaagtaccagaccaacctattttggtgataccgatggctcagtcggtgcagttttgttcgcgcttttcgcaacgggacatttgggaatcatggctgaaggagaaaatttccttagccagttgcttaatatagaagatgaagttctcaacgtattgctaagggagaactttaatgagcaacttaacactaatgttaatacaataatcagtatcctgaacagaagagacattattttagaaagtcttcagccttatttagttattaataaagacgctgtgacgccatgtacgtttctgggcgaccaaaccggcgatcgatttagcaatatctgtggtgatcaatttatcatcgatttgttaaaacgcataatgagtatcaatgaaaatgttcatgtattagctggaaatcatgaaacgaattgcaatggtaactatatgcagaacttcacgcgtatgaaaccactcgatgaggatacctactctgggataaaagattatcctgtatgtttctatgaccccaaatacaaaataatggcaaatcatcatgggataacttttgatgatcagcgaaaacgttacattataggaccgataacagtctctattgatgaaatgaccaatgctctcgatccggtcgaattagcggcaattatcaataaaaagcatcatgctataattaatggcaaaaagtttaaaactagccgggctatctcttgtcgatcctttaatcgttatttttctgtttcgacagattacagacctaaacttgaagcactattagcatgttcacaaatgttaggtataaatcaagttgttgcacataacggaaatggtggaagagaacgcataggcgaaacggggacagttttaggtcttaacgcccgtgacagtaaacatgctggaagaatgttcagcatgcataattgccaaattaaccctggtgcagggcctgagataaccactccctggaagtcttaccagcatgaaaaaaacagaaatggacttatgcctttgattagaaggcgcacaatgttacagctctga

SEQ ID NO: 299 - DNA, 1224 bp, Escherichia coli
atgtcaattgactttaccccaggtataataaatacatatcacggcgatatttataactgcacaacaaataccgataatgctaaaacgccagacacaccgaagtggccttgcgataattgggaagaacaacaacccattaattccacattctctggagaaggatatatctctgatcaatatgatttagcgcaacaccaacttcaacaaattaatgcgtgccacacgaacactacatatacaaatgcagactactcaaaagttgtggctcaacttgtaagtcttattactaacattgaaacgataagttcgacacaacttacgcaacagacacaatcaatacttaatcagattaataacattagatatgaaaaaaacaaaagtgctgaatgtcgaatcattgttatcgctaatcctaaacccgacaaggcaatcataactaaaattagcgtagaagagggaatacccataacattcagtgtccaaaccatgttttcagatactaattttattgctgaacaacgagctgacttaccaactaatataaaagatattcaaagcctgtatcaaaaaatgacgaagttatatattgagcacagtgaaaataaaaacaggatgaaagtctttgccggaaccaactttattgatttcaatatgacaggacagaacctgtccgggttcgttctaaccttgtcaaggttttatttcgaagatctacttaatataaatttcactgacgcaaatttaggtgacactatttttttacataaagaacaccctacccccaaattatataaagatggacaatatcttgacaaacaaatcgaaggtttattttcaacattattaaccattaatgacaaccttttacgagcaaaagcggaaattgcttcgacaataattaaatttttagaggccaggataaccaatctttcatacaatgacatattaaaatatcagcaagaattccaaagacaatgttataagcaagttaaagcctttacgacactctcccgatacaataaaattcaaacatgggcagaaatgtctgaatatcaattcgaagtatttcaatacgagacgcttaacccaaaaaaaatgtcacacacgccttatttaaagaggccactgcctaatgaaaaagatataaattatggggtggaaatagaaataccatctggtaaaagaattcgcttatcaaatcattaccagaatataataccataa

SEQ ID NO: 300 - DNA, 342 bp, Escherichia coli
atgaaaacctcaaagactgtggcaaaactattatttgttgtcggggcgctggtttatctggttgggctatggatctcatgcccattgttaagtggaaaaggctattttcttggcgtgttaatgacagcaacttttggcaactatgcatatcttcgcgcagaaaaactcgggcaactggatgatttttttacccatatctgccagttagttgcgttaatcactatcggtctcttgtttatcggtgttttaaacgcacctatcaatacttatgaaatggtgatctatcccatcgccttttttgtctgcttgtttggtcaaatgcgtttgtttcgctcggcatga

SEQ ID NO: 301 - DNA, 474 bp, Escherichia coli
atgaaaaaaatactcgaagcaatactggcgattaatctcgccgtactttcctgtattgtatttataaacattattttaagatatggttttcagacaagcattttatctgttgatgaattgtcacgttatttatttgtctggttaacgtttattggcgcgattgtagcttttatggataacgcccacgttcaggtcacctttctggtggagaaactctcccccgcatggcagcgacgagtcgctctggttacccattccttaatcttatttatttgtggcgcactggcctggggcgcaacgctaaaaacaattcaggactggagcgattattcaccgatcctcggtttacccatcggcctgatgtatgccgcttgtctgcccaccagcctcgttatcgcattctttgaactgcgtcatttatatcaactcatcacgcgtagcaattctctaacgtcgccaccgcaaggagcttaa

SEQ ID NO: 302 - DNA, 1278 bp, Escherichia coli
atggctgtgctgatttttctgggctgtctgttgggtggtattgctatcggtttgcctattgcctgggcactgttgttgtgcggggcggcgttaatgttctggctggacatgtttgatgtccagatcatggcacaaacgctggtgaacggagccgatagcttctccctgctggcgattccgttctttgtgctggcgggtgaaatcatgaatgcgggcggcttgtcaaaacgcattgttgacctgccgatgaaactggtggggcataaaccaggcgggctgggctacgtcggcgtgctggcagctatgattatggcgagcctttctggttctgccgttgcggataccgccgccgttgccgctctactggtgccgatgatgcgcagcgccaactatccggtcaaccgggcggcggggctgattgcctctggcggcattatcgcgccaattattcccccttccattccgtttattatcttcggcgtttccagcggattatccatcagtaagctgtttatggcgggcattgcccctggcatgatgatgggcgcaacgctgatgcttacctggtggtggcaggccagtcgccttaatttaccccgccagcaaaaagcaacgatgcaggaaatctggcactcttttgtctccggtatctgggcgctgtttcttccagtcatcattattggcgggtttcgctccggcctgtttacccctaccgaagccggggccgttgctgctttctatgcgctgtttgtcgccacagttatttaccgtgaaatgaccttcgccacactttggcatgtactcattggcgcggcgaaaaccacctcagtggttatgtttctggtggcctcggcacaagtttccgcctggctgattaccattgctgaactgccgatgatggtttctgatttactgcaaccgttggtcgattcaccgcgtctgctgtttatcgtcattatggtggctatcctgattgtcggcatggtcatggatttaacgccgacggtattaattcttaccccggtattaatgcctttagttaaagaggcaggaatcgatccgatttatttcggtgtcatgtttatcattaactgctcaatcggcttaattacaccgcctatcggtaatgtacttaacgttatttcaggggtggcaaaactcaaattcgatgatgcagtcagaggcgttttcccttacgtcctggttttatattcattattagtcgtatttgtttttattcccgatctcatcatcctccctttgaaatggattaattaa

SEQ ID NO: 303 - DNA, 324 bp, Escherichia coli
atgttcctggactattttgcactgggagtgcttatttttgtatttctggtgatcttctatgggatcattattttacatgatattccctacctgattgccaaaaaacgtaatcatcctcatgccgacgccattcatgttgctggttgggtgagtctttttacgttacatgttatctggccgtttttgtggatttgggccacgctttaccgcccggagcggggatggggaatgcaaagccatgattcatccgttatgcaactgcaacagcgcattgccgggctggagaaacagctcgccgacatcaaatcctcttctgccgagtaa

SEQ ID NO: 304 - DNA, 4134 bp, Escherichia coli
atgagcggaaaaccggcagcgcgtcagggcgacatgacgcagtatggcggtagcattgttcagggttcagccggggtgcgcattggtgcccccaccggcgtggcctgttcggtgtgccccggcggagtgacgtccggccatccggtcaatcccctgctcggtgcaaaggtccttcccggtgaaaccgacatcgccctgcccggcccgctgccgttcatcctctcccgcacctacagcagttaccggacaaaaacgcccgcgccggtggggagcctcggccccggctggaaaatgcctgcggatatccgcttacagctgcgcgataacacactgatactcagtgataacggcggcagaagcctgtattttgagcacctgtttcccggtgaggacggttacagccgcagcgagtcactgtggctggtgcgcggcggcgtggcgaaactggatgaaggtcaccggctggccgcactctggcaggcgctgccggaagaactccgcttaagtccgcatcgttatctggcgacaaacagtccgcaggggccgtggtggctgctcggttggtgtgagcgggtgccggaagcggatgaggtgctgcctgcgccgctgccgccgtaccgggtactgaccgggctggtggaccgcttcgggcgcacacagacgttccaccgcgaagccgccggtgaattcagcggcgaaatcaccggcgtgacggatggtgcctggcgtcacttccggctggtactgaccacgcaggcgcagcgggcagaagaagcccggcagcaggccatttccggcgggacggaaccgtccgcttttcctgataccctgccgggttacaccgaatatggccgggacaacggcatccgtctgtctgccgtgtggctgacgcacgacccggaatacccggagaatttacctgccgcgccgctggtgcgctatggctggacgccacgcggcgaactggcggtggtgtatgaccgtagtggcaaacaggtgcgcagctttacttacgatgataaataccggggccggatggtggcgcaccgtcacacgggccggccggaaatccgttaccgttacgacagcgacgggcgggtgacagaacagctaaacccggcaggcttaagctacacgtatcagtatgagaaagaccgcatcaccatcaccgacagcctggaccgccgtgaagtgctgcacacgcagggcgaagccgggctgaagcgggtggtgaaaaaggaacacgcggacggcagcgtcacgcagagtcagtttgacgccgtgggcaggctcagggcacagacggatgccgcaggcaggacaacagagtacagcccggatgtggtgacgggcctcatcacgcgcataaccacgccggatggcagggcatcggcgttttactataaccaccacaaccagttaacgtcagccaccgggcctgacgggctggaattgcgccgggaatatgatgaattgggccgtctgattcaggaaactgcccctgacggcgatatcacccgctaccgttatgataatccacacagtgacttaccctgcgcaacggaagatgccaccggcagccggaaaaccatgacgtggagccgttacggtcagttgctgagcttcaccgactgttccggttatgtaacccgttatgaccatgaccgcttcgggcagatgacggcggtgcaccgcgaggaagggctgagtcagtaccgcgcatacgacagccgtggacagttaattgccgtgaaagacacgcagggccatgaaacgcggtatgaatacaacatcgccggtgacctgaccgccgtcattgccccggacggcagcagaaacgggacacagtacgatgcgtggggaaaggccgtccgtaccacgcagggcgggctaacgcgcagtatggaatacgatgctgccggacgggtcatccgcctgaccagtgaaaacggcagccacaccaccttccgttacgatgtacttgaccggctgatacaggaaaccggctttgacggccgcacacagcgttatcaccacgacctgaccggcaaacttatccgcagcgaggatgagggtctggtcacccactggcactatgacgaagcagaccgcctcacgcaccgcaccgtgaagggtgaaaccgcagagcggtggcagtatgacgaacgtggctggctgacagacatcagccatatcagcgaagggcaccgggtggcggtgcattacaggtatgatgagaaaggccggctgaccggtgagcgtcagacggtgcatcacccgcagacggaagcactgctctggcagcatgagaccagacatgcgtacaacgcgcaggggctggcgaaccgctgtataccggacagcctgcccgccgtggaatggctgacctacggcagcggttacctggcaggcatgaaactcggcgacacaccgctggtggagtacacccgcgaccgcctgcaccgggaaacgctgcgcagcttcggccgttatgaactcaccaccgcttatacccctgccgggcagttacagagccagcacctgaacagcctgctgtctgaccgcgattacacctggaacgacaacggcgaactcatccgcatcagcagcccgcgccagacccggagttacagctacagcaccaccggcaggctgaccggcgttcacaccaccgcagcgaatctggatatccgcatcccgtatgccacagacccggcaggtaaccgcctgcccgacccggagctgcacccggacagcaccctcagcatgtggccggataaccgtatcgcccgtgacgcgcactatctttaccggtatgaccgtcacggcaggctgacagagaaaaccgacctcatcccggaaggggttatccgcacggatgatgagcggactcaccggtaccattacgacagtcagcaccggctggtgcactacacgcggacacaatatgaagagccgctggtcgaaagtcgctatctttacgacccgctgggccgcagggtggcaaaacgggtgtggcggcgtgaacgggacctgacgggctggatgtcgctgtcacggaaaccgcaagtgacctggtacggctgggacggcgaccggctgaccacaatacagaacgacagaacccgcatccagacgatttatcagccggggagcttcacgccactcatcagagttgaaaccgccaccggtgagctggcgaaaacgcagcgccgcagcctggcggatgcgcttcagcagtccggcggcgaagacggtggcagtgtggtgttcccgccggtgctggtgcagatgctcgaccggctggaaagtgaaatcctggctgaccgggtgagtgaggaaagccgccgctggctggcatcgtgcggcctgaccgtggagcagatgcaaaaccagatggacccggtgtacacgccggcgcgaaaaatccacctgtaccactgcgaccatcgcggcctgccgctggcccttatcagcaaggaagggacaacagaatggtgcgcagaatacgatgaatggggcaacctgctgaatgaagagaacccgcatcagctgcagcagcttatccgcctgccggggcagcagtatgatgaggagtccggcctgtattacaaccgccaccgctattatgacccgctgcaggggcggtatatcactcaggatccgattgggctgaaggggggatggaatttttatcagtatccgttgaatccagttacgaatacagatcctctggggttagaagtttttcctagaccattccccttgccaattccatggcccaaaagccctgcacagcagcaagcagatgataatgctgcaaaagcattgacaaaatggtggaacgatacagcatcacaaagaatatttgactctctaatattgaataatccgggactagcattagatataacaatgatagcttctcgtggaaatgttgcagacacagggataactgatcgtgtcaatgacataataaatgacagattctggagtgatgggaaaaaacccgacagatgtgacgtacttcaggaactaattgattgtggtgatattagtgctaaagatgcaaaaagcacacagaaagcctggaattgtcgtcactccagacagtcaaacgataaaaaaagatag

SEQ ID NO: 305 - DNA, 843 bp, Escherichia coli
atgtcaaatacataccagaaaagaaaggcaagtaaagagtatggtttatataatcaatgtaagaaactaaatgatgatgaattatttcgcttacttgatgatcacaattccttgaaaaggatttcatctgccagagtattacagttaagaggtgggcaagacgctgttagattggcaattgagttctgctctgataaaaattatatccgtagagatatcggagcatttatactcgggcaaataaaaatttgcaaaaaatgcgaagataatgtttttaatattttgaacaatatggcattgaatgataagagcgcttgcgttcgagctacggcaatcgagtcaacggctcagcgatgcaagaaaaacccaatttattcacctaaaatagtagaacaatctcaaattactgcttttgataaatcgactaatgtcagacgtgctacagcatttgctatttctgttatcaatgataaagcaacaattccactattgattaatctgttaaaagatccaaatggagatgtcagaaactgggccgcatttgcaataaatatcaataaatatgataatagtgatattagggattgttttgtggagatgcttcaggataaaaatgaggaagtccgtattgaagcaataatcggactttcctacagaaaagataaaagggttttatctgttttatgcgatgagttaaaaaaaaatactgtttatgatgatatcattgaagctgcgggtgaattaggtgataaaacgctacttcctgttttagatactatgttgtacaagtttgatgacaatgaaattataacttccgctattgataagctgaagcgttcatag

SEQ ID NO: 306 - DNA, 462 bp, Escherichia coli
atgaaagcatgcttgttactatttttttatttctcttttatttgtcaattgcatggtgctgatgtgaaaataaaacaaaacgaaagtatgatggggtctacagcaatgacctatgatttaagtgaagaaaagttgatgaaactgaagtataaatcacaacatggtgattcagaggcatcatttcgactatatcaatattactgctttactaaaaataacatttacaaacaattgcgattcttggaaagatcagcatctcaggggaatgttacagcgcagtttaattatggggtctttttatcagatacaaatccaacattatcagaatattataatttgaatagagctatttattggatggaattcgctgtaaataacggtaatattgatgcaaagagcaaacttcaagagctcaaaaagctaaagcgaatggatagaaggaagaataaggagaatccgtaa

SEQ ID NO: 307 - DNA, 1617 bp, Escherichia coli
atgtttagacgaaatcttattacctctgccatcttattaatggcaccgttagccttttctgcacaatcattggctgaatcattaacggtggaacaacgccttgagttattagaaaaggcgttaagagaaacgcaaagcgaactcaaaaagtataaagatgaagagaagaaaaagtatacgccagcgacggtgaatcgtagcgtaagtacgaatgatcaagggtatgccgccaatccgttcccgaccagtagtgccgcaaaacctgatgctgtactggtcaaaaatgaagagaaaaatgccagtgagacaggctcgatttattcttccatgactctgaaagatttcagtaaatttgtgaaagatgaaattggctttagttacaacggctattaccgttctggttgggggaccgcctctcatggttcacctaaatcatgggcgattggttctctgggccgctttggtaacgaatactccggctggtttgatttgcagttaaaacaacgtgtctacaacgaaaacggcaaacgggttgatgccgttgtgatgatggatggtaacgttggtcagcagtactctaccggctggtttggcgataacgccggtggcgagaactatatgcagttctccgatatgtacgttaccaccaaaggtttcctgccctttgcgccagaggctgatttctgggtgggtaaacacggtgcgccgaaaattgaaatccagatgcttgactggaaaacgcagcgtactgatgccgcagcgggtgtaggtctggaaaactggaaagtcggtccgggtaaaattgatatcgcgctggttcgcgaagatgtcgatgattacgatcgcagcctgcaaaacaaacagcagattaataccaataccattgatttacgctataaagatatcccgttatgggataaagccaccttaatggtaagtggtcgttatgtcacggcaaacgaaagcgcatcggaaaaagataatcaggataataacgggtattatgactggaaagatacctggatgtttggcacatctttaacgcagaaatttgataaaggtggcttcaacgaattctccttcctggtcgcgaataactctatcgccagtaactttggccgttatgctggcgcaagtccatttaccacctttaatggtcgttattatggtgatcacaccggcggaacagcggtacgtctgacttcgcagggcgaagcctatattggcgatcatttcattgtagctaacgcgattgtttactccttcggtaacgatatatatagctacgaaacaggcgcccactctgatttcgaatctattcgtgcggttgttcgcccggcctatatttgggaccaatataaccagacaggtgttgaactgggctatttcacccagcaaaacaaagatgcgaatagtaataaatttaatgagtctggttataaaaccacgctcttccatacctttaaagtcaataccagtatgttgacctcgcgtccggaaattcgtttctacgccacgtatatcaaagccctggaaaacgaactggatggcttcacctttgaagacaataaagacgaccagtttgctgtcggtgcccaggctgaaatctggtggtaa

SEQ ID NO: 308 - DNA, 1413 bp, Escherichia coli
atgaaagcatttccagaaacatttctttggggtggcgcaacagctgccaatcaggtggaaggtgcctggcaggaagatggcaaagggatctcgacctcagatttacagcctcatggcgtaatgggaaaaatggaaccgcgcatcctggggaaagagaatatcaaagatgtcgccatcgatttttatcaccgttacccggaagatatcgcgttatttgccgagatgggcttcacctgtctgcgtatttccattgcctgggcgcgaattttccctcagggcgacgaagtcgaaccgaatgaagcggggttagcgttttacgatcggctgtttgatgaaatggcgcaggcggggatcaagccgctggtaacgttatcccattacgaaatgccatatgggctggtgaaaaactacggcggttgggctaatcgagcggtcatcgatcacttcgagcattacgcccgcacggtctttactcgctaccaacataaagtggcgttatggctgacgtttaatgaaatcaacatgtcgttacacgcgccattcacgggcgtggggctggcagaagagagtggcgaggcggaagtttatcaggctatccaccatcaactggttgccagtgcgcgggcagttaaagcctgtcatagcctgctccccgaagcgaaaatcggcaatatgcttctcggtgggctggtttaccccctcacctgccagccacaggatatgttgcaggccatggaagagaaccggcgctggatgttctttggtgatgttcaggcgcgtggccagtatcccggctatatgcagcgtttcttccgcgaccacaatatcaccattgagatgactgaaagtgacgcagaagatttaaaacataccgtcgatttcatctcttttagttattacatgactggttgtgtttcccacgacgaaagcattaataaaaatgcgcagggcaacatactgaatatgatccccaatccgcatctgaaaagttcagagtgggggtggcaaattgatccggttggattacgggttctgttaaatacgctttgggatcgttatcaaaaaccgttatttattgtcgagaacggattaggcgcaaaagacagcgttgaagcggatggttcgatacaggacgattatcgaattgcctatttaaacgatcacctggtacaggtaaatgaagcgattgccgatggtgtggatattatggggtacaccagttgggggccaattgatttagtcagtgcatctcattcacaaatgtctaagcgctacggctttatttatgtggatcgtgatgataatggcgaaggaagcctcacaagaacacgcaagaaaagcttcggatggtatgcagaggtgatcaagacgcgggggctgtcattaaaaaaaataaccattaaagcaccttaa

SEQ ID NO: 309 - DNA, 837 bp, Escherichia coli
atgaacatgcaaatcaccaaaattctcaacaataatgttgtggtggttattgatgatcaacagcgggaaaaagtcgtcatggggcgcggaattggctttcaaaaacgcgctggcgaaagaattaactcaagtggaatagaaaaagagtatgccttgagcagtcatgaactgaacgggcgattaagcgaactcttaagtcatattcctcttgaggtgatggcaacctgtgatcgtattatctctttagcgcaggagcgcttgggaaaattacaggacagtatttatatctcgctaactgaccattgccagtttgcgattaaacgctttcagcaaaacgtgttgctgcccaacccgttgctgtgggatatccagcggctttacccgaaagagttccagctaggggaagaagcgttaaccattattgataaacggttgggcgtgcagttaccgaaagatgaagtgggctttattgccatgcatctggtcagtgcccaaatgagcggaaatatggaggatgttgcaggtgtcacgcagttaatgcgcgaaatgctgcaattaataaaatttcagttcagccttaattaccaggaagaaagcttgagttatcagcgactggttacacatctgaagtttttatcctggcgtattcttgaacatgcttcaattaacgatagtgatgaatcattacaacaagcagtaaaacaaaattacccgcaagcatggcaatgtgcggaacggatcgccatttttattggtttgcagtatcaacgtaaaatttcacccgcagagattatgtttttagccataaatatagagcgcgtgcgcaaagaacactga

SEQ ID NO: 310 - DNA, 381 bp, Escherichia coli
atgagtaaggaatatatgaacgatggttcattaagtgaaaaatggaaataccgatttaatttttatgatcaacatggttttcctggattctggggggcaacaccagaatataaagcagcatttaaagcattaaaagtaagacaacgcttaactattcaaatgaatttcattgctttcttctgttcctggatatatttatttgtcctggggttatggaaaaaagcaattatagttctattacttggtattctatctctatttgttggtgcactaattggcgttaacattctgggaattgccgtagcagcctatgttgctgttaacacgaacaaatggttctatgagaaagaggtaaaagggttaaatacctggagcctttga

SEQ ID NO: 311 - DNA, 381 bp, Escherichia coli
atgttacgtatatttatcccaacatctaacggtaagatttccagacgtcgttatatattttcatttattttaataaatttcatttttgcctttcttattatcttttttaacgatggagaagcaggctttcttgttatagtctctaccatcgtactccattatctcgtcatcaacatgaattgccagcgactccgtgatagtggtttcatctatataaaaacttatgtttttggtacattagcagtatatatcatctctatcatcacaatgatagccgaagattttgcctgttcaggcaatggttcgatgatttttttgatttgttatttttccactttcagtatgctaatgcttgcacctactgattcatcaaaacaatag

SEQ ID NO: 312 - DNA, 693 bp, Escherichia coli
atgaaaaagattaatgcaataattttattatcttctctgacctctgcctcggtatttgctggcgcatacgtcgaaaacagggaggcatataatcttgcctccgatcagggcgaggttatgctacgtgtgggttataacttcgatatgggcgcgggtattatgttaaccaatacctacaactttcagcgagaagatgaactaaaacatggatataacgaaattgaaggctggtatccgttatttaaaccaaccgataaattaaccatccagcccggtggcttaattaatgataagagtatcggttcgggtggtgcagtgtatctggacgtcaactataaatttgtaccatggtttaatctgacagtacgaaatcgctataaccataataactatagttcaacagatttgagcggggaactggataataatgacacctatgaaattggcacctactggaattttaaaatcaccgataaattttcctatacatttgagccacattacttcatgcgagtgaatgactttaatagtagcaacgggaaagatcatcattgggaaatcactaacaccttccgttaccgtattaatgaacactggctcccttatttcgaattgcgctggttagaccgcaacgtcgaaccgtaccaccgcgagcaaaaccagatccgtatcgggacgaagtatttcttctga

SEQ ID NO: 313 - DNA, 1404 bp, Escherichia coli
atgtctgaccataatccactgacattaaaactgaatctgcgggaaaaaatcgcctatggtatgggcgacgtcggttcgaatttaatgctctgcatcggtactctgtatctcctcaaattttataccgatgaattagggatgcctgcttactatggcgggattatctttctggtggcgaagttttttaccgcgtttaccgatatgctcaccggatttttactcgactcgcggaaaaatattgggcctaaaggcaaatttcgtccctttattttatatgcagcggttccggcggcgttaattgcaacgctccagtttatcgccaccaccttttgtttgccggttaaaacgacgattgccaccgcgctgtttatgatgtttggactttcatacagtctgatgaactgctcgtatggtgcgatgatcccggcaattaccaaaaacccgaatgagcgcgcgcagctcgcggcttaccgccagggtggtgcaaccatagggctattgatttgtaccgtggcgtttattccgttgcagtcgcttttttctgactcaaccgtcggttatgcctgtgcggcacttatgttctccattggcggctttatttttatgatgctgtgctacagaggcgtcaaagagcattatgtggacacaacgccaaccggacataaagccagtattctcaaatcattttgcgcgatatttcggaatccgccattgctggttttatgcattgctaacttgtgtaccctggcggcatttaatatcaaactggcgattcaggtctattacacccagtatgtgctgaatgatattaatttattgtcgtggatgggattcttcagtatgggatgcatcctcatcggcgtattactggtgccattaactgtaaaatgttttggtaaaaaacaggtttatctggctggcatggtgctgtgggcggtgggtgatatactgaattatttctggggaagtaactctttcactttcgtcatgttctcttgtgtcgccttttttggcacggcctttgtaaacagcctgaactgggcactggtaccagataccgtagattacggtgaatggaaaaccggtattcgtgccgaaggttctgtttataccggttataccttctttcgtaaaatttctgccgcacttgctggcttcttgccaggcattatgctgacgcaaattggttatgttcccaacatcgcgcaaagcgatgcgacattacagggtttgcgtcagctcatttttatctggccttgtgcactggcaattattgctgcattgacgatgggattcttttacacactcaatgaaaaacggtttgcattgattattgaggaaatcaaccaacgcaaaaataaagagatggcgacagaagaaaaaacggcttccgtaacgttataa

SEQ ID NO: 314 - DNA, 1056 bp, Escherichia coli
atgaaaaggaatttattatcttccgctattatagtcgccatcatgtccctcggtctgacgggttgtgatgataaaaaagccgaaacagaaacgctcccgcctgccaatagtcaacctgccgcaccagctcctgaagcgaaacctactgaagctcccgttgcaaaagcagaagctaaacctgaaacacctgcgcaaccggtggtcgatgaacaagcggttttcgacgaaaaaatggatgtctatatcaagtgctacaacaagttacagatcccggtacagcgcagtctggcgcgttatgctgactggctgaaagattttaaacaggggcctaccggtgaagagcgtactgtttatggcatctacggcattagtgaatccaacctcgctgagtgtgaaaaaggcgtaaaaagtgctgtggcgttaacgcctgcgctgcaaccaattgatggcgtggcggtgagttatatcgatgctgccgtggcgttgggtaataccattaacgaaatggataaatattacacccaggaaaattataaagacgatgcgtttgcgaaagggaaaacgctgcaccagacattcttaaaaaatctggaagcctttgaacctgtagccgaatcttatcatgcggcgattcaggaaattaatgataagcgtcagcttgcggaactgaaaaatattgaagaaagagaagggaaaacattccactactactctctggcagtcatgatttcagcgaaacaaattaataacctgatatcgcaagataagtttgatgcagaagcggcaatgaagaaagtgtctgaactggaaacgctagtggcgcaggccaaagaagcggataaaggcggcatgaatttctcgtttattaattcggcaggccagtatcaactcgaggctaaaaaatacgttcgccgcatcagagataaagtcccgtactctgactgggataaagagcaacttcaggacgcaaactcaagctggatggtcgaagactctttcccgagagcattacgcgagtacaacgaaatggttgatgactataatagcctgcgttaa

SEQ ID NO: 315 - DNA, 2187 bp, Escherichia coli
atgattactcgtattcctcgtagttctttctctgcaaatattaataatacagcccagacaaatgaacaccaaaccctgagtgaattgttttataaagaactcgaggataaattttctggcaaggagctggcgacgcctctattaaaaagcttctcagagaactgtagacaaaatggtcgtcatatctttagcaacaaggattttgtcattaaattttccacgtccgtcttacaagctgataagaaagaaattacgataattaataaaaacgaaaacacgacacttactcaaaccattgccccaatatttgaaaaatacctaatggaaattttacctcaacgctcagacactcttgataaacaagaattaaacctaaaatcagatagaaaagaaaaagaattcccaagaattaaacttaatggtcaatgttattttccggggcgaccccaaaaccgtatagtatgccgacacattgctgcacaatatattaatgatatttatcagaatgttgattacaaaccccatcaagatgattactcttcagctgaaaaatttctcacgcacttcaacaaaaaatgcaaaaaccagactttggcgttggtttccagccgtcctgaggggcgttgcgttgctgcctgcggtgatttcgggctagttatgaaagcatattttgacaagatggaatcaaatggcatcagtgttatggcagccatattactggtggataaccatgctttgacggtccggctaagaataaagaacacaactgaaggatgtacccattacgtggtttcggtttatgatcctaatgtaactaacgataaaataagaattatgagcgaaagcaaagagaatattaaacactattctctgatggattttatgaatgtagattatagcctcctgaaatggtcaaatgatcatgttattaatcaatctgttgcaataattccagcacttccgaaagaacagctattgatgttaaaaggatctgtggatgaaataacccctccattatcacctgcaacgatgaatttgctaatggcaattggtcagaatcaccaacttacgcaactgatgattcaactccagaaaatgccagaactacatagaacagaaatgttgactgcctataatagtattaacctgccaggtttatatttggctataaattatggtaatgcggatatcgttgagactattttcaattcattgtcagaaacaggatatgaaggattactctcgaaaaaaaatctcatgcatattctggaggcaaaagataaaaatggtttttctggattatttttagcgatatcacgtaaggataaaaatgttgtaacctcgattctgaacgccttacctaaactggccgcaacacatcatttagataacgaacaagtgtataaattcctgagtgccaaaaatagaacgtccagccatgttttataccatgttatggcgaatggtgatgccgacatgctgaaaattgttttgaacgcgttacctttgttaattcgcacatgtcatttgactaaagaacaggtactcgatctcctgaaggcaaaggatttttatggttgcccaggactatatctggcgatgcaaaatggacatagcgatatcgtgaaagttattcttgaagcattgcccagcctagcccaggaaattaacatttcagcttccgatattgtagatcttctgaccgctaaaagtcttgcgcgcgacacgggtttgtttatggccatgcagcgcggacacatgaacgttattaatactatttttaacgcattacccactctgtttaatacgtttaaattcgataaaaaaaatatgaagcccctcctcctggcaaataattctaatgaatatcccggtttgttttcagcgatacagcataaacaacaaaatgttgtagagacggtttatcttgctttatctgaccatgcacgcctgtttggatttaccgctgaagatattatggatttttggcaacacaaagccccacaaaaatactctgcctttgagttggcttttgaatttggtcaccgggttattgctgaattaatccttaatacattaaataagatggctgaaagctttggctttacggataaccctcgatacattgcggagaaaaattatatggaagctttactcaaaaaagcatctccccataccgtacgctaa

SEQ ID NO: 316 - DNA, 1581 bp, Escherichia coli
atgataagtcatatcctaaattctggcggcaataactctttgatgaaacatgatgtggtgcaaggaaataatatagtagatcttgatttactacgtaatttaaatggggtgccaggtttaaacagagataactttatttatatcagcaatattttttcaaatataaaacaacggaacgaaaaaaatcatgcaataaatatgtttcgtgaagtctcaatcagtaatgatactataagtgtaaaattctacagaaatgaaaaaattgaatgcgcttgcaattttctgatggataaagatgcgcaggggtatatcgacctgtctgatttggatttaacaagttgtcattttaaaggtgacgttatatcgaaggtgtcttttttatcatcaaatctacaacatgtaacattcgaatgtaaagaaattggggattgcaattttactactgcaatagttgataatgtcatatttagatgtcgacgtttacacaatgtgatttttatcaaagcgagtggtgaatgtgtcgatttcagcaaaaatattcttgatacagttgacttctcgcagagtcaacttggtcatagtaattttcgcgaatgtcagattagaaattcaaacttcgataattgttatctttacgcttcgcacttcaccagagcagagtttctgtctgccaaagaaatatcatttattaaatcgaatttgacagctgttatgtttgattatgtgcgaatgtcgacagggaattttaaagattgcattacagaacaattggaattaactattgattattcagatatattttggaatgaagatctcgatggttatatcaataacattataaaaatgattgatacattgccagataatgcaatgatattgaaatccgttctggccgtaaaactggtgatgcaattaaaaatacttaatattgttaataaaaactttattgagaatatgaagaaaatatttagccattgtccttatataaaagatcccattatacgcagttatatccattctgatgaagataacaagttcgatgattttatgcgtcaacatcgattcagtgaggtgaatttcgatacccaacagatgatcgattttattaacagatttaatacgaataaatggctaattgataaaaataacaatttttttatccaacttatcgatcaggccttacgatcaacggatgatatgatcaaagcaaatgtttggcatctttataaagagtggattcgtagtgatgatgtttcacctatatttatagaaactgaagataatttaagaacctttaacacgaatgaattaacacgaaacgataatatctttatcctgttctcctcagtcgatgatgggccagttatggtggtaagctcccagcgcttacatgatatgttgaatcctacaaaagataccaattggaattccacgtatatctacaaatccagacatgagatgttgcctgttaatcttactcaggaaacacttttcagctccaaatctcatggtaaatatgcgcttttccccatttttactgcgagttggcgagctcatcgtataatgaataagggtgtttaa

SEQ ID NO: 317 - DNA, 255 bp, Escherichia coli
atgttgaagataatacccggtgcaactggatactttaataaaacactcaattcaaatcaattcgataatgaagatgcaatcaaagataaattagataatagaggttcaatcaaaggtaaattaaataatatatatggtaaatctattgattatgcagcgctgcgtcatcgggatataattattgcaaaaatagatttgtttattcaacgaatcacgcataatttatggcatgcacgtaaaaaaatgtgtttttaa

SEQ ID NO: 318 - DNA, 708 bp, Escherichia coli
atgtgggtcaataagtatattgacgattgcactgatgaggatttaaacgatcgtgactttattgcatcagttgttgaccgggctatttttcatttcgcgattaatagtatatgtaatcctggggataataaagatgcaatgcccattgaacaatgtacttttgatgtagaaactaagaatgaccttccctccacggttcagctattttatgaggaatctaaggataatgaacctttagcgaatatacattttcaagcaataggttctggttttttaacgtttgttaatgcctgccaggaacatgatgacaacagcttaaaattatttgcttcgctgttaatttcactttcatattctagtgcctacgcagatttatcagaaacagtgtatattaatgaaaataatgagagctacctgaaagctcagtttgaaaaattatctcaacgtgatatgaagaagtacctgggagagatgaagcgtctggctgatgggggagaaatgaattttgatggctatctggataagatgtcacatctggtgaatgaaggaacgctcgatcctgatattttaagcaaaatgcgagatgctgcaccacaattaattagcttcgcgaagtcgtttgacccaacctcaaaggaagagattaaaatacttacagacacttctaaattaatttatgatttgttcggggttaaatcggagaaataa

SEQ ID NO: 319 - DNA, 1293 bp, Escherichia coli
atgcgctataatggtttaaataatatgtttttccctctttgcctgattaacgataaccactctgtcacaagtccatcacatacaaagaaaacaaaatcagataattacagcaaacatcataaaaacacgttaattgacaataaagccctctctcttttcaaaatggatgatcatgaaaaagtgataggcttgattcagaaaatgaaaagaatttatgatagtttaccatcaggaaaaatcacgaaagaaacggacaggaaaatacataaatattttatagatatagcttcacatgcaaataataaatgtgacgatagaattacgagaagagtttaccttaataaagataaggaagtgtcaattaaggtggtatattttataaataatgtcaccgtccataataatactatcgaaatcccacagacagtaaatggtggttacgatttttcacaccttagcctgaaaggtatcgtgattaaagatgaagatttatccaattcgaattttgcaggttgcagactacaaaacgctatttttcaggactgtaatatgtataaaacgaattttaatttcgccataatggaaaaaatactttttgataattgtattctcgatgactcaaatttcgctcagataaaaatgactgacggaactctaaattcatgttccgctatgcatgttcaattctacaatgcaacaatgaatagagccaatattaaaaataccttccttgattattcaaatttttatatggcatacatggctgaggtaaatctttataaagtaatagcgccatatattaatttatttagagccgaccttagcttctctaaacttgatttaattaactttgaacatgctgatctgtctcgtgtcaacctgaataaagcaaccctccagaatataaacttaattgatagcaaactcttttttacgcggttaacaaatacgttcctcgaaatggttatatgtaccgactctaatatggctaatgttaattttaataatgccaatttaagcaattgccatttcaactgttctgttttaacaaaagcctggatgtttaatatccgtctctatcgtgttaatttcgatgaggctagcgtccagggaatgggtattaccattctccgtggtgaggaaaatatctccattaatagtgatatcctggtaacactacagaaattctttgaagaagattgtgccactcatactggcatgtcacaaactgaggataatcttcatgcagtcgctatgaagattactgcagatattatgcaagatgcagattga

SEQ ID NO: 320 - DNA, 1422 bp, Escherichia coli
atgagcatttcaatgactacaaaactcagttatggatttggagcgttcgggaaggattttgcgatcggcattgtgtatatgtacctcatgtattactacaccgatgtcgtcgggctgtctgtgggtttggtcggtactttgtttctggtggcgaggatctgggatgctattaacgatccgattatgggatggattgtaaatgctacgcgatcgcgatggggtaagttcaaaccctggatcctgatcggtacgttggcaaactctgtaatcttatttctcctctttagtgcgcatctgtttgaaggtactactcagattgtctttgtttgcgtgacctacatcctctggggcatgacttacaccattatggatattcccttctggtcgctggttccaaccatcacgctcgataaacgtgagcgcgaacaactggttccttatccgcgtttttttgccagtctggcaggctttgttacggcaggtgtgacgctaccatttgttaattatgtcggcggtggcgatcggggatttggctttcagatgttcactctggtactgatcgccttttttattgtttcaaccatcatcactctgcgcaatgtgcatgaagtcttttcgtcagacaatcaaccgtctgctgaaggaagccatctgacacttaaagccatcgttgcgctaatttataaaaacgatcagctttcatgcctcttgggtatggctcttgcttataatgtagccagcaacattattaccggctttgctatctattatttctcatatgttatcggtgatgcggatttgttcccctattatctgtcgtatgcgggagctgctaacctggtgacgttagtattcttcccacgcttagttaaatcattatcccgacgcattttatgggccggagcatctattcttccggtgttaagctgtggtgttctcctgttaatggcattaatgagctatcacaacgtcgtcctcattgtgattgcgggtattttgctgaatgtgggaacggcgcttttctgggtattacaggtcatcatggtggcagatatcgttgattacggtgaatataaactgcacgtacgctgtgaaagtatcgcttactccgtgcagactatggtggtgaagggcggttcagcctttgcggcttttttcattgcggttgtgttagggatgattggctatgtaccgaatgttgaacagtctacgcaagccctattaggtatgcagtttattatgattgctctaccaactctgtttttcatggtaacgctgattctctacttccgtttctatcgcctcaatggtgacacgctgcgcaggatccagatccatctgctggataaatatcgcaaagtaccgcccgagcctgttcatgctgatattccggtcggtgcagtgagtgatgtgaaagcctga

SEQ ID NO: 321 - DNA, 297 bp, Escherichia coli
atggaaggtaaaaacaagttcaatacttatgttgtttcttttgattatccatcatcttattcctcagtgttcttaagattaagatcattgatgtatgatatgaatttctcctctatcgtggctgatgaatatgggataccacgacaattgaatgaaaactccttcgcaataacgacatcgttagccgcaagtgaaatcgaagatttaatcaggctcaaatgcttagacttaccggatattgattttgacctcaacattatgacagttgatgactatttccgtcagttttacaagtag

SEQ ID NO: 322 - DNA, 1539 bp, Escherichia coli
atgcaacaacctgtagttcgcgttggcgaatggcttgttactccgtccataaaccaaattagccgcaatgggcgtcaacttacccttgagccgagattaatcgatcttctggttttctttgctcaacacagtggcgaagtacttagcagggatgaacttatcgataatgtctggaagagaagtattgtcaccaatcacgttgtgacgcagagtatctcagaactacgtaagtcattaaaagataatgatgaagatagtcctgtctatatcgctactgtaccaaagcgcggctataaattaatggtgccggttatctggtacagcgaagaagagggagaggaaataatgctatcttcgcctccccctataccagaggcggttcctgccacagattctccctcccacagtcttaacattcaaaacaccgcaacgccacctgaacaatccccagttaaaagcaaacgattcactaccttttgggtatggttttttttcctgttgtcgttaggtatctgtgtagcactggtagcgttttcaagtcttgatacacgtcttcctatgagcaaatcgcgtattttgctcaatccacgcgatattgacattaatatggtaaataaaagttgtaacagctggagttccccgtatcagctctcttacgcgataggcgtgggtgatttggtggcgacatcacttaacaccttctccacctttatggtgcatgacaaaatcaactacaacattgatgaaccgagcagttccggtaaaacattatctattgcgtttgttaatcagcgccaataccgtgctcaacaatgctttatgtcgataaaattggtagacaatgcagatggttcaaccatgctggataaacgttatgtcatcactaacggtaatcagctggcgattcaaaatgatttactggagagtttatcaaaagcgttaaaccaaccgtggccacaacgaatgcaggagacgctccagaaaattttgccgcatcgtggtgcgttattaactaatttttatcaggcacatgattatttactgcatggcgatgataaatcattgaaccgtgccagtgaattattaggtgagattgttcaatcatccccagaatttacctacgcgagagcagaaaaagcattagttgatatcgtgcgccattctcaacatcctttagatgaaaaacaattagcagcactgaacacagaaatagataacattgttacactgccggaattgaacaacctgtccattatatatcaaataaaagcggtcagtgctctggtaaaaggtaaaacagatgagtcttaccaggcgataaatactggcattgatcttgaaatgtcctggctaaattatgtgttgcttggcaaggtttatgaaatgaaggggatgaaccgggaagcagctgatgcatatctcaccgcctttaatttacgcccaggggcaaacaccctttactggattgaaaatggtatattccagacttctgttccttatgttgtaccttatctcgacaaatttcttgcttcagaataa

SEQ ID NO: 323 - DNA, 402 bp, Escherichia coli
atgacatggaatccgttggcgctagcgacggcgctgcaaactgtacctgaacaaaatattgatgtaacaaatagcgagaacgcattaattattaaaatgaatgattatggcgatttgcaaatcaatattctttttacttcccgccaaatgattatcgaaacctttatttgtccggtgagtagtatcagcaatccagatgaatttaataccttcttattaagaaatcagaagatgatgccgttgtcatcggtagggatctccagcgtacaacaggaagagtattacattgttttcggggcgttatcgcttaaatcttctcttgaagatatcctgcttgagataacctcgctggtagataacgcattggatctggctgaaattacagaagaatattcacactaa

SEQ ID NO: 324 - DNA, 795 bp, Escherichia coli
atgacattaccaacgactatttattcatttcctgcatatttatctcgtttttcgtccaccgacaaaccagtaaaattaaaatttcatcaatacgcacgcgctacattactttcaaatcgtggaagagatcataattgcgatggcagacgtactgttgagatccacaaactagatctctcagactggcaagcattcaataagttagcgacgaggtgtaatgcttacgatggaatcacaatgaatggtgataattcttttggatggaaccatgaagctacattagataatattcacgcccagaaatacaataaagcttacgcgggtgcgaggttaaccgcagaactgaaatatttattgcaagatgtcgaatccttcgaacccaacagtaaatacacaatacacgaagtggttttgggacctggttatggtactccagactataccggccaaacgataggatacgttgtaacccttcctgcccaaatgcctaattgctggtcatctgaactaccaacaatcgatctttatatcgaccaacttcgcactgttacaggcgtttctaatgccctcggattcatcattgctgcattgctaaacgcgtattctgatttaccccatgatttgaaaattggtctgcgttccttatcaagttcagccgcaatctactcgggtttgggtttcgagcgagtgccgcaggagcgagacatcagttgcgctcgtatgtatctaacgccagcaaaccatcctgacttatggacacaagagaatggtgaatggatctacttgcgaaactaa

SEQ ID NO: 325 - DNA, 939 bp, Escherichia coli
atgttacccaggatcagacacaataattttattggtgcggtggagttatttgtaaagtcttcgtatacaaaaacacattcaaacaatttttttaacaacatccatcatgcatttaagaaaaaagattggatttcgaattatgatagcctgttaactttgagggagttctttcgttgcgcaactcagattgataaaagtggttatcaggtgctttcatcaaaaaatgaaactgttcacgccatggataagtttcttatcagtttcagccttaaagataacggtgccgaatatacaatgacattgcgaggtagtggatttgaatacgaagaaatacccataacaataaatgaatataactcattcatggatttcaaaaaccgtgaatttccgttagaacaaaacagacgattgtatgcctgggatattctacagaaaaaacagtctgacataccgaaaaggattaaaggttatattcaccaggcgattggtgacgtgtctttaggttatgccttattggaggatatagtaagcaaattaaaacggggtaaatttgaactccaaataccaggaggtggaattaaagaatgcgatggatggtatatttacgaaaaaataattgatgataattttgccatagtcatagaatctttgggctttgcgcttaaaatctatggaggggatgaacgttttcgtaatggttcctctgttgttttggaggatgaagattactctcttatttataattttctggttaatgcaggttgccaacaagtcgaattagccgaacaagtggatgcgatagtaagtgcgaatctggccgcagatagcgatattaccaaagaaaagatttgcgagaaatataaatcgaccattgaggcgtttaaaaaagagcaactagcgttaccagtattagttcggcgtaagaactcagagacttaa

SEQ ID NO: 326 - DNA, 1815 bp, Escherichia coli
atgagcaaaatatcagatttaaattattctcaacacattacattagccgacaattttaaacaaaaaagtgaagttttaaatacctggcgtgttggaatgaatgattttgcccgtattgccggggggcaggataacagaaggaatattctttctcctggagcatttttagagtttttggcaaagatatttaccctgggttatgtggattttagcaaacgctccaacgaagcgggtagaaatatgatggctcatattaagtcctcatcttattctaaagatactaatggcaatgaaaaaatgaagttttacatgaataatcctgtaggggaacgagcggattcacccaaggtgattatagaaatttcactttccactatcactactatggggactcgtcaaggacatacagccattatatttccacaacctgatggttcgactaaccgttatgaagggaagtcctttgaaagaaaagatgagagttcattacacctgattactaacaaggttctggcgtgttaccaaagtgaagctaacaagaaaatagcgcgtctattaaataataatcaggagttaaataatctacagaaattaaataatctacagaagttaaataatctactgaagttaaataatatacaggggttaaataatcctcaggagttaaataatccgcagaatttaaatgattctcaggagttaaataactcgcaggaattaaatagtccacaggagttaaatgatccgcaggagttaaataattctcaggacttaaataactctaaggtgagttgtacagtttcagttgattctacgattacgggtttattaaaagaaccattgaataatgcattattagcaataaggaacgaacatctgctattaatgcctcatgtatgtgatgaatcgatttcatacttactgggcgaaaaaggtatacttgaagaaatagataagctctacgcattaaatgatcacggaattgataatgacaaagtaggtaacaatgaaattaatgacatcaaagttaacctgtctcatattcttattgattccttagatgatgcaaaggttaaccttacaccggtcatcgattcgattctggagactttttcaaaatccccatatattaatgatgtaagaatactggattggtgttttaataaaagcatgcaatattttgatgatactaaaaagataaagcatgcatgctccgtaataaatcatattaatcttcgcagcgatcagtctaaaatagctgagacattatttttcaatctcgataaagaaccctataaaaatagccctgaattacaggggttgatttggaataagttggttgtatatgtcaatgaatttaacttaagtaatcgagaaaaaacaaatttaatacaaaggctatttgataatgttgagtctatatttaatgaagtacctgtcagcattttagtgaatgatatttttatgaatgatttctttatgaaaaatcctgagatgattaattggtacttccctcagttacttaagagttatgagggtgaaaagatttattttgataatttaaaatatgatttaaatgataatgataaggaatctaataaagaaattttgaagaatcaaccagataatgttatcaaagaaaaactgaataatgaatacaaacttagatttagaatgatgcaaactatcttgcaatcgagagttaatgtattaccatatattaatgaacagcgtttaaataaactaaatccaccggaaaatttacgtatagcaatagaacactttgggtggaagaatagacctatcactgcataa

SEQ ID NO: 327 - DNA, 1197 bp, Escherichia coli
atggctcaagttattaatgaaatggatgttccgtcccattcgtttgtttttcatggtacaggtgagagatattttcttatttgtgtggtgaatgtgttgttaacgattataacgctaggtatctatttaccatgggcattaatgaaatgtaagcgttatctttatgctaatatggaagttaacggacaacgattttcttatggaattaccggtgggaatgtttttgttagttgtcttttttttgtttttttctatttcgcaatcttaatgacagtgtcagcagatatgccgcttgttggttgtgttttgactttgttactgttggttttgcttatatttatggcagcaaaaggactgcgtcatcaggccttaatgaccagtctcaacggcgtaagatttagttttaattgctctatgaaagggttctggtgggtgacctttttcttgccgattttaatggccattgggatggggactgttttctttatctcgacaaagatgctacctgccaatagttcaagtagtgttattatatccatggttctgatggcaatagttggtattgtttccattggtatttttaatggtactttatatagtctggtaatgagttttctctggagtaataccagtttcggtatacatcgtttcaaggtgaaattagatactacgtattgtataaaatatgccattctcgcatttttagctttattgccttttctcgctgttgctggttatattatcttcgatcaaatattaaatgcgtatgatagttctgtatatgcaaatgatgacattgagaatttacagcaatttatggaaatgcaacgtaaaatgataatcgcgcagttaatctattattttgggattgctgttagcacaagttatttaacggtgtctttgcgaaaccattttatgagcaacctgtcactgaatgatgggcgtattcgttttcgcttaactttaacgtaccacggtatgctttatcgcatgtgtgcgttggtggtgatatccgggattacgggcggtctggcttatccactgctgaaaatatggatgattgactggcaggcaaaaaatacgtatttgctgggcgatttggatgaccttcctttaatcaataaagaagaacaaccagataaaggcttcttagccagtatttcacggggagttatgccttctttaccatttctgtaa

SEQ ID NO: 328 - DNA, 564 bp, Escherichia coli
atggcgggtgaaagctttattttgatgggcgtttcagggagtggtaaaacattaattggtagcaaggttgccgcgttattatctgctaaatttattgatggtgacgatcttcatccagccaaaaatatagataaaatgtcgcagggtattccattatctgatgaagatcgacttccctggctggaacgcttaaatgatgcttcatacagtctttataaaaagaatgaaacaggatttattgtctgttcatcattaaaaaaacagtatcgtgatattttacgcaagggtagcccccatgttcatttcctctggttagatggcgactatgaaactattctcgcgcgaatgcagcgtcgggctgggcattttatgccggtagcgttactaaaaagtcagtttgaggcactggagcgtccacaagcagatgaacaggatattgtgcgcattgatatcaaccatgatattgccaatgtcaccgaacaatgtcggcaggctgtgctggcgatacgacaaaacagaatatgtgcgaaagagggcagcgcctcagatcagcgctgcgaatga

SEQ ID NO: 329 - DNA, 1218 bp, Escherichia coli
atggcaacagcatggtataaacaagttaatccaccacaacggaaagctcttttttccgcatggcttggatatgtatttgatggctttgattttatgatgatattttacattcttcatattataaaagcagatcttggcattacggatattcaggctactttaatagggacagtggccttcatagccagacctattggaggtggtttttttggtgccatggctgataaatatggtcgtaagccaatgatgatgtgggcaattttcatttactcagtcggaacaggccttagcggtattgctacaaacttatatatgctcgcagtttgccgttttattgttggcttagggatgtctggtgaatatgcatgtgcttcaacttatgcggtagaaagttggcctaaaaatcttcaatctaaagctagtgcttttttggtaagtggtttttctgttggaaatattattgcggcacaaataatccctcagtttgctgaagtatatggatggagaaactctttttttataggcctgttaccagttttactagttctttggatcagaaaaagtgctccagaaagtcaggagtggattgaagataaatataaggataaatcaacatttttgtctgtcttcagaaaaccacatctttcaatctctatgatcgttttcctcgtctgtttttgtctatttggtgcaaactggccgataaacggactacttccttcctacctggcagataatggagttaatacagtggtcatttcaactctgatgacaatagcaggtttaggaacactgacaggtacaatattttttggttttgttggtgataagattggtgtaaaaaaagcctttgtagtcggtctaataacttcatttattttcctttgtcctcttttttttatttctgtgaaaaactcttctcttataggattatgtctctttggattaatgtttacaaatttaggtattgcagggttggttccaaaatttatatatgattactttccaacaaaattaagaggattagggaccggtcttatttataacttaggggcaactggaggaatggccgcacctgtattagctacatacatttcaggatattatggcttaggtgtttcattattcattgttacggttgcattctctgccttattaattttgttagttggttttgatattccaggtaaaatttataaactatccgtggctaaatga

SEQ ID NO: 330 - DNA, 717 bp, Escherichia coli
atgaaaaaggctaaaatactttctggcgtattattactgtgcttttcgtccccattaatttctcaggctgcgacactggacgtacgtggtggatatcgtagtggaagccacgcctatgagactcgactcaaagtcagtgagggatggcaaaatggatggtgggcaagcatggaaagtaatacctggaataccattcatgataataaaaaggaaaatgccgcactcaatgatgttcaggttgaagttaattacgcgattaaacttgatgatcaatggacggtgcgcccgggaatgttaacgcattttagcagcaacggcacacgctacggaccctacgtaaaactgtcctgggacgcgacaaaagatcttaattttggcattcgctatcgttacgactggaaagcttaccgacaacaagacttatccggtgatatgtctcgtgataacgttcatcgttgggatggatatgtcacttaccatattaatagtgatttcaccttcgcatggcaaacgacgctatacagcaaacagaacgattatcgctatgcaaaccataagaaatgggcgacggaaaatgcatttgttctacaataccatatgacgcccgatattacgccatacatagaatatgactaccttgaccgtcagggtgtttacaacggcagagataatttatcggaaaacagttatcgcattggtgtgtcatttaaactgtag

SEQ ID NO: 331 - DNA, 726 bp, Escherichia coli
atgttgccaggatgctgcaaaaatggaattgttatcagtaaaatacctgttatgcaagcagggttaaaagaggtcatgaggactcacttccctgaatatgaaataatatccagcgcctctgcggaggaccttaccttattacaattacgtcgttccggattagtcattgctgatttagccggtgaaagtgaagatccacgttctgtttgtgaacattattattctttaatctcacaatatcgggaaattcactgggttttcatggtgtcacgctcctggtattcccaggcagtagaactgctcatgtgccctacggcgacgttattgtctgatgttgaacccattgagaatctggtcaagaccgtacgttccggcaatacgcacgcagagcgtatcagcgccatgctgacctccccggcaatgactgaaactcatgattttagctatcgctccgtcattctcactctttcagagcgcaaggtactgcggctattaggtaaaggatggggcatcaaccagatagcttcattgcttaagaaaagtaataaaactatcagcgcccaaaaaaacagtgcgatgcgtcgactggcaattcacagcaacgctgaaatgtatgcatggataaatagcgcgcagggtgcaagagaacttaacttgccttctgtttatggagatgccgcagaatggaacacagccgaattaagaagagaaatgtcgcactcatag

SEQ ID NO: 332 - DNA, 1902 bp, Escherichia coli
atgagtcaaaacgatatcattatcagaactcattataagtctcctcatagattgcacatcgatagcgacataccaacaccttcatcagagcctattaatcaatttgcgcgccagctcatcaccctacttgatacctctgacttaagttcgatgctgtcatactgtgttactcaggaatttaccgcaaactgtcgaaaaatatcacaaaattgttattccactgccctttttaccattaactttgccacttcacccatccatacagaaaatatactcattacattacactataaaaaagaaatcatttccttattactggaaaccacgcctattaaagctaaccatttgcgaagcatactggattatattgaacaggaacagttaactgctgaagatcgtaaccattgtatgaaactgtctaaaaaaaaatccatagagaaaaaaactatacacccaacagtaaatctcaatggtagtgcatgttttttgcaatctccttctgacgctattttttgtcgccatctgtcattgcaatacgcccttgattcattgagaaatggaaaaggcaaagtcaacctgattaaacattactcctccgttgaatccatacagcagcatgtccccttagtccgggacgcggagttcagagcattacttcgccatcctcctgcagggagtcgcgttatcgcgagtaaggattttggcttcgctttagatattttcttttgtcgaatgatggcaaacaatgtcagtcatatgtccgcgattttatatatagacaatcatactttgtcagtaaggctacgaataaagcagtcagtgtatggacaattaaattatgttgtgtccgtttacgacccgaacgataccaacgttgccgtcagagacacccacaggacagcacggggctttctttcgcttgataagttcatcagttcaggtcccgatgctcagacctgggctgatagatatgttcgcaactgtgcaattgctattctgcccctattacctgtgggagttccaggggctattttcgcgggtattgcatcacgaatgccatttgcccctatacatccatcggcaatgttgttaataatggctacaggccagtctcaacagcttattacattattcaaacagttgcccatactccctgaaaaagaaatcattgaaataataactgcgcagaatagcgttggtacacctgctttatttttggctatgatgaacggacatactgacaacgtgaaaatatttatgcaagaaattcagtcactggtagataatcacatcattcatgaagataatctggttaaattactgcaaactaaaagtgctaacgaaacacctggactttatatctccatgttgtatggattcgatgaaataatcgatatctttctgaatgcattaaccactccaatagcacaagagcttttaaacaaaaaactggtgatgagtattttagccatgaaaatacatgatggtgagccaggattatacgccgcaatggaaaataatcaccctttgtgtgtcacacggttcctctctaaaattaatggcatcgcctttaaatacaagttgagcaaagctaacatcatggatttattaaaaggagctacagcacagggaacccctgcattatacatcgccatgagcaagggtaatgaagacgtcgtgttatcttatatatcgacgctgggtgcttttgcaaaaaaacattcttttagtcaacatcagttatttacactattggccgctaaaaatcatgacaacatgtcagctgttcatatagccattcatcataagcattataaaactgtagaaacatattatgctgctattaatgcaatcagccaaagcctgagttttagtgctgatgaaataaagacgtatttataa

SEQ ID NO: 333 - DNA, 165 bp, Escherichia coli
atgctgcgccatatgggttggactgaagcggctgacctgattgttaaaggtatggaaggcgcaatcaatgccaagaccgtaacttatgacttcgaacgtctgatggaaggcgctaagctgctgaaatgttcagagtttggtgaagcgatcatcgaaaacatgtaa

SEQ ID NO: 334 - DNA, 1083 bp, Escherichia coli
atggctcagctttcgttacaacatattcaaaaaatctacgataaccaggtgcatgtggtgaaggacttcaacctggaaattgccgataaagagttcatcgtgtttgtcggcccgtcgggctgcggtaagtcgaccaccctgcgcatgattgccgggcttgaggagatcagcggcggcgatctgttgatcgacggcaaacgaatgaatgacgttccagccaaagcacgcaatatagcgatggtgttccagaactacgcgttgtatccgcatatgacggtttacgacaacatggcgtttggtctgaagatgcaaaaaatcgccaaagaggtgattgatgagcgggtgaactgggcggcgcaaattctcggcctgcgtgagtacctgaaacgtaagccgggggcgctttccggcgggcaacgtcagcgagtggcgcttgggcgggcgattgtacgcgaagcgggcgtgtttttaatggatgaaccgctctctaaccttgatgccaagctgcgcgtgcaaatgcgcgcagagatcagcaagctgcatcagaaactgaacaccaccatgatctacgtgacccacgatcagaccgaagcgatgaccatggcgacgcggattgtgattatgaaagacgggattgttcagcaagtaggtgcgccgaaaaccgtttataaccaacccgcgaatatgtttgtttccggatttattggatcaccagcgatgaattttattcgcggcacgatcgatggcgataaattcgttacggaaacgcttaaattaaccattcccgaagagaaattagcggttctgaaaacacaggaaagtttgcataagcccatcgtgatgggaatacgaccggaagatattcatccggacgcgcaagaggaaaataacatttccgccaaaattagcgtggcagaattaaccggtgcggaatttatgctctacaccacggttggggggcacgagttagtggtccgtgctggtgcgttaaatgattatcatgcaggagaaaatatcactattcattttgatatgacgaaatgtcatttctttgatgcagaaacggaaatagcaattcgctaa

SEQ ID NO: 335 - DNA, 171 bp, Escherichia coli
atgactaagaaaataaaatgtgcttaccacctttgcaaaaaagacgttgaagaaagcaaagctattgaaagaatgcttcacttcatgcacgggattttatcaaaagacgaaccgagaaaatattgcagtgaagcttgtgccgaaaaagaccagatggcacatgaactttaa

SEQ ID NO: 336 - DNA, 234 bp, Escherichia coli
atgtcaacgaagaacagaacccgcagaacaacaacccgcaacatccgctttcctaaccaaatgattgaacaaattaacatcgctcttgagcaaaaagggtccgggaatttctcagcctgggtcattgaagcctgccgccggagactgtgctcagaaaaaagagtttcttctgaagcaaacaaagaaaagagtgacattactgaattgctcagaaaacaggtcagaccagattga

SEQ ID NO: 337 - DNA, 318 bp, Escherichia coli
atgatcgtgcaaaaagagctggttgctatttacgattatgaggtccctgtacctgaagatccgttttccttcagacttgagatccataaatgctctgaattatttacaggttccgtctatcgactggagcgattccggctacgtccaacatttcatcaacgtgatcgagaagatgctgacccgctaataaatgatgcgttgatttatataagagatgagtgtattgatgagcggaaattacgaggtgaatcacctgaaactgtaatagcaatttttaatcgtgaactacagaatatattcaaccaagaaatagaataa

SEQ ID NO: 338 - DNA, 174 bp, Escherichia coli
atggcactattctctaaaatattaattttttatgtgattggtgtgaacatatcctttgtcattatctggtttatctcacatgagaaaacacatattcgtttacttagtgcattcctggtcggaataacctggccaatgagtctgcctgtggcattacttttttctctcttttag

SEQ ID NO: 339 - DNA, 480 bp, Escherichia coli
atgcgtttacatgttaaattaaaagagtttctttcgatgttttttatggccatattatttttccctgcattcaatgcttctttgttttttaccggagttaaacctctatattcaataataaaatgctccacggaaatattttatgattggagaatgttgattctgtgcttcggtttcatgtcgttttcctttttaaatattcatgtaattttacttacgataataaaatcattcttaatcaaaaaaacgaaggtagtcaatttcgccacagacataacaatacagctaactcttatatttttactaatagctatcgtaatagcacctttaatagctccttttgtcacaggatatgtcaatactaattatcacccctgcggtaataatacgggaattttcccaggagcaatctatattaaaaatggcatgaaatgtaataatggatatatttctcgcaaggaagattcagcagttaaataa

SEQ ID NO: 340 - DNA, 102 bp, Escherichia coli
atgcgcacatacaatccaaactctcttctcccttcacagatgcagaaatgcacctgcaattctttgcatctagcgtttgacctctgcggaggggaagcgtga

SEQ ID NO: 341 - DNA, 195 bp, Escherichia coli
atgtcaactaagaacagaacccgcagaacaacaacccgcaacatccgctttcctaaccaaatgattgaacaaattaacatcgctcttgagcaaaaagggtccgggaatttctcagcctgggtcattgaagcctgccgtcggaggctaacgtcagaaaagagagcatatacatcaattaaaagtgatgaagaatga

SEQ ID NO: 342 - DNA, 258 bp, Escherichia coli
atgcagaaacccttaccagtcaggtggctgataatacaagggttaacagagaatgagcactgcggaatacaggcatatgcctgtaatacagagagtcaggaagacctgtacgctgaagtgcccttagtcggtagactaacgggcattgaagaagtgaaagtcgaagctattgcgatgagcaaacttcataatatgagttgtccgccttatatggggcatagtgcggctgttattttccatttaatttacctttcctga

SEQ ID NO: 343 - DNA, 174 bp, Escherichia coli
atgagttattcctcatttaagattattctcattcacgtaaaaaacataattcctatcatcacagccacgctcattttgaattatctgaataatagcgagcgttctttagttaagcagatcttaattgaagacgaaattattgtgtgtgcaacttacttaataccggacatctaa

SEQ ID NO: 344 - DNA, 84 bp, Escherichia coli
atggtgggccgttatcgctttgagttcattctgatcatccttattttatgcgcactgattaccgcccgtttttatctttcctga

SEQ ID NO: 345 - DNA, 165 bp, Escherichia coli
atgcataccccgatcggggtaaaacctgtagcaggatcaaaagagtggcgggaagcgtggcaaaaacgggcttttgctcacatttcaaatggttataaatatatttatatagcgattgattcaccagagatatttctgctggtttgctctctcattagaatttaa

SEQ ID NO: 346 - DNA, 156 bp, Escherichia coli
atggaaaaacttacaacggaactacactccttaagtgagatggaccgaagacatgtagtctctattttagccgaaatagctaatggctatgatgattttaatgacatgttgatttatttagaattttacccgaatcataagattctgatatcttaa

SEQ ID NO: 347 - DNA, 204 bp, Escherichia coli
atgaatatatcatatgtgaatagcaacaaaacgacatctttacctgttgagctagatgcactaaataataaagatatctcttatgccaaagatttctttttatacatagaaacacagttaaaaattgcaaaagattttttagacctggagaagaagtatcaagttctattgcaagtaaagtttttcacgcatttattgatttag

SEQ ID NO: 348 - DNA, 126 bp, Escherichia coli
atgatcaagaattttatcttcgataatctcataattttagcagtgccatttatgataaaaacatcccttaaaaccaatctaatctttttcttcctctgtgtatttgttccccatatggcgtcataa

SEQ ID NO: 349 - DNA, 1608 bp, Escherichia coli
atgaaagcaattgacaatcagattagaaacatctcttcaagccatcaagataagcattcagataaagttaacagtcatcaacaccatggcaaggttgataaaacacatcgtgcaaagatagttgaatttgataaactggataatgattcgcaaatagataacgattttggcctgcatatcatctatttcctgcaacatggtcactggaaggtaaatgatcgtagtcaccagatggagaaagtatggttttataatagtgaaccttctatagatattcaagaatataatagattcgccgacaatactactgatacgtttatctttacaattataccagacaataaccatgtgttaaaattatcgtctcccattaccgttactgttgagtgtaagggcggttattattttattaattcctctggagataaatcagatataatttataaagttgatgggctttctatcatagcgagaaatttctttactcttcttagtggtaatttcaaacctgactggcgttgggatgtctctaaagagacgtttactaaggaaaagtttgatagctatgttaaatctgtgttttcaaaaatagacttctataaacagtgtggtgtgattaacccacaaaatgccaacacggcttattttggcgatacagatggaagagtaggcgctgtactttatgcattgctcgtttcagggcatataggcatcagggaaaagggttggagtttattatgtgaattattaaaacacgaagagatggcttcatctgcatacaaacataaaaataataaagtgctctacgatttattaaatacgagagacatgatcttgaatgagttgcatcaacatgtttttttaaaggacgatgcgataaccccttgtatcttccttggggatcatacaggcgatagatttagtactatttttggtgataaatatatccttactttgctaaattctatgcgaaatatggagggtaataaagatagccgtattaataaaaatgtcgtcgttctggctggaaatcatgaaatcaattttaatggtaactatactgcacgactagcaaatcataaactctctgccggtgatacgtataacttaattaaaacgctcgatgtttgtaattatgactcagaaaggcaagttttaaccagtcatcacggaataataagagatgaagaaaaaaaatgttattgtctcggtgctttgcaggttccatttaatcagatgaaaaatcctactgatcctgaggaattagccaatatttttaataaaaaacataaagaacacatggatgatcctctattccatctaatccgaagcaatactttgaaacccacacctgtatatgctaattattttgataacactactgatttcagaccagcacgtgaacgtatcttcatatgtggggagacactcaaaggtgaagaccccagcaaatacattagacaaaaatatgggcatcatgggcccggggtagatcataatcaacaatttgataatggtattatggggctaaattccctgaaggaagcacgtgataaaaataataaaataatttattcctcagggcttagttgttttcaactacattaa

SEQ ID NO: 350 - DNA, 1320 bp, Lactococcus lactis
atgccagtttctcgtattaaagttaaaaatagacatttaaaaaagaaagccaaaaaaccactggctttttataaaccagcgaccaaatttgctggcgctgttctcattgcaggaactttgacaaccactcatgagcttttgctccaacaaacaagcccaatggttcaggctgcaaccaattccacagaagcttttattgaaagtattgctgcatcagcaaaaccagttgccgatagtaatggtctttatccttcagttatgattgctcaagctattttggaaagtaactggggttcaagccaactttctcgtgccccctattataatttattcggtattcaaggaacttatcaaggaaaaagcgttgtttttaaaactcaagaatatctcaatggtaaatgggtcacaaaagatatgccatttagggtttatccttcctttaatcaaagtttccaagacaatgcttatgttttaaaaactacaaactttggaaatggtccttattatgctaaagcttggcgagcaaacgcggcaacctatcaagctgcaaccgcagccttaacaggaaaatatgcaactgaccctaattatggtgcttccctgaatcgaattatttctcaatataatttgactcgttttgacggtgcttcttctgctggtacttctaattccggtggttcaacagctacaaataccaataataattcaaatacaagctcaaccacttatacagttaaatctggcgatacactttggggaatttcgcaaaaatatggaattagtgttgctcaaattcaaagcgcaaacaatcttaaaagtacagtcatctatattgggcaaaagcttgtattgacaacttcaagttcttcgtctaatacaaatagttcaacttcttcaggaaattctgccggaactacaacgcctactacttcggtcactcctgccaaaccagcttcacagacgacgattaaggttaaatctggtgatacgctttggggactctctgtcaaatataaaacgacgattgctcaactcaagagttggaatcatttgaattctgatacaattttcattggacaaaacttgattgtttcacaatctgccggttcttcaagttcttcaacaggttcaagctcagcctctacgagttcaacttctaactcttctgcagcttcaaatacctctatccataaggttgttaaaggagatacgctttggggactttcacaaaaatctggtagcccaattgcttcaattaaggcttggaatcatttatcaagtgataccattttaattggtcaatatcttcgtattaaataa

SEQ ID NO: 351 - DNA, 1428 bp, Lactococcus lactis
atgacgacttttggcgtggctggccatgctgatggagtaactgttggaagtagttcagatgcatcatcaagcacaggtagctcaagttcatcatcaggtacagggggttcaagttcatcatcaagtacaggtagctcaagctcatcatcaaattcaaatgcttcaagttcatcgtcaagtacaggtaattcaagttcatcatcaaaaccaagtacttcaggttcgacatcaaaaccaagtaatccaagttcatcaacaaataataattcaactagtaattcctctacaacaactcaagcaccatcaacttcagtttctaccatagctccttcagcatcaacttctacagttgcaccctctaattattcacaggataatgcctactatcaaacatcaactgcagcacaaattcctaattcttcagcagattcagctccttctatttacgctggccctgttttgaaaacaattgaagcagctaagtcaattgataaaattgatacttctagtacagaagcctttattaaaagtattgcagaccgcgtgagaattttagctggtaagaataatttgtatgcatcaattatcttggcacaggcgattttagaatctggttctggtcaaagtaatatgagtcagcagtattttaatattttcaatattacaggtgcttatttaggaaaatcaatttcatttaagacggaagaattttcgggaaataatccttattatattgaacaaagttttagagtttatagtaattatgaccaagccttggatgattatattaatttaatgattaaagggacaacttggaactcagaaatttatgctggcgcatggaagtcacatgctaagacttaccaagaggcggctcaagcattgcaaggaatttttgctactgacccagcatatgcacaaaaattaattgaaattattcaagaatataaattagatgcttatgataatgttgatagtacaacacaagttgtagatagtaaaattcctgaaagtccattggcggcatcaaaattagataattcagcttatccagaatataatggggtagaatatccaggtgctgatagttatgcttttggtaattgtacacagtatgtttataaccgtatcattcaattaggtgggctcgttggaacacatatgggaaatggtggagaatggggaattaatgcccaagctcaaggttatttcacaacaactgttccaactgagggttatgctgttagcttcccaccaggagtagctggttcaagttcagaatatggtcacgtagcttttgttgaaaaggtttattcagataactctattctcgtttcagagatgaatgttaaaggtaataatattgtcagcgaacgccatatttctgctggtgtagctgctttggcaacttatattcaacctaaataa

SEQ ID NO: 352 - DNA, 1086 bp, Lactococcus lactis
atgaaacagaaacataaattagcgcttggtgcgtcaattgttgctttggcaagtcttggtgggattaaagcacaagctgcatctgttcaagaaattattaacgctgcggtaccagtggcaaatgactacggactttatccatcagtaatgattgcccaagggattttagaatcaagtggtggacaaagtgccttagcaagcaattataataatatttttggagttaaatacacttctggtacacctgtttatctaccaacacaagagtatttgaatggaacaatgacaaatgttgttgaacccttccaagcttatagctcagtttatgacgcatgtgttgcccaagctaaaatgttacgtgcttcatcatattattctggggcttggcgtgaaaatacaagttcttacttagatgcgacagcttggcttgaaggacgttatgccacggatccaacttatgcttctaaattgaatagcgtgatttctgaacttggtttaagtgtttatgaccaaggaggagaaatatcaggaggaactgctgttacaactagttcatcagcctcaacaaattcagctggcacatacaaagtacaagagggtgattcattatcagcaatcgctgctcaatatggtacaactgttgatgcacttgtgtcagcaaatagtttagaaaatgcgaacgatattcatgtaggagaagttttgcaagttgctggtgctagcacaactacaacaagtaccaatacaacttccaatgtatcgtcaagttctacttataccgtcaaatcaggagatagtttatattcgattgcggaacaatatggaatgactgtttcatcactgatgtcagccaatggaatttatgatgttaattcaatgcttcaagtaggacaagtattgcaagtaactgtaagtactagtgcaacaacttcaaacacaacgacttcaaacagttatacaattcaaaatggtgacagcatttattcaattgccacagcaaatggtatgacagctgaccaattagcagccctcaatggatttggaattaatgacatgattcatccaggacaaacaattagaatctaa

SEQ ID NO: 353 - DNA, 222 bp, Lactococcus lactis
atggcagtatttgaaaaagtacaagatattatcgttgacgaactcggtaaagaaaaagaagaagtaacactcgaaacttcatttgaagagctcgacgctgattcacttgaccttttccaaatcatcaatgacatcgaagacgaattcgacgttgaagttgatacagaagcagatatgaaaacagttgctgacctcgttaaatacgtagaaaacaacaaataa

SEQ ID NO: 354 - DNA, 2712 bp, Lactococcus lactis
atggcaactaaaaaagccgctccagctgcaaagaaagttttaagcgctgaagaaaaagccgcaaaattccaagaagctgttgcttatactgacaaattagtcaaaaaagcacaagctgctgttcttaaatttgaaggatatacacaaactcaagtcgatactattgtcgctgcaatggctcttgcagcaagcaaacattctctagaactcgctcatgaagccgttaacgaaactggtcgtggtgttgtcgaagacaaagataccaaaaatcactttgcttctgaatctgtttataacgcaattaaaaatgacaaaactgttggtgtcatttctgaaaacaaggttgctggatctgttgaaatcgcaagccctctcggtgtacttgctggtatcgttccaacgactaatccaacatcaacagcaatctttaaatctttattgactgcaaaaacacgtaatgctattgttttcgctttccatcctcaagctcaaaaattttcaagccatgcagcaaaaattgtttacgatgctgcaattgaagctggtgcaccggaagactttattcaatggattgaagtaccaagccttgacatgactaccgccttgattcaaaaccgtggacttgcaacaatccttgcaactggtggcccaggaatggtaaacgccgcactcaaatctggtaacccttcactcggtgttggagctggtaatggtgctgtttatgttgatgcaactgcaaatattgaacgtgccgttgaagaccttttgctttcaaaacgttttgataatgggatgatttgtgccactgaaaattcagctgttattgatgcttcagtttatgatgaatttattgctaaaatgcaagaacaaggcgcttatatggttcctaaaaaagactacaaagctattgaaagtttcgtttttgttgaacgtgctggtgaaggttttggagtaactggtcctgttgccggtcgttctggtcaatggattgctgaacaagctggtgtcaaagttcctaaagataaagatgtccttctttttgaacttgataagaaaaatattggtgaagcactttcttctgaaaaactttctcctttgctttcaatctacaaagctgaaacacgtgaagaaggaattgagattgtacgtagcttacttgcttatcaaggtgctggacataatgctgcaattcaaatcggtgcaatggatgatccattcgttaaagaatatggcgaaaaagttgaagcttctcgtatcctcgttaaccaaccagattctattggtggggtcggagatatctatactgatgcaatgcgtccatcacttacacttggaactggttcatgggggaaaaattcactttcacacaatttgagtacatacgatctattgaatgttaaaacagtggctaaacgtcgtaatcgcccacaatgggttcgtttgccaaaagaaatttactacgaaaaaaatgcaatttcttacttacaagaattgccacacgtccacaaagctttcatcgttgctgaccctggtatggttaaatttggtttcgttgataaagttttggaacaacttgctatccgcccaactcaagttgaaacaagcatttatggctctgttcaacctgacccaactttgagcgaagcaattgcaatcgctcgtcaaatgaaacaatttgaacctgacactgtcatctgtcttggtggtggttctgctctcgatgccggtaagattggtcgtttgatttatgaatatgatgctcgtggtgaagctgacctttctgatgatgcaagtttgaaagaacttttccaagaattagctcaaaaatttgtcgatattcgtaaacgtattattaaattctaccatccacataaagcacaaatggttgcaattcctactacttctggtactggttctgaagtgactccatttgcagttatcactgatgatgaaactcatgttaagtacccacttgctgactaccaattaacaccacaagttgccattgttgaccctgagtttgttatgactgtaccaaaacgtactgtttcttggtctggtattgatgcgatgtcacacgcgcttgaatcttacgtttctgttatgtcttctgactatacaaaaccaatttcacttcaagcgatcaaacttatctttgaaaacttgactgagtcttatcattatgacccagcgcatccaactaaagaaggacaaaaagcccgcgaaaacatgcacaatgctgcaacactcgctggtatggccttcgctaatgctttccttggaattaaccactcacttgctcataaaattggtggtgaatttggacttcctcatggtcttgccattgccatcgctatgccacatgtcattaaatttaacgctgtaacaggaaacgttaaacgtaccccttacccacgttatgaaacatatcgtgctcaagaggactacgctgaaatttcacgcttcatgggatttgctggtaaagatgattcagatgaaaaagctgtgcaagctctggttgctgaacttaagaaactgactgatagcattgatattaatatcaccctttcaggaaatggtgtcgataaagctcaccttgaacgtgaacttgataaattggctgaccttgtttatgatgatcaatgtactcctgctaatcctcgtcaaccaagaattgatgagattaaacagttgttgttagatcaatactaa

SEQ ID NO: 355 - DNA, 564 bp, Lactococcus lactis
atgtcattagtaggtaaaaaaatagaagaattttcaacagatgcttatcttggtgggaaatttattaaagtttccgataaagacttttatggaaaatggtctgtgctttgtttctatccagcagacttttcatttgtttgtccgacagagttagaagatttagaagaaacttatccaaccttgaaatcgcttggtgtagaagtttactcagcttcaactgacacccattttgtccatgctgcttggcatgaacatagtgatgctatttcaaaaattacttatccaatgcttgcagacccttcacaaaaaatttcacgtgcttttgatgttcttgatgaagaagcaggattggctcaacgtggaacatttattattgacccagacggtgtgattcaagcgcttgaaattacggctgatggtattggacgtgatgcaagtcaattggtcgataagattaaagctgctcaatatgtgcgtaatcatccaggggaagtttgtcccgctaagtggaaagaggacggagcaagtcttcacgttggtattgaccttgtaggtaaaatatag

SEQ ID NO: 356 - DNA, 711 bp, Lactococcus lactis
atgacagaaatcacacaactttttcaatataatacccttggagctttaatggcaggcctttacgaggggacaatgacaattggtgaacttctgaaacatggtgatttaggaattggaactttagattctgttgatggagaattgattgttttggacggtaaagcctaccaagctaaaggtgataaaaccatcgtagaattaactgatgacatcaaagttccttatgctgcagttgttccccatcaggcagaggtagtttttaaacaaaaatttacggccagtgataaggaattagaagaccgaatcgaaagctattttgacgggcaaaacttatttcgctcaatcaaaataactggtgagtttccaaaaatgcacgttcgtatgattccacgggcaaaatcagggacaagatttgtagaagtttcacaaaatcaacccgaatacactgaagaaaacgtcaaaggaacaattgttgggatttggactccagaaatgtttcatggtgtgagtgttgctggttatcatctccattttattagtgaagattttacttttggtggacatgtccttgattttattattgataatggtactgttgaaattggcgcaattgaccaattgaaccaatcattccccgttcaagatcgcaaattcttgtttgctgaccttgatattgaagcactaaaaaaagatatcgatgtagctgaatga

SEQ ID NO: 357 - DNA, 1665 bp, Lactococcus lactis
atgtctgagaaacaatttggggcgaacttggttgtcgatagtttgattaaccataaagtgaagtatgtatttgggattccaggagcaaaaattgaccgggtttttgatttattagaaaatgaagaaggccctcaaatggtcgtgactcgtcatgagcaaggagctgctttcatggctcaagctgtcggtcgtttaactggcgaacctggtgtagtagttgttacgagtgggcctggtgtatcaaaccttgcgactccgcttttgaccgcgacatcagaaggtgatgctattttggctatcggtggacaagttaaacgaagtgaccgtcttaaacgtgcgcaccaatcaatggataatgctggaatgatgcaatcagcaacaaaatattcagcagaagttcttgaccctaatacactttctgaatcaattgccaacgcttatcgtattgcaaaatcaggacatccaggtgcaactttcttatcaatcccccaagatgtaacggatgccgaagtatcaatcaaagccattcaaccactttcagaccctaaaatggggaatgcctctattgatgacattaattatttagcacaagcaattaaaaatgctgtattgccagtaattttggttggagctggtgcttcagatgctaaagtcgcttcatccttgcgtaatctattgactcatgttaatattcctgtcgttgaaacattccaaggtgcaggggttatttcacatgatttagaacatactttttatggacgtatcggtcttttccgcaatcaaccaggcgatatgcttctgaaacgttctgaccttgttattgctgttggttatgacccaattgaatatgaagctcgtaactggaatgcagaaattgatagtcgaattatcgttattgataatgccattgctgaaattgatacttactaccaaccagagcgtgaattaattggtgatatcgcagcaacattggataatcttttaccagctgttcgtggctacaaaattccaaaaggaacaaaagattatctcgatggccttcatgaagttgctgagcaacacgaatttgatactgaaaatactgaagaaggtagaatgcaccctcttgatttggtcagcactttccaagaaatcgtcaaggatgatgaaacagtaaccgttgacgtaggttcactctacatttggatggcacgtcatttcaaatcatacgaaccacgtcatctcctcttctcaaacggaatgcaaacactcggagttgcacttccttgggcaattacagccgcattgttgcgcccaggtaaaaaagtttattcacactctggtgatggaggcttccttttcacagggcaagaattggaaacagctgtacgtttgaatcttccaatcgttcaaattatctggaatgacggccattatgatatggttaaattccaagaagaaatgaaatatggtcgttcagcagccgttgattttggctatgttgattacgtaaaatatgctgaagcaatgagagcaaaaggttaccgtgcacacagcaaagaagaacttgctgaaattctcaaatcaatcccagatactactggaccggtggtaattgacgttcctttggactattctgataacattaaattagcagaaaaattattgcctgaagagttttattga

SEQ ID NO: 358 - DNA, 1476 bp, Lactococcus lactis
atgaaaacaatccttcaagcttttgaatggtatttaccctcagattctcagcactggaataatataaaagagaatattcctgacttgggaaagttaggattttcaggattgtggttacctccagcttccaaggcagcttctggagttgaagatgttggttatgggacctatgatttattcgacttaggggaatttgatcaaaaagggacaattcctacaaaatatgggactaaagatgaatatcttgatttaattaatacactacaccacaacaatattgaagtgtatgcggatatcgtttttaatcacatgatgggtgctgatgaaacagaaactattgaagctgatattaaagcagaagataatcatcttcataacatcgaaaataataaaactgttgaagtttggaccaaatttacatttccaggaagacaaggaaaatacgacaattatatatggacctggcacaactttacgggaattgattatgatgaaaggaaaaatcaagaagaaattcttgaatttgaaggacatgaatgggatgagaatgtagattcagagaataataattttgattatttaatgggggctgatcttgattttagtgtttcggaaacggtagaacaacttgaaaaatggggacattggttttcagaaatgacaaaaattgatggttttcgattagatgcaattaaacatattgatttcaaatattttgataaatggcttgagcagagagcaaagcaattggatagaaaactttttattgttggcgagtactggtctgatgatcttggcaaattagagtattatctagaacaatccagtgatagaatacaattatttgatgtaccactacattttaatatgaaagaagcctcttcaaccaatggagaatttgatatgcgtactctttttgatcacacactcactgccagccagccagaactctcggtcacttttgttgataaccatgatactcaagaaggacaggctcttcaatcttggattccagcttggtttaaagagcacgcttatagcttaattttacttcgaaaaaaagaaactcctactgtcttttggggagatttatatggaataccctcacataatgttaatcctgtaggtgataacttaagaactatgatagcattacgtaaggactctgagtttttaagggaaaatgattattttgatcatcctgatattattggatggacaaatattttaaaaatagataataaggaatatggattatcatgtattttaactaataaaaatggtggctcaaaatatatgataattgataaggcgtatgcaggtaaagtttatatagatttatttggaagacacgaaatacctattacgctggatcaaaatggtggagctgaattttatgtcaatgatggaagtgtttcggtttgggtagataaggaaattgtttcaaaaattgatcaaatgaactttcaaaactaa

SEQ ID NO: 359 - DNA, 645 bp, Lactococcus lactis
atgcaagaaataattatccaagtcatgaaccaatttggctactttggtgttgcctttctcattatgattgagaacatcttcccaccaattccttccgaagtaatcttaactttcggtggtttcatgactacttatagcgaactggggattatcggcatgattatcgcagccactattggttctgtgcttggtgcattgatactctacttcgtcggtcgtcttttaagcgttgaacgcttagaaaaattagtttctggacgtttaggaaaagtacttcgtcttaaaccagaggacatcacaaaagctgaaaaatggtttttaaagagaggatatgcaacaatcttcttctgtcgattcattcctttaattagaagtctaatttcaatccctgctggttctgctaaaatgaaactcccaagttttcttattttaacaaccttgggaacacttatttggaacattgttctagtgtgccttggagccgctcttggtgataactgggagatgattgctggaattcttgattcttactcttcagttgtggttgtgattttagggattattttcatccttgcgattcttatctttgtcaagaaacgatttttccccaaaaataaaaactattcatctgatacagaaaaataa

SEQ ID NO: 360 - DNA, 1473 bp, Lactococcus lactis
atggacgcagaaaataaaaaaggaattggccttgctgctttagttgcgattattgtttctggagcgattggtggtggggtattcaatctctctaacgatttagcaacaaatgcatcacctggtggtgttgtcatttcatggatcgttattggttttggtattttaatgttggttttatcactaaatcatttggtggtaaataaacctgaactttcaggtgtatcagattatgcacgtgctggctttggtaatatggttggtttcatttcaggttggggttattggttatctgcatgggcaggtaacattgcctttgctgttttgatgatgacttccgttgactatttcttccccggcgtatttcaagctaagaatggttctttgaccattctgtcagtaattgttgtttcaattgtttcgtggggattgaccttactcgttatgcgaggtgttgaaggggctgctgctattaatgcaattgtcctcgttgcaaaattgattcccttgtttgtttttgtaattgctggaatagtaacatttaaagctggagtattcagcgctcacttctggcaaaatttcgttgcgaatacaaatgctgatggtgtcatcaagagtttaacttggtcaaatatgactggcggagatttattcagtcaagtcaaaggttcacttatggttatgatttgggtctttgtcggtattgaaggtgctgctatgatgggtgaccgtgcaaaacgtaaatcagatgccggtaaagcttcaattcttggtttgattgccttgttagtaatttatatcttgctctcattattaccatttggttttatgagtcaacaagagttagcaaacacaggacaacctggtttagttcatattttgaacgccatggttggtggttggggtggctcactaatggccattggtctggtgatttcacttcttggtgcttggttatcatggacaatgcttccagttgaggcaacacaacaattgtcagaacaaaaattacttcctagttggtttggtaaacttaatgacaaaggtgcacctaaaaactcacttttgttgacacaattaatagttcaaatcttcttgattgttacttattttgtagctgatgcttacaatgtctttgtttacctttgtactgctgttatcatgatttgttacgccttagttggtttatacctctttaaattagggattcaagaaaagaaaacaagtaacattattattggtttcatcgcagctgctttccaaattttagcattgtactattcaggttggcaatttgtttggctttcattaattctctatgctgttggtttcattctttatgctttgggcaaaaaagaatatggcactaaaatgtccacagcagaattaattgcaacttttgttttaacagttttaggaatccttgctgtttttggagtatatggaaactggcttgcaagatgcacttggaattga

SEQ ID NO: 361 - DNA, 1131 bp, Lactococcus lactis
atggaacttgtacaatttggttgtgaagactggctcaatgtttgggaaaaatctgcaacgattgatattgctcagtcaaccattgattcgttatctttggaagaagttttggcctttgaagaagataatggcgaagcttttatgtcacagatgatgaaagaaaaattcagttatggttggattgagggttcaccagcctttaaatcagaagtggcaaaactttataaaagagtgccagaggataatattttatctacaaatggagctaccggagcaaatttccttacaattttaggattaattggtcaaggcgatcatgtgattgctcaatatccttcttatcaacaactgtatgattggcctaaaacattaggtgcccaagttgattattggcatattaaagaagaaaataattggttgccacaaattgaagaattacgtcgtttagttaaaagtaatacaaaacttatttgtttaaacaatgcggcccaacccactggagcaatcatgagtcctaaatttttgtcagaagtggttgaaattgcacgcagtgttgatgcttatattctttgtgatgaagtttatcttccactagatgaagaaacgccttattcacctattgctgatttatacgaaaaaggaatatcaactaactctatttctaaaacttactctgtaccaggaattcgtgtgggttgggtagccactcaagaccgtgacctttgtaatgaatttagaaaaatccgggattataccttgatttgtaccggggtatttgatgacgccgtagcggctttagtattgaaacataaagataaagtacttgaacgcgctcgtaaaattgtcaaaggtaatttatcaattttgaaagaatgggtggaaaatgaacctttagtctcaatggtttatcccaatgcagtctctgtaagttttgttaaatttgaagaacttgatccgacaaaaactgaagattttgcaatccaacttcttcgtgaaaaaggtgtcctaattattcctggaaatcgttttgatttatcaggctatgctaggattgggtattgtacagatgaaacaaccttacgtcaaggccttaaactcttatctgaatttttgagagaatatcaggtttga

SEQ ID NO: 362 - DNA, 1023 bp, Lactococcus lactis
atgacttttaaagaactcagtaacaaaattaacattaaagatgtaagagagctaaatcatttaaatgatgagcaacaagaaaagaaagaaaaacgtgataaggaacttgaagcgataattaagggtgaagacgatagaatcctcttagtcattggcccctgctcatcggataatgaagctgcagttctagaatatgctcacagattgttaaaacttcaaaaagaagtagaagataaaatttttattgtgatgcgtgtttatactgcaaaaccgcggacaaacggagatggctataaaggcctcattcacgaacctgatgcagatggacatacagaccttatcaatgggataaaaatggttcgtgaccttcactataaagtaattactgaaactggtctgactacagcagatgagatgctatacccagaaaatctaccattagttgatgacttagtaagttactatgcagttggcgctcgctcagttgaaaatcaacaacatcgctttgttgcctcaggaatagatgccccaacaggaatgaaaaacccgacatcagggaatttaaaagttatgtttaatggaatgtatgcagcccaacaatctcaagattttctatttgggaatgctgaagtagaaacatcaggaaatccattagctcatgccatccttcgtggtggacaagatgaaaatggtaaaaaccatccaaattactatacagataatcttcttgaaagtatcgaaatatacgaaaaaatgggtttacaaaatccatttattgttattgatactaatcatgataactctgggaagaagtatatggaacaaataagaattgttcgtcaaacattagtcaatcgtaattgggatgaacaaattcataaatatgtcagaggatttatgattgaatcatatcttgaagacggtcgtcaagacaaaccagaagtatttggaaaatcaatcactgacccatgtttgggttgggataaaacagaagaacttattaatgaaatttataattcgtga

SEQ ID NO: 363 - DNA, 564 bp, Lactococcus lactis
atggagtttagattagcgaaaaagtctgatgctaaaagacttttagaaatttataaaccttatgttgaaaaaactgccattacttttgagtatgaagtcccaacgattgcagaatttgaaaagcgaattgaaaaaataggaagtcgctatccttatattgtggcgattgaaaatgacaaaatcattggttatgcttatgctggcgcttatcgagaacgggcggcttatgattgggtggttgaattatcaatttatttagatgaaaatgaacggcaacatggcgctggtagtgccctttaccaaaagttactgacagctttatcggtacttaattatcagcgtgcttatgcttgtattacctatccaaatccagcaagtgttgcatttcataaaaaatttggttttgaacaaattggactttttccaaaagcgggttataagtttgaacaatggtatggtattgtttggttagaacgctctctccaaactactgataaagttactgcgataaaattactgacagatttgtcagagaatgaactagaaaaaatcttggctaattag

SEQ ID NO: 364 - DNA, 1023 bp, Lactococcus lactis
atggcaattaatttagactgggaaaatttaggattcagctatcggaacttaccttttcgttatatcgctcgttttaaagatggaaaatggagtgctggagaactaacaggagataatcaacttcatattagtgaatcatcacctgctttgcattatggtcaacaaggttttgaaggattaaaagcctatcgaacaaaggatggttcaatccaacttttccgtcctgaccaaaatgctgctcgtttgcaaaatacggcgcgtcgactttgcatggcagaagttccaactgaaatgtttattgatgcagttaaacaagtggtgaaagcaaacgaagattttgtgcctccttacggaacgggtgcaacgctctatctccgtccacttttgattggggttggtgacgttattggggtgaaacctgctgatgaatatattttcaccgtttttgctatgccggttggttcttattttaaaggcggattggctccttcaaaatttgtaatttcaagagattatgatagggcagctccacttggtacaggtggtgccaaagttggaggaaattatgcagcttctttacaagcagaagttggtgccaaagcttcaggctatgcagatgcaatttatcttgacccaagcacacatactaaaattgaagaagtcggggcagcaaatttctttggaattacagccgataatgaatttatcacaccattgagtccatcaatcttaccttcaattactaaatattctcttctttatttagctgaacatcgtttgggactcaaagcgattgagggtgaagtttatgccaaagatttaggtaaatttgttgaagcaggagcttgtggcacagcggcaattatctctccaattggtcgtattgacgatggagaagattcttacattttccattcagaaacagaagtaggaccaacggttaaacgtttatatgatgagttggttggcattcagtttggtgatgttgaagcaccagaaggctggatagttaaagttgattaa

SEQ ID NO: 365 - DNA, 1053 bp, Lactococcus lactis
atgaaaaaacgtgtaatcgcagttagtgctctcgcacttgcatcagtcgcagtccttgcaggatgccgttcacatgacgcagccggatcaggtaaagcaaaaactgaccttaaagcagcaatcgtcaccgaaatcggtggtgtaaacgaccgttcatttaaccaatccgcttgggaaggtcttcaaagctgggggaaagaaaataacctgaaaaaaggtacaggatacacttatttccaatctaactctgcttcagattatacaactaactataactctgcggaacaacaaggctacaaacttttgtttggtaccggattctctttacaagatgcaacatcagctgcagcaaaaaataatcctaaatctaactttgtaatcgttgactcagtcatcaaagaccaaaaaaatgtggcatcagcaacttttgctgataacgaaagtgcctaccttgctggtgtagctgccgcaaaagcaactaagactaacaaaattggtttcatcggtggaatgcaatcagatgttattacacgttttgaaaaaggttatgaagctggagctaaatctgtaaacccagatattaaagttgatgttcaatatgcgggatctttctctgacgcagccaagggtaaaacaattgctgcagctatgtacggtgctggtgatgacgtagtttatcaatgtgctggtggtgtaggaactggtgtcttcagtgaagctaaagcattgaactcaactaaaaatgaggctgacaaagtttgggttatcggtgttgaccaagaccaagaatatcttggaaaatacaaatctaaagacggtaaagattctaactttgtacttgtatcaacaatcaaagaagttggtaatgttgtaaaagatatcgctgacaagactaaagatggtaaattccctggtggaacaatcgttacttatgaccttaaaaatggtggggttaacttaggacttgacagtgcaaattcagaaatcaaagatgcagttgctaaagcaaaagcagatattattgatggaaaaatcactgttccttcaaaataa

SEQ ID NO: 366 - DNA, 1503 bp, Lactococcus lactis
atgaatcagctaatttcaacttttcaaagccagcaaggccaattttggcaggcgcttttagaacatatccagatttcattaatttcaatttttattgcaattctgatttcgattcctttagctttattgttacgacgtcttcccaaaattgctgaaccagttttgcaagtcaccggaatttttcaaactatacctagtttggcactgctaggactcttgattccattcatcggaatcggaagtttaccagcaattgtcgctcttgttgtttatgcgattttccctattgttcaaaatacttatactggtttagagcaaattgaaccttctttaatcgaagctgcaacagcatttgggatgaatcgaagagaacgattgatgaaatttgagctctcattagcgatgcactttatcatggcaggaattcggacgagtacagttatggtcattggtaccgcaacactagctgctttgattggtgctggaggcttagggaactttattctgctcggaatcaatatgaatgatgtttcattgattttaattggagcaatttcatcagcactattagcgattattttcagtagtcttttaaaatttttagaaaaagccaagataaaaacaattctcatcagttttttcattggcttactcgttcttggaggctcttattatcgacctcaaacttctaatcatccacaaattacaattgctggtaaattgggagcagaacctgatgttttgattaacatgtataaactaatgattgaaaaagatagtaatattcgcgtgaacttaaaatctaattttggtgataccactttcttatataatgctttgaaagctggaaaaattgatttatatcctgaattcacaggaaccattacttcaacatttttgaaagatccagtgagttcaactgatcctaatgtcgtttggcaaaaggcagaagaaggaataaaaaaacttaatcaatttacatatctgtccccaatgaaatttcaagatacatatgcaattgccgtcaaatctgattttgctaaagagcatcagctcaccaaaatttctgatttagcgaatgtttcaggtttaactgcaggctttgacgttgagtttgctaatcgttcagatggaaatattggtttgagaaagctttatggtcttgatttaaatgtcaaaaccatgcaaaatagtttaatttataaagcactaaattctggtgctgtgaatgtcgctgaggtttattctactgatagtcaaatcaagcaatataatctgactgtcctgaaagatgataaaaatcttttcccaccttaccaagcagcaccattgatgaaagaaagtttattaaaaaaatatcctgaactcaaaaagattctcaataaactgtcaggaaaaattactgaccaagagatgattgagatgaattatgatgttaatgtcaaacaagaagatgctgcgaaagtagcagaaagatatttaaaatctaaaggattgatttaa

SEQ ID NO: 367 - DNA, 1041 bp, Lactococcus lactis
atgttaatacatcggaaagaatgggataaatttttgacggatttgcatttgaatgtttcaaatagctctgaaattgaaacgattgatgagacggtggcaatttttgcgaaaaatggtgaagttttggcgacgggttctattgctggtaatgtgataaaatacgtggcgacttgcactaagggcgaacaatctgccggtgagcgttttaataaaattattacagagttaatgaatcggctggcgcaaaaaggaatttatcatgtctttgtttttacaaagcccatgtatgctaagagctttggttatcttggttttaaggaattggcgcgggctgagcaaggtgttttgttggaaaaaggtcgtcccaacattacagattttctgtcttcgctgacagaaaaaaaattggtgcccgctggtgcgaaaaaaatcgcggcagtggtcatgaatgctaatccatttacgctggggcattgttatttggtggaacaagcagcggcggaaaatgattttgtttatgtctttgtggtcagcactgaccggtcactttttcgggctgatgagcgtttggacttggtcaaaaagggtctgtcagcgctgacaaatgtgtcagtggtttctggcggtgattatttggttagttttgcgacttttccggcttattttatccagtcggatgaagaagttatggattttcaaacgcagattgacgcgcggatttttaagaattggtttgtggaggctttgggtattacgacgcggtatttgggtgctgaaccattttctaagacgacgagcatttacaatcaacagttgacagaagttttgtcagacgtcattgatgtgaaaattattgagcgaaaaaaagctgatgataatgaagaaatcatttcagcgacagcggttagagcggcgattgccactaaccaacttgaaaaaataagaaattttgtgcctgaaacgacatttgaatttattgagcaacacttgcaagagctgcaagcgagaattaagggaggacaaaaaacaaatggaaattaa

SEQ ID NO: 368 - DNA, 291 bp, Lactococcus lactis
atggaaattaaacaacacgcgctggcggggactttggagtcttcagatgtgcaaatcatgattgcgccagccaataacggcatttcgattgatttgatttcagatgtgaaaaaacagtttggtaagcaaatcgaggctacggtgcgtcaagttttggcagcttatgccattgaaaatgcggacgtccaagtcattgacaaaggggctttggatttggtgattaaggccagagcgattgcggtagtggaacgtgcgattgaagctaaagatttgaattgggaggtcttgtaa

SEQ ID NO: 369 - DNA, 915 bp, Lactococcus lactis
atggcagtagcagaacgtttacgtcggacaatgatgtttgtgcctgggaataacccagccatgattaaggatgcaggaatttttgaggctgactcgattatgtttgacttggaagatgcagtttctttggcagaaaaagatgcggcgcgggttttggtctatgaggcggtcaaaaatattgattttggtggggctgaattggtcgtgcgaatcaatggtttggacacgccattttggcaaaaagatgtgcgggccatggtgaaagccggtatcgaagtcatccgtgcaccaaaagttgaaacagcagctatgatggaagagctggaagtcgaaatcgaaaaagctgaaaaagaatttggcatcgaagtcggcaccacgcacgtcatggcagcacttgagtctgctcttggcgtcatgaatgcgctggaaatcgcgcgctcatgtcctgaacgcatgatgggcattgccctgtctggtatggactaccgcgtggacatgaaaaccaagtcttatcctgatgaaggcgaactttactttgcgcgaaatatggtcttgcacgctgctcgtgcggctggtgtggctgcatttgacacggtctttggcaatgttgatgatgaagaaggctttgtcaagggtgttgagctgattcatcagcttggctttgacggtaaatcagtcatcaatcctcgtcaaattcctctggtcaacaaagtttatgcgccaacgaagaaagaagtcgttcatgcgcaacaagtcatggaggccattgaagaggctaaacaaaagggttctggcgtcatttcattgaatggtcaaatggtcgaccgtccaatcgtgttgcaagctgaacgtgtgttgatgttggctaaagccgcaaatgtgttagatgagggaggaaattacattgaaaaataa

SEQ ID NO: 370 - DNA, 1539 bp, Lactococcus lactis
atgaaaaataaagtgaaccgtgaattgccagatgaaattttgaaaactacaggttacaaaccttttgagtcagtcgaagtcaaggaccttgtgattgagcgcgtgagtgctaaagtccgtcagtctgttaaaccaaataaattggtagattcgctggaagaagtggttttgaaaactgttaaagatggtatgaccatttcattccaccaccatttccgcgaaggcgactatgtttttaataaagtcatgcgcattatcattgaccacggctttaaagatttgaggattgctccgtcttctttgaccaatgtcatgaatgatattttggttgaggctattgaaaaaggtgtcgtgacaaacattacttcatctgggatgcgtggaactttgggcgatgtcgtttctcacggcgctttgaaaaatcctgttattttccgttcacatggtggtcgtgcgcgtgctattgaaactggtgaaattcatattgacgtggctttcttgggtactccaaatgctgacgaaatgggtaatgccaacggcatggacggtaaagcaccatttggatcattgggttatgctttgatggatgctcaatatgctgacactgttgttgccattactgacagccttgtcagctatcctaatactcctgcctcaatcaaacaaacgcaagtcgattacgtggttaagattgatgcggtcggtaatcctgataaaatcggggctggtgcgactcgtttcaccaaagaccctaaagaattgaaaattgcctctatggttaatgatgttattgtgaattcgccttatttcaaaaacggcttttcattccaaactggtacaggtggggctgcgcttgcggttactcgtttcttgcgccaatctatgattgaccacaatgtcaaggccacatttggtttggggggtattactaagccaatggttgatttgctggaagaaggcttggttgacaagctcatggacgtgcaagacttcgacggtggctctgctcaatccatgcacctcaacaaaaatcaacaagaaatcgacgcctcttggtacgctgaccctgccaacaaaggcgccatggtcgataagcttgacgtggttatcttgtctgccttggaaattgacaccaagttcaacgttaacgttatgtctggttctgacggtgtcattcgtggcgctatcggtggtcaccaagacgctgggacagctaaattgacgattatttctgcacctttggtgcgcggtcggattgcgacagttgtgcctgatgtgacgacggttatcacgcctggtgattcgattgacgttttggtcactgaaatcgggatagctatcaatcctaagcggacagatttgcttgataaattgagcaatattcctggtctgccagtttacaccattgaagaattgcaaaaaattgctgaggaaaaattgggcaagccagaaccgctggaatttaccgacaaggtggttgccttaatcgaataccgtgacggcagcttgcttgatatcattcgtgaagttaaagattga

SEQ ID NO: 371 - DNA, 663 bp, Lactococcus lactis
atgaaaaagattcaaattgcaattgacggtccagcgtcaagtggaaaatcaacagttgctaaaattattgcacgaaatcttgacttaatttatttggacacgggcgctatgtatcgtgtagctacttttgttgccttgcaaaaggaaacagatgatgcaaaagaaatcattgaatttattgaaaaaaatccaatttcttttatgaatggtcaaaaaggtcaagaagttttaatgggctcagagaatgttacagaagtgattagaacaaatgaagttacaaatactgtttctaaaatctcagctatgaccgaaattcgtgaattcatggttgcagaacaacaaagaattgctaaaaatggtggaattatcatggatggacgtgatattggaacagttgttttaccgaaggcagatttgaaaattttccttgtcgcttcagttgatgaacgagctgaaagacgttataaagaaaatttgtctaaaggaattccaaccgatcttgagcgtttgaaaattgaaatttcggaaagagaccgcaaagatagcacacgagcaatttctcctttgaaacaagcagaagatgcgatattacttgatagtactggaaaaacaattaatgaaattgttcaatttattgaagacaaagctaaagaactcatgtaa

SEQ ID NO: 372 - DNA, 609 bp, Lactococcus lactis
atgaaagaaatttatgacaaaatccaagacataaatattattttgaaaagatcatttattgaccttggaaaaccattagcttatcaagaggtggtagagaaaagtgccaaagttttagagtctagcctttttatcatagataccaaacgaaattgtttaggttatggttttactgattctgataattcttatcaggatgatataaacctccaaaatttttttatctatcaaaaaatatcaaaagatatctctagtcaactattaaatcactacgaaatgagcgcaagcctaccaatggcccaatcaattttagaaccagtgaaagaaatttcgagcaaatttccaaataaatttctcagctttctacctatagaaggaaatcatttgagattgggaaccctttttctactgacagattctcctctggaagaagaaaagagaatattggtagattttttatcaacattcatagggaatcaaatgtcttatatcatgctggcagaactggaagggcaaagacgaaatgaaacctttgtttctttagttcaatcattatctcgttcagaattagaagcatttaaaagcatcattgaaaaaatagaccgttaa

SEQ ID NO: 373 - DNA, 432 bp, Lactococcus lactis
atgatcagaataaaaatgaagaacgaaattttaatgactaaagcatttactttactagagtctcttctagttttgttgattatttcttttatcacaactcttttttctttagaaataatacaaacaatccatctttttaagggagaattgtttgttcttcaatttgaaaatttctataaaaggagtcaagaagatgctgcactgcttcaaaaatctgaaagtttagttgctaaaaatcaagaattaatctgtgaagatagaagtatcacaattccaaaggaggtagcagttaaagattttacagttaaatttgatgataagggagagaattctagcttacaaaaactcacaatttctttaccttacgaaaaaaagttcatcacttatcaattggagataggcagtggaaaatttaaaaagaaaatcagttaa

SEQ ID NO: 374 - DNA, 594 bp, Lactococcus lactis
atgactgataatttttttgaaaaaacattggctgcacgagaaatcagccaaattcctggaatgttagaatttgatatcccagttcatggtgataatcgtggatggtttaaagaaaatttccaaaaagaaaaaatgatgccacttggctttccagaaagcttctttgccgaagaaaaattacaaaacaatgtaagtttttctcgtaaaaatgttttgcgtggtctccacgctgaaccttgggataagtatatttctgtcgctgatggcggaagtgttttaggcgcatgggttgatttacgtgaaggagaaaatttcggtcatgtttatcaaactgtgattgatgcaagtaaaggaatttttgttccacgtggtgtggctaatggattccaagttttgtctgacacagtttcttatagctatttagttaatgattactgggcacttgaacttaaacctaaatacgcttttgtgaattatgctgacccaactttgggaattaagtgggaagatgttgaaaatgctgaagtttctgaagctgataaaaatcatccattattaaaagatgtaaaagctttgaaggctgatgaactctaa

SEQ ID NO: 375 - DNA, 198 bp, Lactococcus lactis
atggcacaaggaactgttaaatggtttaacgcaactaaaggcttcggctttatcactactgaagaaggaaacgacgttttcgctcacttctcagctatccaaactgatggattcaaaacacttgacgaaggtcaaaaagttacttttgacgttgaagatggccctcgtggacctcaagctgttaacatccaaaaataa

SEQ ID NO: 376 - DNA, 1410 bp, Lactococcus lactis
atgggatttatgagaaaagctgattttgagctttatcgagatgcagataaacactataatcaggtgttaaccacacgtgattttcttgcactaggtgttggaacaattatttcgacttctatttttactttaccaggtcaggtcgctgctcaatttgcaggcccaggtgttgtcttttcttacctgcttgctgcattggtcgctggttttgttgccttggcttatgctgaaatgtcaacagtgatgccatttgcgggttcagcctattcttggatttcagtcttatttggcgaaggttttggttggattgctggttgggctttgcttgcggaatattttattgccgttgcctttgttggttcaggcttctcagcaaatctgcaacaattgctagcgccactcggtttccatctaccaaaagtattggccaatccatttggtacagacggtggagttgtcgatattatttcacttttagtcattttactctcggcaattattgtctttcgtggggcatctgatgctggacgaatcagtcaaattcttgttgtgcttaaagtagcggctgtcattgctttcatcattgttgggattacggtcattaagccagcaaattaccatccatttattccaccacacaatcccaaaacaggttttggtggcttctcgggaatctggtctggggtatcaatgattttcttggcctatatcggttttgattcaattgcagccaattcagcggaagctaaaaaaccccaaaaaacaatgccacgtggaattattgggtcgcttctaattgctgttgttctatttgcagcagtaaccttggtacttgtagggatgcatccttactcagcctatgcaggaaatgcagcgccagttggttgggctcttcaacaatcaggttattctgttttatcagaagttgtaacagctattgcacttgccggaatgtttatcgcccttttgggaatggttcttgcaggttcacgtttgctttatgcttttggacgcgatggacttttacctaaaggtttgggtaaaatgaatgctcgaaatcttccagcaaatggtgtgtggaccttagccattgttgctattgtcatcggggcattcttcccctttgctttccttgctcaacttatttcagcaggaactttgattgctttcatgtttgttacacttggaatctattcacttcgtcgtcgtcaaggaaaagatttgccagaagcaacttacaaaatgcctttctatccagttttaccagctcttggttttattggttcattatttgtattttggggattggatgtgcaagcaaaactttattcaggaatttggttccttattggaattttgatttattttgcttatggaaatcgtcgaagcagaaaatcagaagaaaaataa

SEQ ID NO: 377 - DNA, 456 bp, Lactococcus lactis
atggcaggtcaaaaaaatacatcagatattatcgaagcttatctgagaaagcttttagaagaagcacaagtcattgaaattaaacgagcggacttagccaatcaatttgatgtcgtgccgagtcagattaattatgtgataaaaacacgatttacggcctcaaaaggctttgatgtggaatcaaaacgtggtggcggtggatacatcaaaattgtgaagtatcaatattctgctcgtcatgaattcttaacggctctttaccagaaggttccagctaatctctcaagtaaagctgcccatgatatcgttcaacttctctttgatgagaaagtactgacagaacgtgagggaaatctacttttgttagtcattactgacggagccattagtccctttactcgtggtataatgatgaaaagtataataaacagattggaccgtgacgatgaaatttga

SEQ ID NO: 378 - DNA, 1347 bp, Lactococcus lactis
atgaaaatatataatacttatagtcgacagctagaagattttcagccgattgaacctggaaaagtaaaaatgtatgtctgcggaccgaccgtttataattacatccatgtgggaaatgctcgttctgttgttgcttttgatttggttagaaaatatttggaatttcgaggatttgaagttcaatatatctctaatttcacagatgtcgatgataaaattatcaacggtgcaaaagctgcaaacatgactacgacagatttttctgaacgttatattgctgctttttatgaagatactgatgctttaaatgttaaaagagccagccaaaatccgaaagcaacagaattcatcgaagcgatgattgagtttattcaagaactagtggataaagaatttgcttatgtttctcaaggagacgtttatttccgtgtatctaaatctaaagattacgctaaattagcaaataaaaatcttgcagatttacttgcaggggcttctggacgtacggatgaagaaacaaaacttaaagaatcaccagccgattttgctctttggaaatccgcaaaagctgatgaagtttcttggcaagctccttggggagctggccgtccaggctggcatattgaatgttcagtcatgtcaacttcactattaggcgaaacaattgacattcatggtggaggagcagatttagaatttccacaccatacaaatgaaattgcacaatctgaagcaaaaactgggcaaaagtttgttaattattggatgcacaatggattcgtaaatgtcgatggtgaaaaaatgtctaaatcactaggcaatttcacaactgttcatgaactccttcaagtagttaatccacaaattttacgtttctttttagcaactactcattatagaagaccagtcaattttactgatgatgcactgacagaagctgaaaataatatcaaaaaaattgaaaatgcttatcgtcatttggatgagcaagctgagtctaatttgtcagcacttacgactttcagaaatgattttgttgctgccatggatgaagatttcaatattgccaatggaatgactgttttttatgactttgtttcttgggttaataaaggaaacggtgggcctgaggtcaaagaattttttgaccaagttttagaaattttagggattaaatttaaatttgagcaaagtttggacagcgaaattgaagccatgattgaagcaagacaattggcacgagaagtccgtgattttgcgaagtcagatgaaattcgtgacgctttgaaagctcaagggattgttcttgaagatacaaaagacggggtacggtggcatcgtgaataa

SEQ ID NO: 379 - DNA, 1308 bp, Lactococcus lactis
atgaaaaaaattgcaattattttttgtagtttcctgattagtctgtcagtcctttcggacttttctgtcagtgctgctacgactccaacgacaaatgattttacagttgctgctaaatcagcaattgctattgatgcctcaagtggtaaaattttatacgcgcaaaattctgatgatgcaagcactcggatcgcctctatcactaaattactgacagcctatttagtttacaaaaatgtagctgaaaataaattgacttggaatactaaagttcctatttcagattatgcttatgaattaactcaaaattctaacgcttccaatattccccttgctcaaaatggtcaatatactgtcaaagatttattgaatgctttacttcttccgtcagcaaattctgctgctgtcgctttagctgaaaaaattgctggttcagaaccaaaatttgttgatatgatgacaaaacaaatgaaagactggggaattactgacagccatctcgtcaatgcttctggcttaccaaatgatgatttaaacggtcatatttatccagggtctggtgcttcagcaacaaacacaatgagcgcaaaggccgtagcaacactcagttatcatcttattcaagatttcccagaaattcttcaaatcactaaaaaaacagaaattccttttgataccggcaatgaagcaaagatgaccttaactaataccaatcaaatgcttagtggtttttctacttcaagaactggtgtagatggcttgaaaacaggttcaacaagttttcaaattgactgttttgctggaacaacaaatcaaaacggttttagaatcattacggttgttttagaagctacagatcctgctgctgacaactcaactcctttcactctcacaaatcaactgatgaactatgtttatggtcattggcgtacgaccagtcttgtgcaaaaaaatcaatccttagatgattttaaagaaattactgtgattgatggaaaagaaaaatctgttcaactcgttgctccacaaaatatcactcccgttgttccttacgctacagatggtagtgcagatacaaaatcactgacagtcaaattcagtaaggaaaaaacagcctccgttgaagcaactgtgactaaaaaccaaaaacttgtcactctttctactacagtaaaggatagtttaggctatcttccaaattgtaccgcagaacaaattccattggttgctaagaaaactgtcccccgtagtagcgctccaaaggttttttggaatcattttgtaaattttgttaatgaaaaactctaa

SEQ ID NO: 380 - DNA, 747 bp, Lactococcus lactis
atgaaaagaagaataacatttagtttaatcgtgcttgttcttttaatcattggcgctttaggatttattttaatcaccaatgataagtcaaattcaacaaacgaatcagctaaaaaaacaagtatttcgtcatctaaagaggtggcaaagaaaaaggatttacctgacgctaaacaatcagattgggatttagtattggtgagtcgaaaatcacctaaagatgaaatgaacccaacactggcaaccgtaaatgggattcaagttgatcaaaggatagcatcagcggttcaacaatttttagcagcagcccaacaaatatcaccagctgaacatttaatctcaggttatcggtcagtctcatatcaagaagggctttatcaatcttatgtccaagcagaaatgaatggtcaaggaacagtaaattctagtggaaatccaatttcagaagaagaagcgataaaaaatgtacaaacttattctcagccgccaagaagttcagaacatcaaacaggattagcgattgatatgagtaatattgatagcctaaatgagagtcaatatgcaaaacaagttgcagcaattgctcccaaatatggatttgttcttcgttttccagaagggaaaaaggcagagacaggaattggttatgaagactggcattttagatatgttggtttagaaaatgctaaatatatgaccgaacacaatcttactttagaagaatatctaaaactattaccagcataa

SEQ ID NO: 381 - DNA, 240 bp, Lactococcus lactis
atgaaagaacaaatttttgatattatcgaaaccgtatcaggcacagacgaattccgtgaagacttagacatggatttatttgaagaaggaattcttgattcaatgagagccatcatgctcattgttgaattagaaggcgcttttgatatcagtcttccaccatcagaaatggaccgtgaagattggaatacagcaaataaaatagcagcacgcgttcaggaaaaaaaggatgaaaattaa

SEQ ID NO: 382 - DNA, 1659 bp, Lactococcus lactis
atggcatatcaagcattatatagaaaatatcgaagtcaaagatttgatgaaatggtggggcaagaagttgtagcaacaacattaaaaaatgcgattgtcaatcatcaaatttcacatgcttatcttttttctggtccaagagggacagggaaaacctcagcagctaaaatttttgctaaggcaataaattgtcctaatcaagtggatggagagccctgcaataattgctttatttgtgactcaatcaccaaaggaagcttagatgatgtcattgaacttgatgcggcatcaaataatggggttgacgaaattcgagaaattcgagataaatcaacttacgcagctagtcaagccacttacaaggtttatattattgatgaagtgcatatgctttcaacaggggcttttaatgcacttttgaaaacactagaagaacctacagaaaatgttgttttcgtcctggctactactgaattacaaaaaattccagcaaccattatctcgcgtgttcaacgttttgcttttaaatcaatcacaacaggagatattcggacttatttagcaaaaataatggctgatgaaggacttgaattcgacggtaaagcactcgatgttattgctaaagcagctgaaggtggaatgcgtgatgccctctctttattagaccaagccttatcgttttcatcaggaaaattagaagaaaatgatgcactacttgtcacagggtcgattgctgcagatgctttagtaacatatgttgcagcactttttgagcatgatgaagcaaaagcgatgacggaacttgataagatttttgctgaaggaaaaaatatgcttcgatttacggaagatttattagcataccttcgggatttactcttggataaaaattctcagtatgaccggggtcaaattttttcatggattgatgttgcaattgaaagtttgaaaacgataaaggaaacgactcaaacaaaaattgcggcagacgtcatgaccatgcgtttggctgaaattggacaaaataatttactgacagcttcgcaaggagaaatccctaatcagctgacagccgaaattgctactttaaaaaccgaaattaatcaattgaaagctcaaatttcagctggtcaaattcaggtaaattcagattcacaaaataatttactgacagaaaatgttaaagccagtccgaaaccaatagcatctaaaaaacgccaaattaacaaagatttaatttataaagctttggctgaggcgacaaatgaagctagaaaagctgctctaagtgcgtggccagaacttgttgcttcggtaactaaaccggcagaccgagctttacttaataatacagcgcctgtcgctgcgtcagaaaatttccttgtggtgacttttcctcatgagaatcttgctaaaagagtcagtgaaaatgaagaattgcaacttttttgtgggaatctcttgagttcaattgttggatttgcgccagaaattatctctcttgctgaacaagactggcaagaagttcgagcagaatatgtttctaatttaaaatctgaaaatgttcaagaagatgaagaagatgaaaaagagccggatgaaacggtaaacttagctaaagaactctttggtgaaaaagtagttgaaattaatgattaa

SEQ ID NO: 383 - DNA, 447 bp, Lactococcus lactis
atgtcaaatgaacacacacaagaagttttaaatcaaacagttgctgatttatcaaaagcatcagcacttgttcatcaaatccactggtatttgcgtggtccgggttttctttacctacacccaaaaatggatgaattgaaagatcaattggatgaacatttggacgaatttgcagaacgtctaatcactattggtggttctccagtttcaactttagcagaatttgataaaaattctaaaattgaaatgactcccgccgtttggggaaaatctaattcagaacgtgtgaaagaattgattgttgcttacaaatatttgactcaactcttcaaagatggcattaaaattgctggtgatgatggtgatgatgttacagttgacttatatacgactgctcttggagatattgaaaaaacactttggatgattgaagctgaagtaggttaa

SEQ ID NO: 384 - DNA, 558 bp, Lactococcus lactis
atggttttagcaaaagaccttaaatcaggcatgacatttttgaatggggaaaaacttctccgcgttatggaagcaagtcatcacaaaccaggtaaagggaatacaatcatgcgtatgaaacttaaagacgtacgctcaggttcaacttttgatgacacttaccgtcctgaagataagtttgaacaagctgttattgaaactgtaacagcacaatacctctactcaatggatggtattgctaatttcatgaacaatgaaacttacgaacaatatgaaattccagtagaacaagttaaagatgaacttctttatgttcttgaaaatacagatgttaaaattcaattctacggtacagaagtaattggtattcaacttccaacaacagttgttcttgaagttactgaaacacaaccatctattaaaggtgcaacagtaacaggttctggtaaaccagcaactatggaaactggtcttgttgttaacgttcctgatttcgttgaagctgggacaaaacttgaaatcaacacacaaacaggtgaatacttgaaacgtgcttaa

SEQ ID NO: 385 - DNA, 1302 bp, Lactococcus lactis
atgtcaattattactgatatttatgctcgcgaagtccttgactcacgcggtaacccaacacttgaagttgaagtttacactgaagacggtgcattcggtcgcggtatggtaccttcaggtgcttctactggtgaacatgaagcggttgaacttcgtgatggcgacaaatctcgctacaacggacttggtactcaaaaagctgttgacaacgtaaacaacatcatcgctgaagctatcatcggttatgaagttactgaccaacaagctattgaccgtgcaatgatcgctcttgacggtactgaaaacaaaggtaaattgggagctaacgctatccttggtgtttctatcgctgctgctcgtgctgctgctgatgaacttggtgttccactttacaactaccttggcggattcaacgctaaagtattgccaactccaatgatgaacatcatcaatggtggttctcactcagacgctccaatcgctttccaagaattcatgatcgtaccagttggtgcacctacattcaaagaagcgcttcgttggggtgctgaaatcttccacgctcttaagaaaattcttaaagctcgtggacttgaaacagctgtcggtgacgaaggtggattcgctcctaaattcgacggaactgaagacggtgtagaaactatccttaaagcaatcgaagcagctggttacaaagctggtgaagatggcgttatgatcggtttcgactgtgcatcatcagaattctacgaaaacggtgtttacgactacactaaattcgaaggtgaaggcggtaaaaaactttcagcttctgaacaagttgactaccttgaagaactcgtttctaaatacccaatcatcactattgaagatggtatggacgaaaacgactgggatggatggaaaatccttactgaacgtcttggtaaaaaagttcaactcgttggtgacgacttcttcgttacaaacactaaataccttgaacgtggtatccgtgaaaatgcttcaaacgctatcttgatcaaagttaaccaaatcggtactttgacagaaactttcgaagctattgaaatggctaaagaagctggtttcacagcaatcgtttctcaccgttctggtgaaactgaagattcaacaatctcagatatcgctgttgcaactaacgctggtcaaatcaaaactggttcactttcacgtacagaccgtatggctaaatacaaccaattgcttcgtatcgaagaccaattggctgaagtggctcaatacaaaggtcttaaagcattctacaaccttaaaaaataa

SEQ ID NO: 386 - DNA, 1284 bp, Lactococcus lactis
atgtctatagaagaagcattggaatggatacattcacgtttaaaatttaatattcgcccaggcctaagtcgtgtttcggcccttttagaattgcttggtcatccagaagagtctttgtcaatgattcacgttgctggaacaaatggaaaaggctccacagtcgctttcacacgctcaatctttatgcaggcaggtctgaaggttgcttctttcacaagtcctttcatcaccacttttggtgagcggatgtcgattaatgcactcccgattgctgatgataaattaatttattatgtagaaatgatccaaccacttgttgctgaacttgataaagatgctgaactgactggaattaccgaatttgaaattatcacggcaatggcttttaaatatttctctgatgagcaggttgatttagcggttattgaagttggtttaggtggacttcttgattcaacaaatgtgattaaacctgttgtttctggaattacaacaattggtttagatcatattgatattcttggttcgaccattgaagaaatcgcagctcaaaaggctggaattattaaaccaggaattccagtagttgttggaaatattgaattaaaagcacttcgggttatatgggaagtggctagaaaaaatacagcgcgtgtttatcaatttccatatgattatcgtacggaagtggaagaacacgaacattttaatttcttttctggtcaagaagcaatattggatattgaaaaatctttagttggcttacatcaaatagaaaatgctggtatggctattgaactttctctggtttatgcaagtaaggttgggattgaattgactgaggatgtgattcgctctggaattcgtgaggctttttggccagctcgtatggaaaaattgggtgaaaaaccactcattttactggatggtgctcataatgttcatgcgatgaatcgtttgcttgaaaatcttagctctgagtttccagataaaaaaattacaatcattttttcagccattaccacaaaagatattagtcaaatgataaaaatgcttcaaactgtgaaaaattcgcatctgattttgacaacttttgattatccaaaagctttgaatttgggagattttcaaagattggaagaagaaggggttgaattggctccaagttgggaattagctttagttcgtgcgcaaaaaaatttagctgaagatgatttgttattagttacaggctctctctatttctcatctcaagttcgtgagtttttgaaaaaagagaagtaa

SEQ ID NO: 387 - DNA, 1509 bp, Lactococcus lactis
atgaaaatttggactaaactaggcttgctaacgcttgtgggcctctctttgacttcttgtgggagtaatacaaagaatacaaaaggacaatcaagttcgtctcagaaagttgaaacctcggctggtgcaagtaaatcaaacatctatgctgatccttctactttaagtgataaatacgatgtgattattgttggttctggtggggctggaatgactgcagcaattgaagcaaaagatgctggaatgaatccagtcattttagaaaaaatgccaattgctggtggaaatacttcaaaagcctcagctggtttgaacgcatcagaaacatcagtcgaaaaagcacaaggtgtcgctgattcaaatgataaattttatgaagaaacgctcaaaggtggtggtggtacgaatgacaaggcactccttcgttattttgttgaccactcggctggtgctgttgattggttaaatacaaatggaattgttttagataatttaactacgacagggggaatgtcagtttcaagaactcaccgaccacatgatggttcagcagttggtggttatttggtaaaaggtcttgaagaaaatattaccaaacgaaatattcccttatttgtaaatagtgatgttaccaaaattactgaaaaagatggtaaagtatctggagttaaagttaagattgagggtgaaactaaagatatttcttctaaagcagtcgttgttacaacaggtggattcggtgcaaataagaaaatgattgcaaaatatcgtcctgaccttaaagattatgtgacaacaaatgcggctggttcaactggtgacggaattactatgatttcagaacttggtggggaattagttgacatggataaaattcaaattcatccaactgtattccaaaaaacaggttatcttgtttcagaatcaattcgtggtgaaggggcgattcttgtaaatcaaaaagggaaacgtttctttaatgaaatggatactcgtgataaagtttctgctgctgaacttaaacaaccaggaaaatattcttatgttatttttggagaaggaactaaagataaagtaaaagcagttgaacagtatatatctaaagatatggtcgttgaagctgacagtatcaagggacttgctgacaagctcgacattaatgaaaaagcactgacttcaacaattgatggttggaacaaagctgtatcaactaaaaaagatgaagactttggtcgtacaacaggaatgactactgaagtatcaggtaagtattatgccattaaagtggctccaggaattcaccatacaatggctggggtaaaaattaatacaaatactcaagtcttgaaaaaagatggtagtccaattcaaggattatatgctgccggagaagttacaggtggtctccatggtggtaaccgcattggtggtaacgctgttgctgatattgttatctttggacgacaagctggaactcaatctgcggcctatgctaaaacaagcaattaa

SEQ ID NO: 388 - DNA, 693 bp, Lactococcus lactis
atgagtattataaaattaagcaacgtttccaagaaatattctaatggaacaacggctttgcgtaatatctcgcttgaaattgagccgggagaatttacctatatcgttggtccatcaggagccgggaaatcgacctttatcaaactactttatcgtgaattaaagattgaccgtggttctggaacagttgcgcaatatgatttatctaaattaaaacgtcgtgatgtgccaatgcttcgtcgctctgttggagttgttttccaagactataaacttttgccaaagaaaactgtttttgaaaatatctcctacgccatggaagttattgggaaaagtcctcgtgaaattaaaaaacgagtgaatgaagtgcttgaccttgttggtctgaaacacaaaattcgttcatttccaaatgaactctcaggtggggaacagcagcgtgtagcaattgctcgttcaattgccaatgcaccaaaagtattgattgctgatgaacctacagggaacttagaccctgaaaactcttgggaaatcatgaatctgcttgaaaaaattaatcttcaagggacaaccattttgatggcaacccacaatagccaaatcgttaacactttaaaacatcgtgttatcgcaattgaaaacggacgaattgtccgcgaccaagaggaaggagtttacggctacgatgattag

SEQ ID NO: 389 - DNA, 2130 bp, Lactococcus lactis
atggctcgcgaattttcacttgctaatacacgtaatatcggtatcatggcccacgtcgatgctggtaaaacaacaacaactgaacgtgttctttactacactggtaaaatccataaaatcggtgaaactcacgaaggtgcatcacaaatggactggatggagcaagaacaagaacgtggtatcacaatcacatctgcagcaacaactgctgaatggaaaggtaaccgcgtaaatatcattgacacaccaggtcacgtggacttcacaattgaagtacaacgttcactccgtgttcttgatggtgctgttaccgttcttgatgctcaatcaggtgttgaaccacaaacagaaactgtatggcgtcaagcgactgaatacggtgttccacgtatcgtttttgctaacaaaatggacaaaatcggtgctgatttctactactcactttctactttgggagatcgtttgggtgctaatgctcatccaatccaaattccaattggtgcagaagatgacttcatcggtatcattgacttggtaactatgaaatctgaaatctatactaacgaccttggtacagatattaaagaaactgttgtaggttcagacgaatttaacgctgaattggcagctttggatttcaatgctgaagaatacacagaacttgcaaacgaatggcgtgaaaaactcatcgaagcaattgctgatttcgatgaagatatcatggaaaaatattttgctggtgaagaaattccagaagcagaacttaaagctgcaatccgtaaagcaacaatcaatgttgacttctacccaatgcttgctggttctgccttcaagaacaaaggtgttcaaatgatgcttgatgcagttattgactaccttccaagcccacttgatatccctgcaatccaaggtgttaacccagatacagacgaagaagacgaacgcccagcttcagatgaagaaccatttgcagctcttgctttcaaaatcatgactgacccatttgttggacgtctttcattcttccgcgtttactcaggtacacttgatgctggttcatacgttttgaatacttcaaaaggtaaacgtgaacgtatcggacgtattcttcaaatgcacgctaacactcgtaaagaaatccaaacagtttatgctggggatatcgctgctgctgttggtttgaaaaatacaacaactggtgactcattgacagatgaaaaagctaaaatcatccttgaatcaattgaagttccagaaccagttatccaattgatggttgaacctaaaactaaagctgaccaagataagatgggtgttgcccttcaaaaattggctgaagaagatccaactttccgtgttgaaacaaacccagaaactggtgaaacagttatctctggtatgggtgaacttcacttggacgttcttgttgaccgtatgaaacgtgaattcaaagttgaagcaaatgttggtgcgcctcaagttgcttaccgtgaaacattccgcgctggaacttcagcacgtggattcttcaaacgtcaatcaggtggtaaaggtcaatatggtgacgtatggatcgaattcacacctaacgaagaaggcgctggatttgaatttgaaaatgctatcgtcggtggtgttgttcctcgtgaattcgtaccagccgttgaaaaaggtttggtagaaactatggctaacggtgtccttgctggatacccaatggttgacattaaagctaaactttatgatggttcataccatgatgtcgattcatcagaaactgccttcaaggttgccgcttctcttgcaatgaaagaagctgctaaaactgcgaaaccagcaattcttgaaccaatgatgaaagttacaatcactgttcctgaagaaaaccttggagatatcatgggtcacgtgactgctcgtcgtggtcaagttaactcaatggaagctcatggtaaatcacaaatcgttaatgctttcgttccacttgctgaaatgttcggttacgcaactactctccgttcatctacacaaggacgtggtactttcatgatggtatttgaccactattcagacgtacctaaatcagtacaagaagaaattattgctaaaaacggccgtaacgctgactaa

SEQ ID NO: 390 - DNA, 1011 bp, Lactococcus lactis
atggtagttaaagttggtattaacggtttcggtcgtatcggtcgtcttgctttccgtcgtattcaaaatgttgaaggtgttgaagttgttgcaatcaacgacttgacagatccagcaatgcttgctcacttgcttaaatacgatacaactcaaggtcgttttgatggtaaagttgaagttaaagatggtggttttgaagttaacggtaaattcgttaaagttactgctgaatctaacccagctaacatcaactgggctgaagttggtgcagaaatcgttcttgaagcaactggtttcttcgcaactaaagaaaaagctgaacaacacttgcacgctaacggtgctaaaaaagttgttatcactgcacctggtggatctgatgttaaaacaatcgttttcaacactaaccacgaagtacttgatggaactgaaacagtaatttcagctggttcatgtacaactaactgtcttgctccaatggctgatactttgaacaaacaattcggtatcaaagttggtacaatgactacagttcacggttacactggtgaccaaatgactcttgatggcccacaccgtggtggagacttccgtcgcgcacgtgctgcagctgaaaacatcgtacctaactcaacaggtgctgctaaagctatcggtcttgtattgccagaacttcaaggtaaacttcaaggacatgctcaacgtgtaccagttccaactggttcattgactgaacttgttactatccttaacaaagaagttacagttgacgaaatcaacgcagctatgaaagctgcttcaaatgaatcatttggttacaacgaagaccaaatcgtttcatctgatatcgttggtatctcaaactcttcactctttgatgctactcaaactgaagttacttcagctgatggagctcaacttgttaaaactgtatcttggtacgataacgaaatgtcatacacttcaaaccttgttcgtacacttgcatacttcgctaaaatcgctaaataa

SEQ ID NO: 391 - DNA, 1878 bp, Lactococcus lactis
atgaattttcaagaaaattatgatgttgttgtcattggaggaggacatgcaggggttgaagcttcactagcagctgcacggatgggctctaaaacattactcatgacgattaatcttaatatggttgcctttatgccatgtaatccatcaattggtggctcagctaaaggaattgttgtcagagaaattgatgcgctcggtggtgaaatgggtcgcaacattgataagacttatattcaaatgaaaatgcttaataccggaaaaggtccagcagttcgagctcttcgtgctcaagccgataaagatgaatatgccgattcaatgaagaatacagtttctgaccaagaaaatttgacactccgtcaaggaatggttgaagaacttattcttgatgaagaaaagaaaaaagtcatcggaatcaagacttcgacaggaactaaatatggtgctaaggcagtaattatcactacaggaacagctttgcgtggtgaaattattattggagaacttaaatattcttcaggacccaataactctctttcatcaattggtctagcagataatttacgtgaaattggatttgaaattggtcgttttaaaaccggaactcctccacgcgttttggcaagttctattgattacgacaaaacagaaattcaaccaggtgatgaagcgcctaatcattttagttttatgagctctgatgaaaattatctaaaagatcaaattccatgctggctcacttatactactgagaatagtcatactattttgcgtggtaatttacaccgagcaccactcttttcaggaattgttaaaggagtagggccacgttactgtccttcaatagaagataaaatcactcgctttgctgacaaacctcgtcatcaactcttccttgaaccagaaggacgaaatacagaagaagtctatatcggtggactttcaacttcaatgcctgaagatgtccaatttgatttagttaaatcaattccaggacttgaaaatgctcaaatgatgcgtccgggttatgctatagaatacgatgtggtgatgcctcatcaactccgtccaacacttgaaacaaaattggtttctggactatttacagcgggacaaaccaacgggacctcaggctatgaagaagcagcagggcaaggcttagtagctggaataaatgcagcacttaaagttcaaggaaagtctgaatttatcttaaaacgtagtgaagcctatattggggtaatgattgatgatttggtaactaagggaacgctggaaccatatcgtcttttgacatcacgtgcagaataccgtttaattcttcgccatgataatgctgaccgccgtttgactgaaattggccgtcaagtgggccttgtttcagatgagcaatgggaacattaccaagcaaaaatggctcaatttgaccgtgaaatgaaacgattgaattcagaaaaactcaaacctttgcctgacacacaagaaaaattaggaaaattgggctttggaccaattaaagatgcgctgacaggtgcagaatttttgaaacgacctgaagttcactacaatgaagtcatcgattttatcggacaagcaccagaaaagattgaccgtactgtcattgaattgattgaaactgaaattacttatgaaggctacatcaaaaaagcaatggaccaagtggacaaaatgcatcgcttggaagcgaaacgaattcctaaaaatatggattgggataagcttgactcaattgctactgaagcccgtcaaaaattcaaaaaaataaatccagaaacgctgggacaagcgagtcggatttcaggggtaaatcctgctgacatcagtattctcatggtttaccttgaaggaaaataa

SEQ ID NO: 392 - DNA, 369 bp, Lactococcus lactis
atggtgaaagaacgtgaattaagacgctctatggcggtacttccaataggaactgtcatgaaactcactgacctaagcgcaaggcagattcgttattacgaagagcaagagcttattttcccggagcgaagtgacggtaatcgtcgcatgtattcgctcaatgacatagatgctctatttgatattgctgacttattgcaagaaggtaataatattgcagatatcaaagaaatttatgccaaaagggatgctaagaaggctcaaactttatctatcggagaagtccaccatgcacttgaacgcgaatttgcccaacaaggtagattcggaactcctgatcccactcattttacccaaccgcggatgtaa

SEQ ID NO: 393 - DNA, 1440 bp, Lactococcus lactis
atggctgatccaaatggatttttaaattatccaagaaatgataatccttaccgtgaattagcggagcggataaaggattttgctgaactgcaagttcccttatctactgaagaacgacaaaaacaagcggcacgttgtatgcattgtgatgttcctttttgccatcaagggatattttatgggggcaaacgggctgtctcaggttgtccaaatgataatcatattccagagtggaatgatttgatttatcgaggactacaaagaaaagcctatgaacgtttgattttaaccaatccttttccagagtttactggcagagtctgtcctgctccttgtgaaaaatcttgtgccgaggccttaaacggtgcaggagtaaccattaaagataatgaacgtttcttgggtgatttaggaaatgatgaaggttgggtggctgaaattggcaaagctgcggagccgacaggttataaaatagcgattattgggtctggacctgccggtctgtcagctgcttggcgtcttaatcaattgggacatagcgttactgtttttgaaaaatcagatcgtttgggcggcttattgatgtacggcattccaaatatgaaattggataaaaaagtcgttcaaaaacgaattgatttaatgacagaacttggtgtgacttttgtcaccaatactgagattggaaagacaatcagttacgaagacctgtcagtaaattttgatagaattattttggcgattggcgcaggaattccacgtgatttaaatatttcaggccgtgaagcagttggaattcgatttgccattgattttctgacagaaacgactaaaactgtccttgaagagggcgaagataatattagtcaatcattaaaaggaaaaaaagtagtagtcattggtggtggagatacagggaacgattgtatcggaacggcagttcgtttaggagcagcttcggtttctcaattagaaatcacaccaagtttacccactgatcgtttagataacaacccttggcctgagtggccaatgaccttgagagcaggttatgggcaaaaagaagcagaatttgtgggaaatactgatttgataacctatcaaatgactgcaacagcttttcaaacaaatgctgaaggtcaacttacgggtttaaaagtagccaaagttggacctgacttcaaggcattagaagggactgaacaagtaattgaagcggatttagtcttacttgctatgggatttgttgggactgacacaggattactggataaatttggtattcaagaaatttatgatgactatcgaacaaataatgacaaagttctagttgcaggcgatgccagacgaggtccatctttggttatttgggcaatccgtgaaggaagaaaaacagccgaaattgttgatgaacaattaataaaagtcgctacagcataa

SEQ ID NO: 394 - DNA, 540 bp, Lactococcus lactis
atgtccgaagaaactaaagaagaaatcaaaaatgaaaaagttgatgaagaagtgactgaggagttgacagaggaagcacttgaggatattgttgaagaagaaatcaacgaacttgatgaagcacaaaagttagcgactgagtgggaaaataaattccttcgcgtttctgcagaaatgcaaaacgtacaacgtcgtggaaatgaagaacgtttgcaacttatcaaatatcgttcacaagatttagcaaaaaaaatcttatcttcactagataatcttgaacgtgcacttgctgttgaaggattaacggatgatgttaaaaaaggccttgaaatggtccaagaaagcttgatttcagcgcttaaagaagaaggcgttgaagaagtttcttatgaaagtttcgaccataatattcacatggctgttcaaactgtcccagctgatgatgaacatccagctgacagcatcgtgcaagttttccaaaaaggttaccaacttcacgaacgtttacttcgtccagcaatggttgtcgtagcacagtaa

SEQ ID NO: 395 - DNA, 2490 bp, Lactococcus lactis
atgcaagacaaaaatgttatcaatgtcaatttagttgaggagatgaagacgtcatttcgtgactatgcaatgtcagttatcgttgcacgggcacttcctgatgtacgtgatggtttaaaacccgttcaccgtcgtattctctacggaatgaatgaacttggaaatactccagataaaccacataaaaaatcggcacgtattgtcggtgaagttatgggtaaatatcacccacacggagacagttcaatctatgaagcaatggtacgtatggctcaatggtggtcttatcgtcatatgcttgctgacggacacggtaactttggttcaatggacggtgacggtgccgcagcgatgcgttataccgaagctcgtttaagtaaaattgccatggaaatgttgcgtgatatcaacaaaaataccgttgatttcatggacaatttcgacggtactgaacgtgaaccgctcgttttacctgctcgttttccaaaccttttagttaatggaaccacagggattgccgttgggatggcaacaaacattccaccacataatctgggtgaaacaatcgatgcagtagatatgctcatggaaaatccagaagcatcagttactgatttaatgtctgtgattcctggacctgacttcccaacaggggctttggttatgggtaaatctggtattcgccgtgcttatgaaactggtaaaggttcaattacattacgtgcaaaaacccacattgaagaaatggctggtgggaaagaacgtattgttgtgactgaactaccatatatggtcaataaagcacggttggttgaacatattgttcgtttaaaccatgaaaaacgaattgaaggattgactgcggttcgtgatgaatccaaccgtgaaggaattcgcgtggttatcgaagttcgtcgtgacttatcagcacacgttatcttaaataatctgttcaaactaacaagtttgcaaacttcatttggtttcaatatgttggctatcgaaaaaggaattcctaaaattctttctttgaaagaaatcttagttgattatattgaacatcaaatagaagttgttgaacgtcgtacagcctttgataaagcacgtgcagaagcacgcgcacatatcttggaaggtttacgtatcgctcttgacaatattgaccgtatcattacaattatccgtgaatcacaaacggatgccattgcacaaaaaacaatgatggatgaattcctcctctctgaaaaacaatcgcaagctattcttgatatgcgtttgcgtcgtttgaccggattggaacgtgataaaattgaggcagaatatcaagatttagtcgctttgattgctgacttagccgatattttggcaaaacctgaacgtgttaagaaaattattcgtgaagaattagaagaagttaaacgtaaatttgctgacaaacgtcgaacagaattgttagttggtgaagttcttactcttgaagatgaagatttgattgaggaagaagatgtattgattactttatcaaataaaggatatatcaaacgtctagctaatgacgaattccgtgcccaaaatcgtggtggacgtggtgttcaaggaatgggaatgtctgatgatgactttgttcaacatttggtatctacatcaacacatgatcatttactcttctttacaaatcttggacgtgtttaccgaatgaaaggatatgaaattcctgaatacggtcggacagcaaaaggattgccaattgtcaatctcctcaagcttgatgacggtgaaaaaattgcaacaatcatcaatgttgaccgtgaccaagcggcgaaatatctcttcttcacaacacgtaacggaattgttaaacgaacttcaaccagtcaatttagcaatattcggacaaatggtttgaaggctttgaaactccgagatggtgacgaactgattaatgtgcttagaacttcgggtgaagatgaggtgattatcggaactcatttgggatactcagttcgctttaaaggtgcagttgttcgtgatatgggacgtgcagcagccggtgttaaaggggttaacctcagagaaggcgactatgttgtcggaacttcacgaattgatgacagtcaagaagtccttgttatctcagaaaatggtcttggtaaacgaactcaggcttcagaatatccaacaaaaggccgtggtggtaaagggatgaaagtcatgaatgtcacagaaagaactggtaaattagctggtttaactgctgtcaatggtgacgaagatttgatggttattacagatacaggggttattatccgtacaaatgtggctaacatttctcaaactggtcgagctgcccaaggggttaaagtaatgcgacttgatgatgaagcacaaattgtaacctttgcacttgtagatccagtcattgaagatgaagaagttgatgcgccagaacttactgatgaaacaatttctactgacaataacgaagaataa

SEQ ID NO: 396 - DNA, 1224 bp, Lactococcus lactis
atgaaggaaagattaaaggctccagaattaaggtttgatggttttacggatgattgggaagagcgtaagttattagacaatgtagaaaaagtattagattatcgtggtaaaagccccgctaagtttggaatggaatggggtacagaaggttatcttgttctttctgctttgaatgttaaaaatggatacattgataaatctgttgaagcaaagtatggggatcatgaattatttgacagatggatggggaacaatcggttagaaaaaggagatgttgtttttacaacagaagctcctttaggcaatgtagctcaagtacccgataataacggatatatattaaaccaaagagcggttgcatttaaatctttgcaagaaacagatgataatttctttgcgcaattactacgaagtcctattgttcaaaatacattaaaagctagttcttctgggggaactgccaaaggtattggaatgaaagaatttgctaaacttaatgctcgagttcccgaaacacatgaagaacaacgaaaaatagggttattcttcaaacagctagacgacactatcgttcttcatcaacgtaagttagatcttctcaaagagcagaaaaaaggatacttgcaaaaaatgttccccaaaaatggttcaaaaattcctgaattgagatttgcggagtttgctgacgattgggaagaacgtaagttgggtgaagttgcaacatttctaaacggacgagcatataagcaagatgaattactggattcaggtaaatataaagtgcttcgcgtcggcaatttttataccaatgattcttggtactactctaatatggagcttggtgataaatattatgttgataaaggtgatctagtttatacttggtcagcgacatttggcccacatatttggagtggcgaaaaagttatttaccattatcacatctggaaagtcgagctttctaaatttcttgataggaattttacattgcaacttttagaagcggataaagcaagattgttatccagtacaaatggttcaacaatgattcatgtaaccaagggagatatggaaagtaaaattgtttctattcctaatattgatgagcaaaaacaaattggttcattcttcaaacaactcgacaacactatcacccttcatcaacgtaagttagatttgttgaaagagcagaaaaaaggatttctacaaaaaatgttcatttaa

SEQ ID NO: 397 - DNA, 1065 bp, Lactococcus lactis
atgttaatctcaacaatggtagatgtttatgttgtttattatccgattatcttgtccttcatttgggcaagtggtgcttttttatctcggtggaaagaaagagataagaaagcaattgatgaaacaaaagaatttgaaaaaattagtattgttatttctgcgtacaatgaagaagaaacgattgaggaagttttattatcactacgtaatctaaattacccttccctagagatctttattgttgatgataagagtagtgaccgcactttagagaaactttatgaagtaaaaaaatctttcgacgattgggaaacattaactattcttgagcaaaaggaaaataagggaaaagccacggctttaaatgttgctttgcaacaagttaacagtaagtatatgcttgttattgatgcggactcatatctttctaaagatgctctatcttatttattggccgaattaacttctagttcagatattggggctgtaactggacgacctattgttagaaacagaacaactctattggggaaattacaaaccttagagtatttaagtgtgattgatgcgattaagagagcacaaagtctttttctaggtgcaataatgaccgtatcaggtgtgattgttatgtatcgtgtagaggctttgaaagaaattgggggctttaataccgaagtgatgacggaagacattgatgtcacttggcgacttcatcgtaatcaatggaaagtcaaatatgtccctaaagccttaagctatattctcgttcctgaaaatttaaaatctcttttaaagcaacggagaagatgggcagttggtggagtagaagtattaatttcaaatttatcatgggtttttaaaagaggagaatttaaacatcggtttcttttgattgaaatgatttgtagtcatatttggagttggtttttcttaatagaatcttatcagtattttctccaaatgctgttaaatcaagaattcaaagtatcgggtcaaattatcgtgatttttgttcttatttcattttttgtattctttttaggaccgcaaattgtaaaatga

SEQ ID NO: 398 - DNA, 2799 bp, Lactococcus lactis
atgaagatcaaagatactttaaatttggggaaaacagctttcccaatgcgtgcaggcttgccaaataaagaaccaaactggcaaaaagactgggcagatgcgacactttatgagaaacgtcaagaattaaatgaaggaaaaccctcatttatgcttcatgacgggcctccttatgcgaacggaaatattcacctcggacactctttgaacaaaatttcaaaagatattattgttcgttataaatcaatggcaggatttcgtgctccttatgttccaggttgggatactcatggtttgccaattgagcaacaacttgctaaagcaggcatgaagcgtaaagaaatggatttgcttgattatcttgaggaatgtcgtaaatacgcgatgaaacaagtagatatgcaacgttcagatttcaaatcccttggtgttcttgctgattgggaccgtccatatttgacactattgccagaatatgaggcagctcaaattcgcgtttttggtaaaatggctgaaaaaggatatatctataaaggacaaaaaccaatttattggtcaccttcatcagaaagttcactggctgaagctgaaatcgaatatcaagatgttcgttcagcatcaatttttgtggcatttaaagctaaagatactaaaggtaaattaccagaagatgtagaatttgtaatctggacaacaacaccatggacaattccatcaaatttgggaatctttgctcatcctgactatgattattcagttgtagcagttaatggtcgtaaatttgtgattgcctcagaaatgcttgaagctgttgctgaaaaattagaatgggaaaatccagaagtccttcaaacgattaaaggttctgaattagaatatatggttgcaaaacatccattctatgaccgtgaaactttaatcatgaatgcagattatgttactcttgattctgggactggccttgtccacgttgccccaggacatggtgaagatgactactttgcaagtcgtaagtataaattgcctgttctttcaccaattgataaccgtggttattatactgatgaagctcctggacttgaaggacttttatacgatgaaggaaataaagttgtcagtaaatggctagaagaaaaagatgctttattgaaactcgaattcttcactcactcatatccacatgactggcgtactaaaaaaccagtaattttccgtgcaacaccacaatggtttgcttcaatcgatgacttccgtcaaaatattttagatgaagttgaaagagtagattgggtaattccatggggtaaaactcgtttattcaatatggttcgtgaccgtggcgattgggtcatctcacgtcaacgtgcttggggagttccgttaccaattttctatggtgaaaatggagaaccaattatcacaccagaaacaactgaacatgtagccaaactttttgctgaatttggttcaaaagtttggtttgaacgtgaagcaaaagaccttttaccagaaggattcactcatccagcttcaccaaatggtgaatttacaaaagaaaaagatatcatggacgtttggtttgactcaggttcttcttggaatggtgtccttaacgaacgtgactaccttagcttccctgcagacctttaccttgaaggttcagaccaataccgtggttggtttaattcatcaattacaacctcagttgcggtaaatggcgttgcaccatataaagcagttctttcacaaggatttgttttagacggtaaaggacgtaagatgtctaaatcaattggaaatacaatcgtgccaaaagatgtcactaagaaatttggtgctgacattctccgcctttgggtggcatcaattgatactgaatcagatgttcgtgtgtcaatggacattctcagtcaagtttctgaagtttaccgtaaaatccggaatacattgcgtttcttaatcgctaatacatctgattttaatccaaaagaagatgcaattgattttgcagaacttcgtccagtagacaaatatatgcttgtgaaatttaatgaacttgtaaaacaaattcgtacagcttatgataactatagctttatgactgtttacaaatcaatcattaatttcatcacaaatgatttgtcatctttctatcttgattttgctaaagatgttgtttatattgaagcagcaaattcaccagaacgccgctcaatgcaaacagttatgtatgttattttgaaagatctagtgaaaattcttgtgccaattttgccacacacggcagaagaaacatggacttacttggaacatgaaccagaaaattttgcttatcttgcagaaatgccagaagcagcagaaattcctggaagtgaagaattgttaggaaactggcaagaatttcttgatttccgtgataagattttgaaagctttggaaagtgctcgtgaagcaaaattgattggtaaatcattggaagcaacagtaactatttatccaaatgaagttgtgcgtactttattgacggcaattgatgaaaatgttgctcaacttttgattgtatcaaactttgtagttgccaacgaaccagtaaataatgccccagagtctgcaatgaaatttgatgaccttgcagttcttgttgaacatgcggctggagaagtttgtgatcgttgccgtagaacagatgaaacagttggacacaatgctaatgaacatctcaaaatgctttgtgaacattgtgcacatatcgttgaaacagaattccctgaaattcttgaagaaggttttgaagattaa

SEQ ID NO: 399 - DNA, 1023 bp, Lactococcus lactis
atggcagttacaatgtattatgaagatgatgtagaagtatcagcacttgctggaaagcaaattgcagtaatcggttatggttcacaaggacatgctcacgcacagaatttgcgtgattctggtcacaacgttatcattggtgtgcgccacggaaaatcttttgataaagcaaaagaagatggctttgaaacatttgaagtaggagaagcggtagctaaagctgatgttattatggttttggcgccagatgaacttcaacaatccatttatgaagaggacatcaaaccaaacttgaaagcaggttcagcacttggttttgctcacggatttaatatccattttggctatattaaagtaccagaagacgttgacgtctttatggttgcacctaaggctccaggtcaccttgtccgtcggacttatactgaaggttttggtacaccagctttgtttgtttcacaccaaaatgcaagtggtcatgcgcgtgaaatcgcaatggattgggccaaaggaattggttgtgctcgagtgggaattattgaaacaacctttaaagaagaaacagaagaagatttgtttggagaacaagctgttctatgtggaggtttgacagcacttgttgaagccggttttgaaacactgacagaagctggatacgctggcgaattggcttactttgaagttttgcacgaaatgaaattgattgttgacctcatgtatgaaggtggttttactaaaatgcgtcaatccatctcaaatactgctgagtttggcgattatgtgactggtccaaggattattactgacgcagttaaaaagaatatgaagcttgttttggctgatattcaatctggaaaatttgctcaagatttcgttgatgacttcaaagcggggcgtccaaaattaacagcctatcgcgaagctgctaaaaatcttgaaattgaaaaaattggggcagaattacgtaaagcaatgccattcacacaatctggtgatgacgatgcctttaaaatctatcagtaa

SEQ ID NO: 400 - DNA, 477 bp, Lactococcus lactis
atgcgtagaatgattatcgcaaaacttcataatgtaacaggaattatgaatcgatttaccgccgttctcaatcgaaggcaagtgaacattctctcaattaccgctggagttacagaaagtcaagacttaactcataccacttttgttattgaagttgatcatcttgatgaagtagaacaaatcattaaacaattaaatcgcttaatagatgtgattgaagtagctgatattacagatttgcctcatgtagaacgtgaagtcgtcttgattaaagtatcagctccaccgaccattagggcagaaatttttacaatgattgaaccttttagagtaaatgtagttgatgtcaatctggaaaatgtcaccattcaattaacgggtgattcagcaaaaatcgaagcacttattgatgttgttagtccttatggcattctaaatatggctcggacaggtagtgcaggttttgagcgtggctaa

SEQ ID NO: 401 - DNA, 219 bp, Lactococcus lactis
atggcaaaagatgatgtaattgaagtagacggcaaagtcgttgacaccatgccgaatgcgatgttcacggttgaactcgaaaatggtcaccaagtcttggcgacgatttcaggaaaaattcgaaagaattatatccgtatcttgcctggagacaaggttcaagttgaactctcaccatacgatttgacacgcggacgaattacttaccgatttaagtaa

SEQ ID NO: 402 - DNA, 951 bp, Lactococcus lactis
atgactgaatttataacacttggcgaacctttagtcgttcttgcctcagaaaatcaagatataagtttagatgtagctgagcatttcagcaaatatttagctggtgcggagctaaatgttgcgattggtttgagtcgtctaggacataaaggaatttacctttctaaagtcggagaggattcatttgggaattttattattgaatcagtcaaaaaagcggagattgaaacgacctatctcaccaaagataaaaactattcaacaggcttttatttaaaacaaaaagtaagtgagggcgacccaaaagttgattattatcgcaaaaattctgcagcggccaatttatccattgctgaactaaaagctctagatttatcagggataaaaattgcgcatctctcaggaatttttccagccctttcagaaactagtttaaaaacttttcaagcattcaatcaaaaattaaatgaagcagatattttaaccattttcgatccaaatttacgacctgtactttgggataatcaagaaaaaatgataagaacaatcaatgatttagcaaagcaaagtcaaatcattctgccaggaataaatgaaggtgaaatcttgaccggttcatccgaaccagaaaaaatcgctaatttttaccttgagcaaagccctctcacaaagattgtagttgtcaaattaggtgctgacggtgcttttgtaaaattaaaaaatggtgaacaatattttgtttctggatttaaagtagcaaaagttgttgatacggttggagcaggagacggattcgccgttggtcttgagtctgccttacttgaaggaaaaaccttaaaagaagccgtcaagcgtgcctgtgccgttggagcattagcagttcaaagctcaggagatagtgaaggttatcccacaaaagaagaattaaaagcattttacaaggagatgtag

SEQ ID NO: 403 - DNA, 1443 bp, Lactococcus lactis
atgattaaattttttaattcaatgatttttaaaggagtagttgcacacctacttctttttgtcatcctttttatgagcagttttgattacaattttgctcatttaagtacttttattggttattacttattttcactcgtctttgttttagtctttctcaatcagcaacatcgcatgattgtgaatgtttctaaacagatgaatgacataaaaaatggctatttaaatcgcgataaaatcccaaaagggacgagtgaaatcaatgaattatatgatgaaattttaaaacttggtgaagatattgttcgcacgcagaacaatcttgaaaatcagcgtaatcaattagatagtattctcgcatatatggttgatggcgtcattgccaccgatcgtcgtggaaatattattatggccaataaatcagctttgcactatttgaatacagataatgatctcttgatgcaaaaaaatattgttgaagttttaaaaattactgaccaatataatttttatgatttattagaaaaagaacctgaaataactattgagacacatgattctgggaatgaatccatttcgctccacattaaatttgccctctttcgtcgtgaatctggtttcatctcaggaattattgccgtcttacatgatatgactgaacaagacaaggccgaacgagagcgccgtctctttgtttccaatgtttctcatgaactccgaactccgctcacctcagtaaaagcctacttggaagcactagaagacggagccattgaggataaagaaacagcttcatcctttattaatgtttcacttactgaaactaatcggatgattcgaatgatttccgaccttttgactttatcaagaatggatcaagaccgaatcgttcttaataaagaaatgattaatttaattgccttcttagactatcaaattaaccgtttagaccaaattttagaaaccgaatcaaacgatttaatctcttctaatttcactctagtcagaaaatactctgaacagcccatctgggtcgaaattgataccgataaaattgctcaagtcattgacaatatcatcggaaatgcaattaagtattcacctaaaggtggaactattacaatttccgttgaaaaacgtgaaagtgatgttctaatctccatcagtgaccaaggaatggggattccaaaatctgatttacttaagatttttgaccgtttctaccgagttgataatgcttcaagaaattcaaaagttggggggacaggtttaggcctctctattgtccatgatattgttaaaatacatggcggaacaatttttgcaagttctgaaggagaaggaaaaggaacgacctttagtttcactcttccatattctttagaagccgcagatgactgggatgatggcactgatgagtttgaatttgaggataatgaataa

SEQ ID NO: 404 - DNA, 963 bp, Lactococcus lactis
atgtctaaaaaaattgtgacacttgcgggagatggaattgggccagaaattatgtcagctggtttaagtgttttaaaagctgtcagtaaaaaaattgattttgagtatgaattagaagctaaagattttggaggaattgcaattgataagcatggtcatcctttaccagaagaaactttgcaagcagttaaaaatgctgacgcaatcttgctcgctgcaattggtcatcctaaatacaacaatgcaaaagttagaccagaacaagggctacttgctttacgaaaagaattaggactgtatgctaatgttcgtccattaaaaatttatccggctctaaaaaaactttctcctatccgaaatgttgaaaatgttgatttcctaatgattcgcgaactgacagggggaatctatttcggtcagcatgaattggcagatgacaaagcacgggatgtcaatgattattctgctgatgaaataagaagaattcttcattttgctttcaaaagtgctcaaagtcggcccagaaaattactgacttcggttgataaacaaaatgtccttgcaacttctaaattatggcgaaaaatggctgatgaaattgctgacgaatatcctgatgtacgattagagcaccaattggtcgattcttgtgcgatgttactgattactaatccgcaacaatttgatgtgatagtcactgaaaatctatttggtgatattctctctgatgaagcaagtagtttggccggtagcttaggagtgatgccttcgagttcgcatggatttaacggtttagcactctatgagccaattcatggttcggcaccagacattgcaggaaaaggaattgcgaaccctgtttcgatgattctatcaattgccatgatgctaagagaatcttttgggcaagaagatggggctacgatgattgagaaagccgtaacccaaacttttactgactga

SEQ ID NO: 405 - DNA, 1383 bp, Lactococcus lactis
atgtcaggtaaaacaatatttgataaactttgggatcagcatgtgattgctggaaatgagggagaacctcaactgctttatattgaccttcatgttattcatgaggttacgagtccgcaagcatttcagggcttacgtgaagcaggacgtcgtgttcggagaaaagatttgacatacggaactcttgaccacaatgttccaacacaagatatttttaatattcaagatttgatttctaaaaaacaaattgatacttttactaaaaatgtcaaagaatttgatgttccagcggagactcatggtggaaaaggacaaggaattgttcacatggtagcacctgaatctggcagaactcaaccgggaaaaacaattgtttgtggcgatagtcataccgcaacaaatggagcatttggtgcaattgcttttggaattggtacaagtgaagttgaacatgttcttgcaactcaaaccatttggcaagttaaacccaagcgtatgaaaattgaatttcaaggtcatccacaaaaaggaatttatagcaaagactttatcctcgcattaattgctaaatatggtgtggatgcaggtgtaggttatgcggttgaatatagtggggatgctatcagtgatttaagcatggaagaacggatgacaatctgtaacatgtcaattgaatttggggcaaaaattggcctgatgaatcctgatgaaaaaacttatgactatgtcaaagggcgtgaacatgcacctaaaaactttgatgaagctgtcagtaaatgggaaaaacttgtcagtgattctgatgcacaatacgataagattttaagtcttgatgtcagccagttgaaaccaatggtgacatggggaacaaatcccggaatgggcctagaatttggcgaaaagtttccggaaattaacaatgatttgaattatgaacgtgcttatcagtacatggatttaaagccaggccaaactgcttctgctattgatttaggctatattttcattggttcttgtacgaatgctagacttggtgatttagaagaagcagcaaaaattattggagacagacatattgctgatggactgacaggaattgtcgtccctggaagcagacctgtgaaagaagcggctgaagcacaaggtcttgataaaatttttaaagaagctggttttgaatggcgggaaccgggttgctcagcctgtcttggaatgaatcctgaccaaattccagaatacgttcattgtgcttcaacctctaatcgaaattttgaaggacgtcaaggacataatgcaagaacgcacctgtgctctccagctatggccgctgccgccgcaatcgctggtaaatttgtagatgttagaacgctcgtaacagattag

SEQ ID NO: 406 - DNA, 576 bp, Lactococcus lactis
atggaaaaattcacgatttacaaagggacaagtgttccagtcatgaacgataatattgacacagaccaaattattcctaaacaatttttgaaagcaatcgataaaaagggctttgggaaaaatttattttatgaatggcgttatcttaaagattacgatgagaatcctgattttattttgaatgctccaaaatacaaaaaagcttctctgttaatttcaggagataattttggttcgggttcttcaagagaacatgcggcatgggccttatcagattacggctttcgggcaattattgctggctcttactcagatattttttataataatgctttaaaaaatggcttgttaccaattaaacaaccaagagaagttctaaatcaactgacaaaactgtcaagtcaagaagaaattacaattgatttaccccatcagctaatcatcacaagccttggtgactttcattttgagattgaccccatttggaaagataaattaattaatggcttagatgatattggaataactttgcaatatgaagaagcaatctcagcttacgaacaaaaaaatcaataa

SEQ ID NO: 407 - DNA, 1158 bp, Lactococcus lactis
atgaaaaaagcagtacattttggtgcaggaaatattggacgtggtttcataggtgaaattttgagtaaaaatggatttgatattcactttgttgacacaaataaatctataattgccgaacttaataatcggcattcctatgaaattgggattgcaagtagtgaacatgaaaaaatttctgtaaaagctgtctctggtattaacaatagtgagaatcctgaggcagtcattgaagcaattgcaaaagctgatattctaacaacagcgattggtcctaatgtcttgccttatattgctgagcttattgcaaaaggacttcagaaacgtaaggaagaaaaggttcagagcccgttagatattattgcctgtgagaatatgatagggggctctgaatttttggaagaaaaagtgtccgattatctgtcggaatctgataaactttatctttctaaatttattggttttcctaatgctgcagttgaccgtattgttcctgctcaaaaacataaagatgttctctatgttgaggtagagccttttagtgagtgggtaatagatgcaagtcatttaaaaaataaagaaatcaaacttgaaggagttcattatacaactgacctcgaaccatttattgagcgtaaacttttttctgtaaactcaggacatgctgcagttgcctattctagcgcatataaaggttataaaacaatattagaaggtttacaggatgaagaaattttgaatatcctaaaagcagttcaaaaagaaacacgcgctttacttttagcaaaatgggctcaatattttaagcaagatgagttaattaaatatcatgaactaatcatttctcgcttttctaatccagaaattattgatgaagtgtcacgcgtggcaagaacacctatccggaaattaggatatgatgaacgttttattcgtccaataagagaattaaacgatcgtaagctttcttatcaaaatcatctagatattgttggaaaaatttttgcttaccatgatgaaaatgatgctcaagccattcaactccaagaaaaactaaaaataacagaactcccaatgctcattgaagaagtgactggtctaagcaatcaaaagttgattttggaaatcgaaaaggttattaatcactataaaaaataa

SEQ ID NO: 408 - DNA, 942 bp, Lactococcus lactis
atgattgaaaaatataaaaatatattgataacttttatagcactagctgctatcgtttttctagtaggttgctcaaataaaaaaacagaccaagtcacagataaaaaaataaatgtggtcgtgactaattcaattttggcagatatcacaaaaaatattgctgatgataaaatcaatttgcatagtatagttccggttggaaaagacccgcatgaatatgaaccattgcctgtagatgttcaaaaaacttctaaagcagatttaatcttttacaatggtttaaacttggaaacaggtggaaatgcatggtttacaaaactagtgaataatgcaaataaaaaagaaaatattgattattttcctgtaagcactggagttgaggtcatttatcttgaaggaaagaacactgaaggaaaagaagacccgcatgcttggctcaatttagagaacgggattatttatgcaaaaaatattgaacaacagttatctaaaaaagacccagttaataaggatttttataaacataatttagataaatatgttaaaaaattatctgatcttgatcagcaagcaaaatctaaattttctttaatacctgaaaatgaaaagatgattgtaacgagcgaaggttgttttaaatatttttctaaggcttataatattccctctgcttatatttgggagataaatacagaagaagaaggcacgccagatcaaataaaaaatctggttagaaagttaagagctactgaactcaaatcgctttttgtagaaagtagtgttgataatcgaccaatgaaaactgtttctaaggatacaggaattccaatttattcaacaatatttacagattcagtggcgaaaaaaggggaaaatggggatagctactatagtatgatgaaatggaatttagatcaaatttataaaggtcttgctaaatag

SEQ ID NO: 409 - DNA, 1314 bp, Lactococcus lactis
atgtctttgtttttagatacagcacgaattgaagtaaaagctggtaaaggtggcgatggtgcagttgcttttcgccgtgaaaaatatgttccagatggtggtcctgccggtggtgacgggggaaaaggcggttctgtaatctttaaagttgatgaaggaatgtcaactttgatggatttccgttataaccgtattttccgtggtaaaccaggtgaaaaagggatgaacaaaggaatgcacggtcgtggagccgaagatttgattgttcatgttcctcaaggaacaactgttaaagataacgaaactggtgatgttttagttgacttaatcgaaaaagaccaagaatttgcggttgctaaaggcggtcgcggcggtcgtggaaatattcgctttgccacaccacgtaacccagcacctgaggtagcagaaaatggagaaccaggagaagataaaattctacttttggaacttcgtgttttagcagatgttggtttagttggttttccatctgttggtaaatcaacattattgtcagttgtttcaaatgcgcgtcctaaaattggcgcttaccatttcacaacaatcactcctaatattggaatggttcaagtaggttatggagatagttttgttatggcagatatgccaggattgattgaaggagcgcactctggtgcaggactgggaattcaattcttgcgtcatattgaacgtacacgtgtccttcttcatgttcttgatatgtcagaacttgaaggacgagatccatacgaagattacaaaacaatcaatgatgaattagaatcttacaatttacgtttgatggaacgtccacaaattattgttgccaacaaaatggatatgccagaagctgccgaacgtttagctgaatttaaagaaaaattagctgctgatttaggtcctgataaagaaatgcctgaaatttttgaagtttctggcctgactaaaacaggacttcaaggtttgcttgcacgcacaagtgaattacttgcacaaacaccagaattcttactttacgatgaagatgaattagcggatgaaacagcttattacggctttgaagaagaagaaaaaccatttaaagtttctcgtgatgatgatggtggatggcgcttatctggggataagattgaaagactctttatcatgactaattttgatcatgatgaatcagttatgaaatttgctcgccaaatgcgcgcgatgggtgttgacgaaacacttcgttcaatgggagccaaggatggcgattacgttagaattcaaaaatttgaatttgaatttgtagattaa

SEQ ID NO: 410 - DNA, 960 bp, Lactococcus lactis
atgtggaaagtaattattagacgtattttattgatgatccctcaattatttatcttgagtattcttgttttcttctttgctaaattgatgcctggtgatcctttttcagggttgattggtcctcataccgacccacatgaagttgaagcattaagacgggcagcaggtttatatgacccttggtgggagcagtatctcaggtggctagggaatgccatacatgggaatttaggaatgtcctataatctcaaagagcctgtgatgactgtcattggacatagagcgattaatactttttggatgtcacttttgtcagttattttaacttacttatttgctattccgatgtcgatagttgcagctcgaaatgaaggaaaatggcaagaccaattgtggttaacctataattcaattacttttggtattccaccttacgtattctatctcttgattatctttatctttggttatagtcttaattggtttccgacaggtgggacggtaagtccagatgcgatgggaataattcctgttttctttagtaagatttatcacatgattcttccggcttttagtttggcggtctttggaacagttggaatctttacttacttccgctcaggaattttagatgaacaaacacaagattatgtacgaacggctcgagccaaaggggttaaggaaaaagtgatttttagacgtcatattttgagaaatgcctcattaccaattgcttctaattttggatttgtgattactggactcttgggaggagcaatctttgctgaaacaattttcggctatcctggcttaggacaactttttattacttcaatatctgggcgagattattcaatgattacggctttgattttattaaatggttttttgggacttcttggagccctcctgtcggatattatcatggcaatggttgacccacgaattcggattcaataa

SEQ ID NO: 411 - DNA, 1638 bp, Lactococcus lactis
atgaagacttggaaaaaagttaccttaggtacagttgcacttggttcggcagctttgcttgcagcatgcggcaatagcggttctagctcatcgtcatcatcaaaagacattcaatggaatttgacatcacctattcaaacattggattcatcactcgcgacagatacatattcaaatatcattattggtaataccaatgctggtttgacacgtgtggacaaagatggtaaagcacagccagaattggcaaaatcagttgatgtatcaaaagatggcttgacatatactttccatcttcgtgatggcttgaaatggtcaaacggtgatgctttgacagctaaagacttcgtttattcttggcaacgtgcggttgatccagcgactgcttcagaatacggatacctccttggcccagttaaaaacgccaacgagattaatggtggtaaagctgataaatcaacacttggtgttaaagcaactgatgacaaaacatttgttgttacccttgcacaaccaacaccatactttgaattcttgacagctaactctgtttattacccactcaaccaaaaagtggttgaaaaatatgggaaacaatacggaacatcttcagagaaaatggtttactctggaccatataaatttgaaaaatcaaaaggttggaacggttcaaaccaaacattctcaatcgtgaagaatgacgattattgggataagagcgcagttaaaactaaagaaatcgacttccaagtggttcaagaccctaaaacttcatttaacctttataaacaaggtaagattgtccaagcaagtattggtgacccagaccttttcaaagcaaataaaaataataaagatgtcgtatctttggatgaagcaacaacagcttacattcaatataatcaatctgggaaaaataaagctcttgctaacaagaacattcgtgaagccttcaaccttgctactgaccgccaacaatatgttgatacagtaacgcctgcttcgaatcctgcgacaggcttaacaccagcgggtatggctaaaacaaatactggtgtagactttgctaagtatgcagcacaaccatataaatacgatgccacagcagctaaagcagcttgggctaaaggattgagcgaaattggcgaaactaaacttactttgactttaacaactgatgatacatcagcttctaaagactcagcaactttccttaaacaagcatgggaaaaacaacttccaggtttgactttgaatatcaaatcagtaccatttaaacaacgtttgaatgactctactactggtaactttgatatggttatctcactttggggtggtgactatgctgaaccgtcaactttccttgatttatttgtaaaagatggaccaaataataatggtaaaatcaataacgttacttatgataaagccattaaagcagctgaagtaacagatgcgcttgatcctgaaaagcactatgcagactacaaagcggctgaagaatcactttatacagaatcaaatctcaatccgctgtacttccgtacaactccagtcctccgtaatcctaaccttaaggatgtacgctttggttcaactggtttaatgtatgacttcaaaacagcttacctcaaataa

SEQ ID NO: 412 - DNA, 1050 bp, Lactococcus lactis
atggcagaagaaaaagtattagaagttaaaaatttgcatgtcaatttccacacctatgctggagatgttaaagcgattcgtgatgtatcttttgatttagaaaagggacagaccctagcgattgttggtgagtctggctctggtaaatcagtaacaacaaaaactttgatgggcttgaatgcgaaaaatgcggtaataccacaaggtgaattattatttaaagggcgtaaccttcttgatttaaaagaggaagagtggcaaaaaattcgtggaaatgaaatttcaatgattttccaagacccaatgacttctcttgacccaacaatgcgtattggaaaacaaattgctgaacctttgttgaaacacaacaaaggaatgagcaaagccgatgccatgaaacgggccctcgaattgatgcaacaagtcggaattcctgatgccgaagtgcatattaatgattatccacaccaatggtcaggcgggatgcgtcaacgtgcagttatcgcgattgcattggctgctgaccctgaaatcttgattgcagatgaaccaacaactgcgcttgacgttacaattcaagcacaaattatgcatatgatggctgaattgcaagaaagaattaattcatcaattgtcttcattacccatgacttgggagttgttgctggttttgcacataaagtggcggtaatgtatgcgggtgaaattgttgaatacggaacagttgaagaaattttctataacccacaacatccatatacttgggggctcttagattcaatgccaacggttgattcaagtgtggaccgactggtttcaattccaggaactccacctgatttattgaatccaccaaaaggagatgcctttgcagcacgtaataaatttgccttggcaattgattttgaagaagaacctccatactttgaagtatctccaacacattttgccaaaacttggcttttagacccacgagcaccaaaagtaacgccttccgataatatcttggcacgctggaaacgctgggaagaattgaaaggggataaatga

SEQ ID NO: 413 - DNA, 1887 bp, Lactococcus lactis
atgaaggaatttataataaaaaatacggatatttggaaaattttcctaaaatattatcggtcagatgaagaaattgtttttttacatagtagtcaggtgaccgaaaatgagcattatagtattttagctcataaaccttataaaaaggtttcaaaatataagggtcaagtgttttttaatggtgaaaaaaagaagttcaattttttagatgcggtagatttgctgaaggatgagagagttgaacgacctaaaaattggcctttttatccagaattattgggttttgtaagttatgagcaagatccggcttgttttgcagcttatgatgaagttttactttttgaccatagaacaaaactgttacgtgtcgtgcaatttgaacaaactgatggccaatattggctgactgaatcggaagaaattgaagtggattcagagattgagttcgatggtcagaatggcataggggctatttttattgaccaaacgaggcaagaatatattgcttcaataaaaaaattacaagattatatgaaggctggcgatatctatgttgccaatttgacgcaacaatttgaaatttggtccgatcaaaaacctattgaagtttttaagaaaacaaggaaacaaattccagctcctttctcatcatttttacaatatcctgaatggaaaatgacgcaaatttcaagttcagtggaacgctttgtttctattcatgatggagcattaatttcaaaaccaattaaaggaacaattgccagaggagaagatgttggagctgatagattacaaaaggaaatactttccgacagtagtaaagaacggtctgagttactgatggtgacggatttattgcgtaatgatattgtccgaattagtcaacctttttctttgtctgtccctaaatttgcagaaattgaaactttttctcatgttcatcaactggtgacttcaataaaaagtagaattaaagaagatttgactttttcagaatttatgacggctttattcccgggagggtcaatcacaggtacacctaagaagcgggcaatggagattattaaggaagttgaaaaacaacctagaggaatttatacagggatgcagggttggttaagtcgagaaatggatttggatatgaacatcgtgattcggacattagttcatgacggtgagcattatcaacttggtgtaggcggtggaattacgttcgagagcaaagcagaagcagagttttcagagattttactaaaagcaaaaccctttttagatattttaggtgtaaaagatgttccaagtattttatttacaacaggcattattaaaaatggtgaattgttaaatttagagggtcatgtcaatcgcttgaaaaaacaataccatcatccagatttggaagaaaaattgagaatatttgcccaaaatgttactgacggcgttttacgtatcagtactgacggagattctttgtcccctgggattcgtcagctgacgcattcaaatgaggcctatcgagttaaactgtcgtcaattaatgacaaacctagtcttttgtctaactttaaactttcaggcccagattttcaaaaggtctttcgtcaggaagtcttagaagcgaaaaaagaagggtttcaagatattctatttcatacagatggtttgatcagtgaattatcaatcggaaattttgtggcaaaaaaggggaatcagtacgaaacgccagccaaatatgctctaaaaggaacttttttagatttatttgcgaaaaatcatacgctaatatataaagatattgccctttctgatttgaaaacatatgattgtttttatatgacaaatgctgtcagaggattagttgaaataaaaattgatggaatttcctaa

SEQ ID NO: 414 - DNA, 2757 bp, Lactococcus lactis
atgaaattttatcaaaaatccaaagaagaattattacatagttatgatgttaagatagataggggactttcgagtactcaggttactgataatcgagaaagatatggtgaaaataaacttccagaagaaaaggaagaaagctatttaaaagtattttttaaaagttttaaagaaccaataatcattgttttattaggggcagtcgctctatcattttttagttcattttattcattccaaatagttggagataaaaaacatggtttagaatctttatatgaagcgattgctatagctattttgattattataaatgcatttttaggtttttggcaagaaatcagtgctcgtaaaaatttaaattcactaaaagaaatgaacaatcgttttgcatctgtactaagagatggagccttagaaaaaatttcatcaaatgagctagttgttggtgatatcgtaaaagttacagtaggtgattttgtggaggccgatataagatggttagagcttgatgaacttcaattaattgagtctcatttaacgggtgaagctgatgctataataaaaaatatagaggtcattaatgaaaacgtcgaaattggtgatcaaacgaatatgggattttctggctctatcgtttcaaatggacagggaattggaatagtcgtagccacgggagaaaacacagaacttgggaaaatttctcagttgatgaaagatgagggaataaaatcatctccattacaagaaaccgtaaaaaaacttactaaaacactgatgaaaatatccgctgggattgttttattaacttttgtatttggattaatcagttctggagaattttcaattaactcaattacttcagtattttcaacctcaatcgctctcgcagttgcctctattccagatgctttaccagttgttctctcaatagtattgacaatcggtgcagtcaaaatgtcaaaaaataaaggtctgattaaaacactaagtagtgtggagactttagggagtacttcttacatctgttctgataaaacaggtacattgacccaaaatgagatgaccgttacaaaattttatgctaatggtcaactgtataatgtggatggtctgggatatagttccattggtgaaattcacttgatagcaaaaggtgaaaaaaatataaattttgctcaatttatgaaaaatatcgttttgtgtaatgattcaagtgtcaaagaagttgaggggcaagtaaaaacttttggtaatcctacagaagttgctcttaccgttcttggtagtaaagccggctatagcaagaataagctattaaaaaacaacaaaattattagaactcttccttttagtagcagtagaaaaatgatgagcgtcattgttcaaaatgatgaaggattctacgtttataccaaaggagcaccagatgttttaatggaaaaagcttcggggattttgattggagatatagttgaccaatctgagcagtcaaaagataactttattaaagtggtagatgattatgcggatgaagcactaagaaccttggctgtggcctacaaaaaagttgatgaagaagaggcattatacggagccacggaagacgtagaaaaagattttatattaaccggagttgcaggaataattgatcctccacgagaagaagtgaaagaatctatcagacaacttcatgatgcaaatattaatgtggttatgattacaggggatcatgaaaaaacagctcgtgcgattgcctatgatttggggattgtaaaagaaaaaaatgcaacagttttaaagggaattgaccttgaagaaatgtcagatcagaagctttatgcagaagtaaaaaatgttaatgtttatgcaagagtgacaccagagcataagcaacgtattgttaaacagctccaaaatcatcaacaagttgttgctatgaccggagacggagtaaatgatgctccagctttaagagctgctgatattggagtggcgatgggaattactggtacagaagtaactaaagattctgcagatctcattttactagatgataaatttacaacgatagaaaaatcagtttatagcggtcgtactatctatgctaatataaaaaactttatgagacacgaactgacaacaaatgttgctgaagttttggcccttgtattaggtttagttttatttagaagtagtgttggaaatgtagcagcaatgactccgacattgactgctttaatggttctttgggttaatatggtgagtgatgcgattccatctttttctttgggttatgatgttgccgaaacagatttgatgaaagaaaaaccacggaaccctaatgaatctattcttgctaaccacacgtggtctagggttttgattaggggaacagttatgggaacgatggtttatcttggatttctcctggctgctcaaaatggattgaacgctagtgaagcacaaacagttgcttttctgactttagtttatggacaattatggcatgtatttgatgcaagaagttcaagaacattgtttagacgtaatccttttgggaatattagacttgttggagcagtgttatttgcaggagtttcttcatttttagtaacaatcattccgtttttcaatagtgtgatgggaactgctcagttaacattacctgtatatctacttgtgatttttattcctgctctacctacattaatattgtcaggaataaaagaagtttttaaaataaaaatatggtaa

SEQ ID NO: 415 - DNA, 1242 bp, Lactococcus lactis
atgaagtacgaaaaactgttaccacgttttcttgaatatgttaaagtaaatacacgttcagatgaaaacagcacaacaacaccttcaactcaagcgctcgtagaatttgcccacaaaatgggtgaagatatgaaagcccttggtctcaaagatgttcattatcttgaatcaaatggttatgttatcggtacaattcctgcaaatacagataaaaaagtgcgcaaaattggacttttagctcacttggatactgctgatttcaacgcagagggtgttaacccacaaattttggaaaattatgatggtgaatctgtgattaaacttggtgatactgagtttacacttgatccaaaagatttcccaaatctaaaaaactacaaagggcaaactttagttcatactgacggaacaactttgcttggttcagatgataaatctggtgtagctgaaatcatgactttagctgactatctattgaatattaatcctgattttgaacacggtgaaattcgtgttggatttggtcctgatgaagaaattggtgtaggtgctgataaatttgacgtagctgactttgatgttgactttgcttacactgtagatggtggaccacttggagaacttcaatatgaaactttctcagcagctggtgcagtgattgagttccaaggtaaaaatgttcacccagggacagcaaaaaatacaatggttaatgcattgcaattagcaattgactaccacaatgcacttccagaatttgatcgtcctgaaaaaaccgaaggccgtgaaggtttcttccatcttttaaaacttgatggtacaccagaagaagcaagagctcaatatatcattcgtgaccatgaagaaggtaaattcaacgaacgtaaagctttgatgcaagagattgcagataaaatgaatgctgaacttggtcaaaaccgtgtgaaaccagttattaaagaccaatactacaacatggctcaaatcattgaaaaagatatgtcaattattgatattgctaaaaaagcaatggaaaatcttgatattgtcccaattattgaaccaattcgtggtggaactgatgggtctaaaatttcatttatgggacttccaacaccaaacctttttgcaggtggtgaaaacatgcacggacgttttgaatttgtttctgtacaaacaatggaaaaagctgtagatactttgcttgaaatcattcgtttgaacaatgaagtagtaaaataa

SEQ ID NO: 416 - DNA, 477 bp, Lactococcus lactis
atgagattatttttattcttaatcgcatggctcagatgcctgcaattgttagatttggagaagcaagtgaagtttgaatttaactttctcagaaaagaaatgataaatgagaatgataataaaggcacaacttatggttcaagaattgctgccaataacaccaaacagcgtttaagacggattgcatgtcgaacagcccatgaatggctagaccaatcagaagaagtatttgagcaattccatgagaagcaccgttgcgatgtgttcgtagtaatttatccacctaaacgctttaaatatgatccaccaaattatgaaccaacttctaaagcattaatcgatggactgacagatgctggaatttggaatgatgataattacaatgttattcgcagaacaagttttgagcatggtggactttctggagatacaaaaacctggaaagtagagttagtagtgaaagaactgacagaatag

SEQ ID NO: 417 - DNA, 363 bp, Lactococcus lactis
atggcaaggttagaaaaaatttatgatgtttatttcaatggtataaaaatgggaactggtacgaaaaaagagctttcgaaaatgcttcttgtttcacctcattcagtcgctggatgggttaaaaatggtatggctaattctccaaaaaataacgcagtcaaaatcgcagtcgtaaatgaaaaagcgatgatggagaaatatcccggttggaagccctatggtggttcaaaatctaagatttctgatgaaataaccgatcgcgaccgtagaaagcacgaaacaaaagaagaacgtagattgcgaagaaatatcagagcgcaaatggcaatcgaagcagcacgcaaagaagaattaggattatag

SEQ ID NO: 418 - DNA, 210 bp, Lactococcus lactis
atgagttatgttgtaaataaaactggcgactttagcggttatcatgaagtacacaaaggtgcttgccccaatcgtccgatagtcactgattcgtatcttattaataaacaatttgaaaatgaccttgatgccatggaatatgttaaagaaatatatccatcactccaggttagaccttgtttatcttgcatggacacatcctcacgttaa

SEQ ID NO: 419 - DNA, 399 bp, Lactococcus lactis
atgaagaaaatcaaaaatatagcaatttccactgttttaggtgcttcagcgcttatcggactatcagcctgttcacaagctgataaagtgagccaaaacgtaagcaatgatgcagataattttaaagttgaacgcagagtggttattatcaatactcgcacagataaaatcgaatttgttgctaaagggcttatctctgttaatactgaggacagtaagaaactagtaattctagcaaaggtaggtaaaagtcagtacaaaaaagatattattaatttaacaaataacaacatgtataccgttgaggacttatcaggagcgaacgtaaacagttataaatatgaagtgacgtggttacctgaatcagttgttcctgtgaaaattgttggagaaaaatga

SEQ ID NO: 420 - DNA, 1080 bp, Lactococcus lactis
atgagtattttaaacccttttgaacgcagaagctcaattacgcctaataattattacccttttatggttcaaaatggttcgattgttcctaattcgcttgtcgatgcaacagaagcactaaaaaatagcgatttatatgcagtgactagtttaattagctcggatatcgcaggtaccagatttattggtaatcaagtgttcacaagtgttctaaacaatccaagccacttaacaaatgcttttagtttctggcaaacagctatattaaatcttttgcttaacgggaatgtatttctagccattttaaaaggcgataatagcttgatgaaagagttgaggttaattcctagtaacgctataacaatagatttgaccgatgatacattgacttacgaagttaatcaatttgatgattatccaagtgctaaatataacgctagtgaaatgatacatgtaaaaatcatggcttatggtgtcgatacgctccataacttggttggccattctccactagaatctcttacaagcgaaatagggcaacagaaagaagcaaatagactttctctatcaactttaaaaggagcgcttaatcctacaagtgttgtcaaagttccgcaaggcaccttatcttcagaagctaaagactctataagaaaagagttcgaaaaagcaaatggaggaaataattcaggacgtgtcatggttctagatcaatcagctgatttttctacagtatccataaatgccgatgttgctaattaccttaattcaatgaattggggaagaactcaaattgccaaagctttcggagtatctgacagttatttaaacggaacgggagaccaacagtcgagtcttgaccaaattaaggacctttatgttaatgctttaaaccgattcattgagcctttaatttcagaactgagaatcaaatgcgattcatcgattggcgttgatatgtctcccattaccgactattcaaattctgtgtttaaagcagatatattgaactgggtaaaagaagggattattgagccaacagaagcaaagactttattagaaagcaaggggattatttag

SEQ ID NO: 421 - DNA, 570 bp, Lactococcus lactis
atggtagttaaagtctttgatgcttatattgaaggcgaaaaaaaagcaaccggaacaattgacgagatagccgattactttgatatttcccgcacctctatctcattatggataaagaatgggaaagatcctaaaaaagctaaccctaaatataagcacgctattttaaataaagaaaaaactaaagagcttacggaacaaaagaaaaaagaagagcgcaaacttcccgcttctgtttatgattattatgacaaaggggaattcataataacaggaactgctcgagaaatttctcaatttttaaagattggcaaacataacgtatattcatatatccaagttggtaagtacgcttttgattacagaaaaacaagaaaacatgcgattttaaacgaagcagaaactagaaaaagatttccattgctttcagtctcatcagaagaagaacttattgaaacaaaagaaaaagaacgtagaaaacacgaaacaaaagaagagcgtaggttgcgaagaaatatcagagcgcaaatggcaatcgaagcagcacgcaaagaagaattaggattatag

SEQ ID NO: 422 - DNA, 1206 bp, Lactococcus lactis
atgaagttttttaataacaaaagaagtccaacagaagaatcaaaagcaaaagatgaaatacccaaagcgccacaagttgtaatgactttgcccaatttttttaaagaattaatttcggacggttacacaaaattatctgacagcccagaagttagaatggctgtagattgtatcgctgatttagtttcaaatatgacaattcaactcatgcagaatggcgaaacaggagacaagcggataaaaaatgacttgtcacgagtggtagatattgagccaaataaatatttatcgagaaaaacgttcattcaatggttagtacgttctatgcttttagaaggaaatggaaatgcagtagtaaaaccacaagtaagcggcgataaaattattggattaactcctatttctccttataaagtgacatttaatgtgagtgatgatgatttagattattcaataacgtttgataataaagaatatgaccccagtaccttgcttcattttgttttaaatccatcaattgaacgtccgtttattggaacgggatataaagtggctttaaaagatatcgttggtaacttgaaacaagcaagcgtcacaaaaaaagggttcatggcaagtgaatatatgccaaatcttattgtttcggtcgattcagattctgatgaactatctgatgaagaaggacgtgagaactttgaagaaatgtaccttaaacgtaaagaagctggaaaaccttggattattccagaaggtatggttaatgttcaacaaattaagccattgactttgaatgatttagcgattaatgatgcggtaactttggataaaaaaacggtagcgggtatttttggagttcctgcctttttattaggggttggaacttataacaaagatgagttcaataatttcataaatacaaaaattatgtcaatcgctcaagttatccaacagacttacaataaattaattgttgaagaagatatgtatttctcactcaatccgcgaagcctttataattactcactgacagaaatggtaagtgctggtgcgcagatgacacaacttaatgcactaagaaggaatgaatttagaaattgggtgggaatgcctcctgatgctgaaatggatgatttacttgttttggaaaattatttacagcagaaggatttagtgaaccagaaaaaactcattcaagatgaaacttag

SEQ ID NO: 423 - DNA, 372 bp, Lactococcus lactis
atggccaataaaatttcaatagatgatttagctaaaaccattgaaagtgaagttcgtaattggactaaggatgttgtagatgatattgatgatatcaaaaaggacataactaaaaatggtgtcaaacaacttagggaaagcagtcccaagagaacaggagattatgcaaaaaattggacttctcaaaaattaaaaaatggagaccaagtaatttaccaaaaggctccgacctatcgtttgactcatttacttgaaaacggtcatgcaaaaagaaatggtggtcgagtatccccgaaagtccatattgcaccagttgaagaagaacttgtgtctaattatatcagcagggtagaaaagaggttgagtcaatga

SEQ ID NO: 424 - DNA, 1602 bp, Lactococcus lactis
atgacagaacattttataacactgtccaccacagagcctaataacaatgtcggtattgttaaattgagacatgcggacgttaatagtcaagccattgttgctcaaatcgtagagaacggtcagcccaagaactttgagggcttacagccgttcttttgtttaatggcacaggaaatcacagggcaaggggtatcagaagaaagtgttgtctcctttgatgctaaaaatggaacattaaaatatattgctagtgacaatgcgcttcaaatggttggacgtaacgaagcttattttagctttagaaaacaagaagatgggaagtggattgagcaattctccactcggacttttaactatattgttgagaaatccatttattcgcaacccttcaaagactcaaactattggtggactttcaaagagctttatcgaatttttaataagtatattgaagatggtaaaaatagctgggaagagtttgttaatcaaaacaaagaaattctagagtcagttgatccgggaggaaaaatactatcggaattattagcagctcgtaatggaaagcctaatttaaagactagaatcgacgatttagagaacaaaactaccgcacagttggcagaaaaagttgatatttcagctacaaataaattcaagggttattttggtacaaattttgatatgcagatgtcaaaggactgggatcaaacctatcccatttctaaatttgtaactgaaatacagcaacttaaaccttatcaactagatggtgtttttattactgttgagattcaacccctgagggagcaacgattagcttttgaagctaatacactcactacaaatgatttgcaatttacaacattgccggacttaacatcgttagctcaactcgtcaatttgtgtgaaactgaatcaataccaatcatgggattgaaaatacacaataattggtcaaacacacaatgggcaaaatttgacaaaacaatatggttttcaaaatatcgtgccacaatagatcaaattatagcgatcgcgccaactgaaaaaattggggtactgaatgagtcagacacaatctggagagatagcgcgtcagaagcaaatataatagacttgatgaactatttaaaagggactggaaaaaaagtaacactagaagggtcttggagtcctttaaccttgtctaaacctttacaaaatgctatggattactttgctatccacgcctatccttcgctatcgagtaaaagagaacgcactacttttagcgattgtttgatgggttggtctgtctcaaacatgatagataatttgcgaaaaattaagttcacctacccagacaaagagatatggattactgaaacaggtgtgcagaatttgtgggaagccttgagagcccctgaggattactatacgcctgaagataatacacctagtgctgataatctagtgcagacactatatttcgacagcatgtttcaatactttggaagtgatgaattagttagtggtgtattcatgtggtacttcgattcaaattattcattgctatttgaaaaaatgttgagaaaatatagggagggtacattccatgcttaa

SEQ ID NO: 425 - DNA, 831 bp, Lactococcus lactis
atgcttaataattatgtgaaaataaacggagatatagattgggttaacatagattatgcaactcacgcagcggctttatttcgagtcagattggatgaaaaaaaggctttttatacgtttttgggtagtaagggcgttgttgttgttaggttgcttcgtacatccagttacgaaaattactacaatgatattatgattcgcttttctagtttagacccgacgacaaagacaccgaacattagtgtgtatgacttaaataaagataaaatgtttggatatacctatgcgattaaagttatgtctgatgggtatgcttatttctacgtaaaagggtcgaataaatatgacagcttcaaatatcaattagtgtacgcaagcaatccatcatacatcgaggctctaggaacctctgcagacgtcatcacagtagctgactttgatagctcaacaaatgctgtcgcatactataaaccgtcttctcaaacatttaatgtccctactataacgatgggatacggacaaaactctacagatataaaaacacaaccgctaactgcaataaaccatggaaactatattcaactggttggttacatcctagtgtggtcaggactaacaaaccaaacggtattcacggtaaattctagtaagccaaacagagcgcacacgttttttgttgatgttatgggttctgctgatattagtaatacagctggcacgctacgtgttccaatgactattgagaaggacggaacagctagtataaatctcggaacaaccatttccacaactcgtttaatttatatagacacaacttatagattcctctaa

SEQ ID NO: 426 - DNA, 171 bp, Lactococcus lactis
atgctatattataagtgtctccgtttagtgtctaggcggagattcggttctttagctcagttggaagctaaccgttcggtcgctggttcgagtccagcaagaaccataaataaatggagagtgaaaaaaagagggggaaatcttgctaactcttttataataatgttttaa

SEQ ID NO: 427 - DNA, 396 bp, Lactococcus lactis
atgaaaagaccagttgaaattgttcaagacataattgcagctagtgactttccgcatgatgaaatctttcttgattctattcctagtgaaaaattagattctagtaatgaaacgcaagttttacttacagaatcagataatggaccaagtgattatggtaactcagattttatttcactcatgtatggtgtttatattcaaatcttttactcgaacgctgaagattctggtataaatattgttcaaagcgaaattaatctgatgaaatcatttataaataatgattggcttattgcgcaatcaaaaagtcactatatagaccctgatacagggcaaattattaaaaatttaacggtgcaacgcatcatgacgttaagcgagatagcaaatagctaa

SEQ ID NO: 428 - DNA, 507 bp, Lactococcus lactis
atggtttcattttatgatgcgatgcagcttattgtcgatagagctgaagaattaagtacaaaaatgtctgtagaagataaggcggaagttacaaaggcaggcgctaaagtttttgagcaagcattggcttatgaagttagaaataggcactaccgtcatcgtgatactggagaagatccacatttagcggatagtattgttatgaaaaataagaatattgacggagttaaagatggtcaaagtgttgtaggatgggaaagaagtacggaaaaaggtactcatacaaaaggttatatcgccaatatcattaataatggtagtcgctttcctcagttcacaacacgttctggaagaaagtacaaaaagcccggtgaagttgcggttcatgcagatcattttattgaagaaacaagaaaaaatcctattgttcagcaaggaatattaaaagctgaagctgaagcaatgagaaaaataattaatagaaaaaagaaggagagtaacttatga

SEQ ID NO: 429 - DNA, 423 bp, Lactococcus lactis
atggcagataagttagatagaattattggagattacgttaatggcagacttgaagccagaataaaatcaattgaaagtagatatctttataagcaaaaagtagataacttaggcaatcgtacagcttattctggtggttcggaacagttaagtcatgttttaaataaagaagcgcttgaaaatgatgaggaatacatcaagctcaaagacctgatgtaccaattcagcttgtggtacgaacctttaattaaggaggaaaaagaaataatcaagctaaaacactgtggttacggtggttttacatggtacagagtaatgatggaacttgataatgaagggattgagatttcagaaaagaaagctaagtttatttattatcgattcagaaaagatataaaccctcatattggctatttcatttga

SEQ ID NO: 430 - DNA, 360 bp, Lactococcus lactis
atgataacagcaattgcacagataatgacatctatctcaataataattttattggttcttatagtttttaccaataaacgtctggctcaattagaagttaagattgaacgttgtagagatttatacaacggaatagatttagtaccacttcgtgtaaaaattaattatcttgaaggaagcatcaaagctttatataaatataaagtattgtttaagcgtggatggtggagtagagaaggagaacttcaagaagaatatttctttaccaaaaaacaagcggataagtttattgattctaataatctaaaagaagtagtaattattagattagaggataatgaaactgagatagttaaataa

SEQ ID NO: 431 - DNA, 360 bp, Lactococcus lactis
atgacaaatttatacgatgaaacagtcacgattttagaaagccacgataaaacaattgccgatattgaatatattggtagttcagagacaaaaattaatacaaataaagcgctcgaattgatgaaaaaaacgaattatcatagtggttatggcggtcaagaaatagcagaaaacctaatgattaaagggaatggtttcatcatgacacgaggggaatatgatggctctgaatggtgggattatatgcaaacagacccgtctttaccgcaagtagagagagaagttaaaagttttaaagcaaacataggctgggaaagcttagaggaaattaatggcttggaggacacgaaaaatgactaa

SEQ ID NO: 432 - DNA, 927 bp, Lactococcus lactis
atgaaattcaaaaaactcggattagttatgactactgtctttgccggagccgcattggtaaccttatctggttgctcaagtagcgattcagcaagcaaggatatcatcacaatgaaaggtgataccattcgcgtttctgatttatacaaggaagccaaacaatttccatcacaaccgacaaatacattacttcaaaatttaacttttgacaaaatttttactaaagactttggaaaagaagtaaccgataaagatgtcagcaaaaaagttaagtcaattaaagaccaatatggtagccaattttcatctgctttgcaacaacaaggcttgactgaagcaagtttcacaccatacatgcgtacacaaatgcttgaacaagcagcgattgaccatgaaatcaaagaaactcaatatacagatgctaatcttaaaaaagcttgggaatcttaccatccagatgtaacagcttatgttgtttctgaaacatcaaaagatgcagcaacaaaagcgttggatgccgctaaaaaagatgatgctggtaaagcaagctttgaaaaaacaaatgctgaaagcaaagtaacatttaattcaacttcaacaagtgttccaacagaagttcaaacagctgctttcaaattgaaaaatggcgagttttcagatgtgattgaatcaacaagttcatcaacaggtgctacttcttactatattgtcgaaatggtaaaaacatctgaaaaaggaactgacatgaacaagtacaaaaaagaacttcaaaatgtcattaaaactgaaaaagaacaagatacaacatttgtaagtggagttattgctaaatacctcaaaaagaataacgtaactgtgaaagaatctgcatttgcatcactcttctcacaatttacacaaacatcaagttcttcatcatctaaataa

SEQ ID NO: 433 - DNA, 789 bp, Lactococcus lactis
atgaccaaaagaatttattctgttccctattttctctggattcttttctttgttatcgtccctttggccatgcttttatggcaatcattttttgatttaaatggtcactttacccttaacaattatatcctctatttttctagcggaacttacctcttaatgacatggaactctattctctacgcactgattattactgtagcgacccttgtcatctcctaccccgtagcttatgttttgaccaaactaaaaatgaaacaattttggctcatgcttattattttacctacttgggttaacttgttactcaaagcttatgcctttattggaatttttggtaaatatggttcagttaataactttttacagtttttgggaattggacggacacagattctatttactgacctaagttttattttggtcgcatcatatatttccattccctttatggttttaccaatttttaatgctttaaatgatttagatgataatttggtaaatgcgagtgccgatttaggcgcctcacgtttccaaacttttactcaagtgatttggccactttcattaaacggtgttagagctggagtgcaggctgtctttattcctagtttgtcactcttcatgttgacgcgtttaatcggtgggaataaagtcatcacactcggtacggccgttgaagaacacttcctaacgacacaaaactggggaatgggttcaaccattgctgttgttttagttgtagccatgttgcttgtcatgagaatgacgaaagaaaggagagattga

SEQ ID NO: 434 - DNA, 1068 bp, Lactococcus lactis
atgaaaaaattatcatacttctttgtaggaattttgattattactgcctcgttaggactgattactaatagaatgaaagctgctgatggagtcaaaactcaaaataatagcctgaccatttttaactggggagagtatatcgacccagacttgattagtaaatttcaaaaagaaacaggttataaagtaaactatatgacctttgattccaatgaagccatgtattcaaaagtcaaacaaggaggaacagcttatgacctgattgttccttccgattacatgattgaaaaaatggccaaagaaaatttgctcattaagctagaccatagtaagattaaaggtttaaaagatgatgaccctaaactcctaaatccggcttttgaccaaggaaatcaatattctgttccatacttttggggaacattagggattgtttataattcaaaaacagtaacaaggccaccaaaaacgtggaatgatatctggtcaccaacttacaaaaactcaattttactgacagacagtgtgcgtgacgttatggcaatggtccttagtaaacatggatattcattaaatacaaccaaccaaaaagagctagatatagcctatcaagatcttctaaaacttacgccaaatgtaaaagcaattttgggtgatgaaatcatgaattacatgattaataatgaaacacctttagctgtcgtctatagtggacaagtagcagagatgacctctgaaaataaaaatttgaaatacgttatccccgagcgaacaaacatttggtatgacaatttagccattccaaaaacagctaaaaacgtcaaagcagcttacgcatttatcaatttcatgcaagaacccaaaaatgcagcccaaaatgcgcagtggattggttatgcaaccccaaatttgaaagccaaagccctcttacccaaagaaattcgagataataaatccttttatccagatgaagcaaccatcaaagacgatgaagcctacaaaaaccttaatccatattggactggaatttataatgatttatatttagaatttaagatgaataaataa

SEQ ID NO: 435 - DNA, 591 bp, Lactococcus lactis
atgacttacccacaacttgaacttgaaaactacaaaggtactacagcaattatcaatacaaatcatggaaaaatgactgtaaaattatttgataatcttgctccaaaaaccgtaaaaaactttattgaacttagcaaagaggggtattatgatggagtaattttccaccgtatcatcaaagatttcatggttcaaggaggagacccaacaggaactgggatgggtggttcttcaatctacggagaaaaatttgaagatgagttctcaatggacctctttaatcttcggggagctttgtcaatggccaatgctggacctaatacaaacggaagtcaatttttcattgttcaaaataaaaacttgccttatcctaaagattcacttatccaaggagggtggcctgaagaagtagctgaaacatatactggcggcggaactcctcatcttgatggccgtcacactgtctttggtcaattggttgatgaagaaagctataaagttctcgatgaaattgcagctgttcgtgtaggtgcgcaagataaaccagtcgatgatgtcgttattgaatcagttgagattatcgagccataa

SEQ ID NO: 436 - DNA, 1074 bp, Lactococcus lactis
atgtttgatcagttagaatcaatagttggaagatatgaagaattgggtgagttattgtctgaccctgaggtggtttcggatacaaagcgttttatggaattatcgcgtgaagaagcagatttacgtgataaagtagcgacttataatgaatacaaaaaagttcttgaaacaatttctgatagtgaagaaatgcttggcgaaggtggacttgatgatgatatgaaagaaatgctcaaagaagaactttcatcagcaaaatcacaaaaagagcttttggaagaagaaatcaaaattttgcttttgccaaaagacccaaatgatggaaaaaatattattttagaaattcgtggagctgctggtggtgatgaagctgcactttttgctggtgatttgttgaatatgtaccaacatttttctgaatcacaaggttggaagtttgaaattatggaagcaaacatcaccggaattggtggatataaagaggtttcagctttaatttctggtccatctgtttattcaaaattgaaatatgaatctggtgctcaccgagtacaacgtgttcctgtaaccgaaacacaagggcgggtccatacatcaacggctactgttcttgttatgcctgaggttgaagaatttgagatgacaatcgaccaaaaagatttacgtgtggatatttaccatgcctctggtgctggtggacagaatgtcaataaggttgctactgcggtacgtatggtccatttaccaactgggattaaagtggaaatgcaagaagaacggacgcaacaaaaaaatcgggataaagctattaaattgttgaatacaaaagtctttgattactatcaacaaattgaattggataagcaaaatgcagaacgtaaatcaactgtcggaactggggatcgttctgagcggattagaacttacaatttcccacaaaaccgtgtgactgatcaccggattggcttaactttacaaaagttggatagtattttatctgggaaaatggatgaagtgattgatgctttgattgtctatgaccaaactaaaaaattagaagaattaaataaataa

SEQ ID NO: 437 - DNA, 1851 bp, Lactococcus lactis
atgaaacaatcaaaaatgcttataccaacccttcgggaaatgccttctgatgcccaggttatcagccatgccttacttatgcgcgcaggatatgttcgtcaagtttcagcaggaatttatgcttacttgccattagcaaaccgcgtacttgaaaagttgaaaaatatcatgcgtgaagagtttgacgaaattggtgcagtagaacttcttgccccaagtcttttgacagctgacctttggcgtgaatctggccgttatgacacatatggtgaggatttatataaattaaaaaaccgtgataattctgattttattttaggaccaacacatgaagaaacaatgacttctcttgtccgtgatgaaattacttcttataaaaaattaccacttaatgtttaccaaattgctccaaaattccgtgatgaaaaacgtccacgttatggactattgcgcggtcgtgagttcttgatgaaagatggttatagctaccatgcagatcaagattcattggacgagacttataatgattacaaaaaagcctacgaaaaaatctttgaacgtgctggcttaaactttaaaccaattattgccgatgctggagcaatgggtggtaaagatagtcaagaatttattgctattacagatgatagaatcaatcttgaaaaatggctcgttttgagtaagaatattacatcaatcgaagaaattccagaatctgtcctttcagaaatcaaagaagaacttggcaaatggttgattgctggtgaagatacaattgtctacgctgaaggtggtgattatgcggcaaatattgaaatggccagcagtcaatttgaaccaaatgtagcttatactgaagaacttgaacttgaaaaagtagcgacaccaggtgctaaaacaattgatgaagtttcaaaattccttgaaattgatgaagaacaaacagttaaaacattggtttatcacgcagatgatgaattagtggttgttttgttaaatggtaatgaccaactcaacgaagtcaaattgaccaattatcttggagcatcatttattgaagctgccagtgaagcagaagttgaagaaaaatttggagctcattttggttcacttggaccaatcgggcttgaaaatgtcaagattattgctgaccgaaaagttgaacaaattaaaaatgctgtggttggagctaacgttgatggtttccattataaaaatgctaactttggccgtgattatgaagttgaagagtttgttgatttacgtacagttaatgaaggtgaaatttcaccagatggccgtggaactttgaaatttgcgcgtggtatcgaaattggacatatctttaaattaggaactcgctatacagaagcgatgaatgccaatattcttgatgcgaatggtcgttcaattccaatgctcatgggttgttacggaatcggtgtaagtcgtttgctttcagctattttggaacaatttgctcgtatctatgttgaaaaaacgccaagagaagaatttaaatttagttggtcaattaatttccctaaagaattagcaccatttgatattcatcttgttccagttaatgttaaagatgaagcagcaatggaattgacttctgaacttgaagaaaaattgcgtggcaaaggttatcaggtcttagtagatgaccgtaatgaacgtgcaggtgttaaatttgctgacagcgatttgattggtttgccagttcgtgtgacaatcggtaaaaaagctgctgagggtgttgttgaagttaaaattcgtgcgacaggtgaagttgttgaaattaacaaagatgaacttgtcaatactattgaaattttaagtaaataa

SEQ ID NO: 438 - DNA, 591 bp, Lactococcus lactis
atgactaaaaaaacagaaattaattttggtattgatagcaaactagaaattagagacgcaaataaaaaagcaggattcattgggcaaattgcagggtatgccattgtatttaataagccaagtgtgcctaatgcaccttttattgaatatatcgctccgacggcacttgataatgtcgatttaagcgatgtattagctttatacaatcatgattacgccaatgtgctaggcagagttgacgcaggaactttaaagttaagcattgataacatcggcttgcattttgttttggatatgccagatacaacagttggccatgatgtctataacaacataaaggctggaaaccttaaaggcatgagtttcggctttgtcgtggcagacggtggcgattcatggcaacaaggagtaagtaaacctatccgaacaatcaaccaacttcaaacattaggcgaaataagcgtagtaagtaaaccagcttatgatgatacttctatcaatgtcactcgttctatcaaacaatttgaagacgaacgtacacgaaagtataaagaaaaagtaagagcttatcttgacggattaagtgattag

SEQ ID NO: 439 - DNA, 813 bp, Lactococcus lactis
atggaatacggtgttttatctgtaatcttggtcattgttgttgccttccttgctggtcttgaaggtatccttgaccaatggcaattccaccaaccaattatcgcctgctcgctcatcggtattgttaccggtcatgcttctgcagggattatcctcggtggttcacttcaattgatcgctcttggttgggctaacgttggtgccgctgtcgcacccgatgctgcccttgcctctatcgcatcatctatcttgatggttcaatcaaataactttgacttgactcacatcatgggtactatcgttcctgctgctatcttgcttgcaactgctggtcttgtattgactactcttgtacgtatgctttcagttgtgctcgttcaccaagctgaccgtgctgctgaaaatggttcatactcaggtgttgaaatgtggcacttcatcgcgcttatctgtcaaggtttgcgtattgctatccctgctggacttcttttggttatctcaccagatgctatccaaaaagcacttgctgctattcctccagttatctctggcggtcttgctgtcggtggtgggatggttgttgccgttggttatgcaatggttatcaaccttatggctactcgtgaagtatggccattcttcttccttggtttcgctctcgcaccaatctctgaattaacattgattgcaactggtgtcctcggtgttgttatcgctatcgtttaccttaacctccaagcttctggtggttctggaaatggtactgcatcttcatcaggtgacccaattggcgacatcttgaacgactactaa

SEQ ID NO: 440 - DNA, 267 bp, Lactococcus lactis
atggcatctaaagaattccacatcgttgtagaaactggtatccatgcacgtccagctacattgcttgtgcatacagcttcaaaattcacatcagaaatcactttggaatacaaaggtaaatcagtaaaccttaaatcaatcatgggtgttatgtcactcggtgttggtcaaggcgctgacgttactatttcagctgaaggtgcagatgctgacgatgcaatctcaacaatcgctgaaacaatgactaaagaaggactcgcagaataa

SEQ ID NO: 441 - DNA, 1509 bp, Lactococcus lactis
atgaataaacgtgtaaaaatcgtctcaactcttggacctgctgtcgaaattcgtggtggcaaaaaatttggtgaaagcggctattggggagaatctcttgacgtcgaagcatcagcaaaaaacattgcagctttgattgaagaaggcgcaaatgtcttccgtttcaacttctcacacggtgaccatcctgaacaaggtgctcgtatggcaacagttcaccgcgctgaagaaatcgctggtcataaagtaggtttcttgcttgatactaaaggtcctgaaatgcgtacagaactctttgctgacggtgctgatgcaatcagcgttgttactggagataaattccgcgttgcaactaaacaaggtcttaaatcaactcctgaattgattgctttgaacgtagctggtggtcttgatatctttgatgatgttgaaatcggtcaaactattttgattgacgatggtaaacttggtttgtcattgactggtaaagatgcagcaactcgtgagtttgaagttgaagcacaaaatgatggcgttattggtaaacaaaaaggtgttaacattcctaacactaaaattcctttcccagctcttgctgaacgtgatgatgcggatatccgtttcggactttcacaacctggtggaatcaactttatcgctatctcattcgtacgtactgcaaatgacgttaaagaagtacgtcgtatttgtgaagaaactggaaatccacacgtacaacttttggctaaaattgaaaaccaacaaggtatcgaaaaccttgatgaaatcatcgaagcagctgatggtatcatgattgctcgtggtgacatgggtatcgaagttccatttgaaatggttccagtttaccaaaaattgatcatcagcaaagttaacaaagcaggtaaaatcgttgttactgcaacaaacatgcttgaatcaatgacttacaacccacgtgctactcgttcagaaatttcagacgtattcaacgctgttattgacggaactgacgcaacaatgctttcaggtgaatctgctaatggtaaatacccacgcgaatcagttcgtacaatggctactgttaacaaaaatgctcaaacaatgttgaaagaatacggacgtcttcacccagaacgttacgacaaatcaactgtaacagaagtagttgctgcatcagttaaaaacgctgcagaagctatggatatcaaattgattgttgctttgactgaatcaggtaacactgctcgtttgatttctaaacaccgtcctaatgctgatatcttggctattacatttgacgaaaaagttgaacgtggattgatgattaactggggtgtaatcccaacaatgactgaaaaaccttcatctacagatgacatgtttgaagttgctgaaaaagttgctttggcttcaggtttagttgaatctggtgacaatatcatcatcgttgctggtgttccagttggtactggtcgtacaaatacaatgcgtatccgcactgttaaataa

SEQ ID NO: 442 - DNA, 399 bp, Lactococcus lactis
atgaaaaaagaaggaatacttaatagtgaattagcaaaaattgctgacgatttgggccatactgaccaagtttgtattggagatttaggcttaccagtaccatcaggtgtcaaaaaaattgatttagccctgaccagaggaaaacccagttttcaagaagtgctggacatctatttggaaaatattttagttgaaaaagtctatcttgctgaggaaataaaagaaaataatcctgaacagttagcgattttactgacaaaattatcagcagatgttgaaatagtttttgtcagtcatgaaaccttaaaattaatgaatcatgaggtcaaagcagtggtgagaacaggagaaaatacgccttattcaaatattattttacaatcaggtgtcgctttgtga

SEQ ID NO: 443 - DNA, 669 bp, Lactococcus lactis
atgactttagataatcatcattgcgtccaattagttccactctttgaaaaacttgctgaacaagatttaactaaggtcgaaaaaattgttgaacacaaaaaaattaaaaaaggtgaaattattattagccctgacaaagaacctttattagtcattgtagctcaaggtgcacttaaaatttcacaactttcacaaagtggtaaagagcaacttttaagaatcatcgaagcaggtgattatgaaggcgaaggagccttacttggcgtgaccaacggacaactttatggtcaggccatgattgattctacgatttgtttcttgcgtcaatctgattttgagacattattaacgacttatcctagtctttcattacaacttttaaaacttaatgctaaaaaatatctagctgctgagcaccaagcaggatttttggcactagatgatgttgaagcacgtcttgcacattactttttgaatctatctgccacttctgatagcatttattttgaaattccaatgaaactcaaggagcttgccaattatatcggaaccagtccagaaacaatttcacgtaaaatcaaggtttttgaagaaaataaaattattagccgtcaaggacgaatgattaaacttttggataaggagaaattagaagatgattttgcttaa

SEQ ID NO: 444 - DNA, 597 bp, Lactococcus lactis
atgtattatcctgaacctattgctcgcctgattgagtcgttttcaaaattaccagggattggtcaaaaaacagcgactcgattggctttttatacgattggcatggaagatcaagatgtcaatgaatttgcaaaaaatcttctttcagcaaaacgggatttgagtttttgctcgatttgtgggaatttaacagaaagtgatccttgcgccatttgtaccgacccaacgcgtgatcgaacaactatattggtcgttgaagaatctaaagatgttcttgctatggaaaaaattcgggaatatcgaggactttatcatgttttgcatggtacgattagtccaatgaatgggatttctcctgatgaaattaatgttaaaacattgattacaagattaatggattcagaggttaaagaagtgatcatcgcaactaatgccacttctgacggagaagcaaccgccatgtatctggctcgaatgattaagcctgcaggaattaaagtgactcgcttggctcgtggattagctgtaggctctgatatagaatacgcagatgaaattactttatcaaaagcggtagagaatcggttggaaatttga

SEQ ID NO: 445 - DNA, 975 bp, Lactococcus lactis
atgctagataaaatttctgttgttgtaacctgtcataatcatgaagcttatattgaacaatgcttacgaagtgtttttgcacaaacttatcgcaacattgaattgttggtctttaatgatggttccactgatcagtcgggtcaagtaattgaaaaaatattgaaagaaagtccattttcggaaactttctatttttctgaagaaaatagagggattgtttcaattcgaaatgatgctctgacgaaaataaaaggtgactttcttctttttgttgacagtgataactatcttgacgatcaatatattgaaattttacaccagtcattacaagaacaaaatgttgatattgcctattgtcagctctgggattttgttaattcacgtcaagttttacgtgatgatttggagtttagtcttgataaagaacttgagggaaatttgattgatatgtcctctcttgttcgagtatccaaaattttgaacgtacgttttgatgaacaattgaatcataaagcccttgaagattatgatttttggttatcgttaattttaattaatcatgcaaagccaatttttgttaaaggtataaaactaaattatcgtgtccttaatacttctcgtaccgaaagaggaaactgggataaatattacgattcatatttttatcttttggaaaagcatcaaacgttacttccaaaagaagtgttaaaagcaagtcaagcaaatgtaaaaatatggttaaaaagttacttagaaagtgaccaacaattaactgaaaatattttaaaaattaaagaaaaagataaacatatctctaaccttcaaagagaaattgatctattaaaaagtcttttagcagctaaagaagatgagattgataaaactaaggcagaactcgaagagaaaaagcaagagatagatatcattaaaaattcaaaaagttacaaattccttcaaaaattgaaaggaaattag

SEQ ID NO: 446 - DNA, 1644 bp, Lactococcus lactis
atgaaatttagtgaactcggcctgtcagaaggaatcgtaaatacacttacagagattggttatgaacaaccaacaccaatccaagaacaaacaattaaacttgcacttgaagggcgtgacgttctaggtcaagcgcaaacaggaactggtaaaacagcagcatttggtcttccaacaattgaaaaaattgatgcttctaatccagctattcaagcactcgttattgctccaacccgcgaacttgcggttcaaggacaagaagaacttttccgttttggtaaatcaaaagggcttaaagttcgtactgtttttggtggttcaagtattgaaaaacaaattaaaggccttaaagctggtgcacatattgttgtgggaacaccaggacgtttggttgacttgattaaacgtaaagcaattaaattggatcaacttgaaactttgattcttgatgaagctgatgaaatgttgaacatgggattcttggaagacattcatttcatcattgaaaaaacaccagaagctcgtcaaacattgcttttctcagcaacaatgccaaatgacatcaaaaaaattggtgtgaaattcatgaagaatcctgaacacatcaaaattgcagccaaagaaatgactgctgaccgtattgatcaatattttgtaaaaacaaaagaatttgaaaaatttgatgttttgactcgtttgcttgatgttgaacgtccagaacttgcaattgtttttggtcgtacaaaacgtcgtgttgatgaattgattcgtggtcttaaattgcgcggttaccgtgctgaaggaatgcacggagatttggaccaaaataaacgtttggctgttttgcgtgatttcaaagcaggacatattgacgttttggttgcaactgacgttgctgctcgtggactcgacgtgtcaggagttactcacgtttataactacgacattactcaagaccaagaaagctatgttcaccgtatcggtcgtaccggccgtgctggtaaatcaggacgttcagtaacatttgtttcatacaatgaaatgggttatcttcgtgccattgaaaatatgactaaaaagccaatgaaaggcttgaaaccacctacaaaagaagaagcttaccaagcgtcactctcagtagctatggatgatgtccttcgtgatttgtctgatgattcagctaaagcaaaattggctaaatttgacaaacaagcagcgagcctacttgaaaaatttgatgctaaagaattggttgctttacttcttcaaggtcgcgtaaaagaccctgataatcaagaagaagttaagattacagctgaacgtccattgccatataatggtgaaggaaaaggcttcaagaaaaaaggtaaaggtggcggcggacgctacaaaggtcgtggaaatggcgaccgtgatggcaaccgtggcggttaccgtggaaatcgtgatggtaaagatggcgaccgcggtggagatcgcaaacgcaactggaaagaccgtgatgataaccgtggcggttaccgtggaaaacgtgatgaccgtcgttttgacgatcgtaaacaaggagaaaaaactcctcgtaaacgtaccacaggaactgaaaaatcagctggcttcgtaatgcgtagccgtggtgacaaataa

SEQ ID NO: 447 - DNA, 1038 bp, Lactococcus lactis
atgagcttaccactctaccagcagatttccgatgatttaaagcaaaaaattgtcactaaaacatttaaatcaggagaccagcttcccactgaaaaagaactctcagagacttattcagttagccgcattactgcaaaaagagctcttactgaattagaacagcttggtcttgtcagtagaacacgaggaaaaggaacttttgtccaagaattaaataaaaaccataccaaactattaaaaagagtgctctttattattccttttgaaggaatgtcatttggagatttcacacaaggtttggttcctgctttaaaagttgaaaacacaaccgtatttatcacttacgaaagttaccttaaagaaaatacagcggatgatattaaagaaaattttgatggattaatttactatccaatgtatacagaagattatctagatatcttattagaactttcactacaaaactttcctgtcgttcttttagataaacaaatttacgacctcggatttccttgcgtttcctcagataactttaatggtggtgagcaagccgctcaagcgctcttaaatttagggcataaacgaattgcttttgtggctagtaatgatacccaccatccccaaacaacaagaaatcgatacttaggatatgtcaaagttctaaaagaacaaggaatcaagtttcacactactcttgatgactcactttataccgaaagttctgttttggaacttattcataatgaaaaagtcacaggacttatctgtgaaaatgacttagtcgctcttcaaactatgaagactttgcaagatagccatttttctgttccaaatgatatatcaattattggttttgatgatattcaagcagcaagcttatcaaatccgccattaacaaccattgctcaagatttcattggtatgggaagaatcgctggcgaactgcttttagactggattaaaagcgggcaaacccccaaagatgtcaaagttccaatcaatttaattaaaagaaaaacaactgaggagttgaaatga

SEQ ID NO: 448 - DNA, 774 bp, Lactococcus lactis
atgagtcaagatttatcgcagaagaacaaaccttatttaacgaaagtgaagaaaatgagaatcaataaatatttggcccatgcaggtgtggcaagcagacgtaaagcagaagaactaattttagcgggaaaagtaacggtaaataatgttccaatgacaaacttgggttatcaagtttcaactggagatatcgttgaagttaatggagtagcagtttataacgaagaacccgtttattatcttctaaataaaccaagaggctatatttcttcagttagcgatgacaaaggacgtcaaacggtaatggatttaatgcctcaagttaaagaacggatttaccctgtgggacgtttggactgggacacaagcggtttgcttttgcttacaaacgacggtgagtttacgaatatgatgactcacccacgtcatggcgttgataaggtatatgttgctaaggtagaaggccaagcgaacaaagaaaacttgcgtcctttaactttaggtatgactattgaaggtaaaaaagttagtcccgcccgttatgagattatcaaacaagagaaaacaaaaaatcattcgattgttagtttaactatccatgaaggacaaaatcatcaagttaaaaaaatgtttgcggctgcaggacttccagtacaaaaattgagtcgtattcaatatggatctcttacattggatggacttccaacaggacaatttcgtcgtttgagtaaaaaagaagtttctcaattgattaatgcagcccaaggaaattaa

SEQ ID NO: 449 - DNA, 465 bp, Lactococcus lactis
atggattccaataaggcagcggaggttttcctcacaactgttatcaaaagaggaaaagcagagatgatgcaccgctttaatacctactcccaaggggagcatttggtattgggctatctttataaggaagctggtaagcaaattgttccaagtaagattgcaaaatttacgcatacaagtactgcaagaattgcgacaatcttgaataatcttgagagtaaaaatttagttacccgtgagatttcaagaacagaccgtcgaaaaattttagtagccattactgataaaggacgtcatgttgcggaagaaattcgagtagaagcttgctcaaatttagcacgcgtttttgaagaaatgggtgaagaacgaacagaaagtttcattgaaaatttcaaattatttttagaaattggaatgaagctagctaaagaagacaaagaaaaagaggaggaaaaaaatgcctga

SEQ ID NO: 450 - DNA, 405 bp, Lactococcus lactis
atgaatataaaaaaagctgctgaattatcagggataaaaacagataatataaggtattatgaaagaattgggctgattcctaaaattacacggacagaatctggaataagaaattttacagaagctaatattagaactttgaaatttgtcaaacacatgcgagatgcaggtgtgcaagttgaacctttgacccgttatatggcattagtgaatgagggaaatcctgaaacgaaagaagaaagaattgaaattttgaagaaccaggttgaacaattgagaacagaaattattgaaaagcaatctgccttggattatttaacattcaaaattgaaaattatgatgaagtgatgttgccaaatgaaattaatttgaaccagagttcaaaagaaacaatcaagatttaa

SEQ ID NO: 451 - DNA, 900 bp, Lactococcus lactis
atgattttaataacaggtggaaatggacaacttggaacagagttgcgtcatttacttgatgaacgtggcatggcttatacagcaacagatgctaaagaactcgatattactgacggcgtcgctgttgataaattctttgatgaaaataaacctgaacttgtctatcattgtgcggcttatacagctgttgataaagctgaagacgaaggtcgtgaacttgatgaaaaaatcaatgttgatggaactaaaaatgtagccgaagcggcagcacgtgttggggcaacacttgtttatatttcaactgactatgtttttggcggaactttgccaattggccaagagtggccggttgatgcaccaaaagctcctgaatctgaatatggacggactaaacatcttggtgaagaagcagttgtggcttctggtgtaaaacattacatcatccgtactgcttgggtttttggttcttatggaccaaactttgtcttcacaatgcaaaacttggcgacacgttttccagaattaaccgttgttaatgatcaacacggcagaccaacttggacacgtacacttgcagaatttatggtttatttggttagtgaaaaagctgattttggtttttatcatctaacaaacgatgctgcgcctggtgaagatgtgacttggtttgattttgccaaagaaatcttgaaagacacagatgtgcttgttaaacctgtggattcaagcaaattcccggcaaaagcaaaacgtccatttaattcaacaatgagtcttgaaaaagcaaaagcgacaggttttgtcattccaacatggcaagaagctttagcaagtatgcttgaaaaaggcgatttgcgtgaaaataaagatggcgtaaaaggcgaaattaacaaaaaataa

SEQ ID NO: 452 - DNA, 696 bp, Lactococcus lactis
atgctcaagcttcaaaaaaaattaaaaaatgattacggattagtcttcaatgatgaagatttattaaaaacagcttttacacactcttcatttacaaatgaagaacggctcccaaagattgcaaacaatgaacgtttggaatttttgggagacgttgccctatctttggttatttctgattatctttatcggacttatcctgagaaattagagggagaactttccaaaatgcgctcaagcattgttcggacagaatcacttgctaatttttcacgctcatgcggttttggtgagttcttgcgattaggtcatggtgaagaaaaaatgggcggtcgtgaccgcgaaacaacactagagaacctttttgaggcttttttaggtgcgctttttattgaccaaggaatggatgaagttcgtaaatttatccaacatgtagtcattcctcacgttaaaaatgatgattatgttaaagtgattgactataaaacagaacttcaagaagtgttacaaattggtggagaaacaacgattagctacaagattctgaaagaagaagggccagctcatgaccgttcctttgtggccgcggtttttaacaatggtaaagaactcggacgagggcttggaaaatctaaaaaagttgcagaacaaaaagcagcagaaaatgcaataaaagggcaaaaccatgtatcttaa

SEQ ID NO: 453 - DNA, 879 bp, Lactococcus lactis
atgaatattgttctaaaattagagactaaagaacgccaacagctcgctgagaaatacaaatcctatgagcaagtttccaaaaatccttacatcactttttttgccaaggttgggaaaacttctatctcggtttatacttctggaaaagttgtttttcaaggaaacgaggctgaaaaattagcgagtgactttggtcatattgctcaagtcgttcctcaaaaacaaacaaatcttattgggactgacgaggtgggcaacgggtcatattttggtggtttaatggttactgctagttttgtcagtgaagaaaacttgaattttctaaaggaaattggagtcgccgattctaaaaaattaactgacgaaaaaatttgtcaaattgctccaaaattgattgatagaattccacatgttgctttagtggttgaacctgccaagtataatgaggtgattgcttctggttataacgctgtaagcattaaagttgctctccataatcaagccatttatcttcttgaaaaacaattaggtcataagcctgaaaatattgttattgatgctttcacaacggaagcaaattataaaaaatatgttaataaagagcaaaatcatccgctgacaaaggtaactttactgacaaaagctgaagatcagtttctggctgttgctgtcagttcaattatttctcgttatctttttttagaaaatctaaaaaaattatctaaagaatcaggtttcacgttacccagtggagcaggaaatttatctgacaaaattgcagcacaaattatcaaaagtcagggagttgatgctctgaatcagttagcaaaacttcattttgctaatacacaaaaagcgattaaaatcgctcaattatag

SEQ ID NO: 454 - DNA, 777 bp, Lactococcus lactis
atgggacaaaccattaaagaaattaaagcgaccttagccaaactgacagacttgtcagcaaaagaattcttagagtatgaagcagatgaacgggctggggttcaagcagcacttaaaagtaggaaaaaacaaattttagcagagttagcagaagaggctcgtttggaacaaatgttggaatttgagaaagaactttacggtcaagaaattcaattaattgcaggtattgatgaagttggtcgtggaccacttgctggtcctgtagtgactgcggcagtcattttacctaaaaattgtaaaattcggggtttaaatgatagtaaaaaagtgccaaaatcaaaacatcatgctattctatctgaaattcaagaaaaagctttagcaataggaattgggattgttgatgcggaaaaaattgatgaagtaaatatttatgaggcaacaaaaattgcaatgattcaggcagtatcaaaattatctgttaaacctgagcatctcttaattgatgctatggttttggattttcctattgcacagacaaaaattattcacggagatgctcgttcagcctcgattgcggcagcttcaattgttgctaaagtaactcgtgatgaaatgatgaaagagtttgctcttgaatttcctgagtatgattttgaacataatgcaggttatggaacagcaaaacatcttgaagctctaacaaaatatggtatcacaagaattcatcgcaagtcctatgagccgattaaaacaatggtcaattttaaatcgtag

SEQ ID NO: 455 - DNA, 354 bp, Lactococcus lactis
atggctataaaaaaaacatatcgcgttaaacgctcaaaggattttgaccaaattttttcagcgaaacatagctttgccaataaaaaatttgtggtctataaattaaacacaaatcaacctcattttcgtgtaggtctatcagtaagcaaaaagcttggtcatgcggttttacgtaatcgaattaaacgtcttttacgccatgccattgctgaatttaagccttatttgacagatgaagattttgtaattattgcacgttcgggtgttgaaacgctcagttttgaggaagtaaagaaaaatctaaaacacgttttgaagttgtcaaaaatctatgtggatggagaaaacgattga

SEQ ID NO: 456 - DNA, 381 bp, Lactococcus lactis
atgagcaatcgtaaactcggacgtacatcttcacaacgtaaagctatgcttcgtgatttgactacagatttgatcatcaacgaaactatcgttacaactgaagctcgcgctaaagaagttcgtcgtacagtagaaaaaatgattacgcttggtaaaaaaggtgacctttcagctcgtcgtgcagcagctgcttacgtacgtaatgaaatcgcaattaaagatttcaacgaagaaactgaaactttcccaactgcccttcaaaaattattcaacgaccttgctaaacgctacgaaggacgtaacggtggttacactcgtatccttaaagtagaaccacgtcgtggtgatgctgcgcctatggcaatcattgaattggtttaa

SEQ ID NO: 457 - DNA, 360 bp, Lactococcus lactis
atggcacgtgttaaaggtagcgttgcaactcgcaaacgccgtaaacgtattttaaagctcgctaaaggttactacggagctaaacataaactcttcaagactgctaaagagcaagtcatgaattcatactactacgcattccgcgatcgtcgtcaaaagaaacgcgacttccgtaaattatggattgcacgtatcaacgcagctgcacgtatgaatggtctttcatacagcaaattgatgcacggtttgaaattagctgatatcgaagtaaaccgtaaaatgcttgctgacatcgcaatcgctgatgctgctgcatttactgcacttgctgaagaagcaaaaaaagctttggctaaataa

SEQ ID NO: 458 - DNA, 348 bp, Lactococcus lactis
atggcagaaattacttcagctaaagcaactgcaaaaacagttcgcgtttcacctcgtaagactcgtcttgttatcgatcttatccgcgggaaacgtgttgcagatgcaattgcaatcttgaaatttacaccgactaaagctgctgtagaagttgaaaacgtacttaatagtgctatcgctaatgcagaaaataactttggtcttgaaaaagctaacttggtagtaagcgaaacatttattaatgaaggtccaacaatgaaacgtttccgtccacgtgccaaaggttcagcttcaccaattaacaaacgcacagctcacatcactgtagttgtagctgagaaagaataa

SEQ ID NO: 459 - DNA, 246 bp, Lactococcus lactis
atgaaacaaaatatccatccaaattaccaaccagtagtcttcatggacactacaactggtttcaaatttttgactggttcaactaaaggttctaaagaaactgttgaatgggaagacggaaacacttatccattgatccgtgttgaaatctcttcagattcacatccattctatacaggtcgtcaaaaattccaagcagcggacggacgtatcgctcgtttcgaaaagaaatacggcaaacaataa

SEQ ID NO: 460 - DNA, 135 bp, Lactococcus lactis
atgaaacgtacttaccaaccacacaaaaaatctcgtaagactactcacggattccgtagccgtatggcaactaaaaacggacgtcgtgtccttgcagctcgtcgtcgtaaaggacgtgcttcacttacagtttaa

SEQ ID NO: 461 - DNA, 117 bp, Lactococcus lactis
atgaaagtaagaccatcagttaaaccaatctgcgaatactgtaaagttattcgtcgtaacggtcgtgtaatggtaatttgccctgccaatccaaaacacaaacaacgtcagggatag

SEQ ID NO: 462 - DNA, 939 bp, Lactococcus lactis
atgattgagtttgaaaaaccaaaaattactaaatttgacgaatcagaaaattacggtaaattcgttgttgaaccacttgaacgtggttatggtacaactttaggtaactctctgcgtcgcgtccttttgtcatcacttcctggtgctgctgtgacttcaattcaaattgaaggtgttcaacacgaattcgcaacaatccctggcgtacgtgaagatgtcatccaaatcgttcttgcggttaaaggaattgccatcaaatcatacgtagagtctgaaaaacaaatcgaacttgacgtaactggtcctatggatgttactgctggtgatatcttaactgatagcgacattgaaattgtcaacaaagaccattacttgttctctattgctgaaggtcactcaatgcgtgctgtaatgactgttaaaaaaggatacggctatgttccggatgacgaaaataaagtcgatggagcgccaattggcacaattgctgtagactcaatttacacaccagtaagtaaagtaaattatcaagtagaacctgcccgtgttggtggagattctagctatgataaattaacacttgaaattactacaaacggtactatcgtttctgacgaagctttgtcactctcagctaaaatcttgacagaccacttgaacttgttcgttgatctttcagaagttgcagctgaagccgaaacacttgttgttaaagatgaagttaaaacagaacgtgtgctcgataaaattattgaagaaatggacttctcagttcgtgcttacaatggtttgaaacgcgcaggtattaacactgttgctgatattgttgaaatgagcgaagctgacatgattaaagtcaaaaacctcggtcacaaatcagtagaagaagtcaaagttaaattgactgaattgggactttcccttaaaaaaagaaaataa

SEQ ID NO: 463 - DNA, 564 bp, Lactococcus lactis
atgaaaattacagccttagaaggacaaaaaatctcagaactttcaatgattgaagttgctcatgctttattggagcaaaatggcaaagaaatgcaattctctgaaatcatcagagcgattcaagattatttggaaaaatcagatgatgaaattaaagctagtatttctcgtttttatacagaaatcaatacagacggaagtttcattccattaggaaataatatctgggcactccgttcatggtacgccattgatgagattgacgaagaagttatcgctcttgatgaaattgaagacgaagaagaagaaaaaccagctaagaaacgcaaaaaagtcaatgcttttggtatcgaagacgaaatcgatccagaagatgaagaaggcacaaaagaaacaactgaagaagacatgtcatacgatactcaagcagaagacgaagataaagatgacgtcgctgcttatgacgctgaacttgcagaagttgaacttgataatgtagatgaagaagttgacatcgacgttgaagacgatgaagatgattcagacgatactgatgaagactaa

SEQ ID NO: 464 - DNA, 1227 bp, Lactococcus lactis
atgaacgaatttgaaacattattaaacagcgttgaagacgttaaagtacgtgacgtcgttaagggtgaaatcctttcagttgaaaacgggcaagcaactgttgccatcgtaggaactggtgttgagggtgtccttacacttcgcgaaatcactaacgataaagatgctgatatcaatacattcgttaaacctggagatgttcttgatttgcttgttatcaaacaaatcgttggtaaagaagccgaaggtgcaaacgtatatctcctttcattgaaacgtcttgaagctcgtaaagcttggactcaattggaaggcaaagaaggcgaaatcgtaacagttaaagttactaaagacgttaaaggcggactttcagtagactataacggtgttcgtggatttatccctgcatctatgattgacacctactttgttaaagatactaagaaatttgttggcgaagaaatcgaagctaaaattatcgaagttaacgcttcagaaaaccgcttcatccttagccgtcgtgcagttgttgaagctgaagcaatcgaaatgcgtaaagaagcttttgcacaacttcaagaaggcgatatcgttgaaggtacagtttcacgcgtaacaaacttcggtgcattcgttgaccttggtggtatcgacggattggttcacgtttctgaactttcacatagccgtatcaaacgtccatcagacgcagtaaaacctggcgatgttgttaacgttaagattttgaaactcgacccagaagctggacgtctttcactttcacttaaagctacacaacctggaccatgggaacaagttgaagaaaaagcaccagttggatcaactgttgaaggaactgttaaacgtttgacagacttcggtgcctttgttgaactttatccaggtgttgaaggacttgttcacgtttcacaaatttcatgggaacgtgttgaaaatccaaaagatgttcttaaagttggtcaagttgtgaacgtaaaagttcttgacgtgaaacctgctgaagaacgtatctcactttcaatcaaagcgcttgaagaagctccagctcgtccagctcgtaacaacgacaacgacggtgaaaaacgtgatcgcaaaccacgcgcaccacgtaaagcagctaaaccttcatacgatttgcctgaaacacaagaaggcttctcacttgctgatttcctcggtgaagacttcgatattaacgatttgtaa

SEQ ID NO: 465 - DNA, 294 bp, Lactococcus lactis
atgactaaatacgaaattctttatattattcgcccaaacattgatgaagaagcaaaagctgccctcgttgaacgtttcgatggaatcttgactgacaacggtgctgcaaatcttgagtctaaagactgggaaaaacgtaaacttgcttacgaaatcaatgatttccgcgaaggtatctaccacatcgcaacttttgaagctgaaacaacttcagaagctttgagcgaatttgaccgtcttgctaagatcaaccttgacattcttcgtcatatgatcgttaaagttgaagcttaa

SEQ ID NO: 466 - DNA, 393 bp, Lactococcus lactis
atggcacaagtacaatatgccggcacaggccgtcgtaaaaatgcagtagcacgcgtacgtctcgtacctggtactggtaaaatcacagttaacggacgtgaagtagaaagctacatcccacacgcagacatgcgtctcgttatcaaccaaccatttgcagctacacaaacagaaggtagctacgatacactcgtaaacgtaaatggtggtggtgtatcaggtcaagcaggagctatccgtcacggaatcgctcgtgcattactccaagtagacccagatttccgtagtgctttgaaacgcgctggactccttacacgtgacgcccgtatggttgaacgtaaaaaaccaggtctcaaaaaagcccgtaaagcatcacaattctcaaaacgttaa

SEQ ID NO: 467 - DNA, 309 bp, Lactococcus lactis
atggcaactaaaaaaattcgcattcgcttaaaagcatacgaacatcgtatccttgatgcagctgcagaaaaaatcgtagaaactgctaaacgtacaaacgcagaagtaagtggtccaattccacttccaactgaccgtagcgtctacactgttatccgcgcgactcacaaatacaaagactcacgcgaacaattcgaaatgcgtacacacaaacgcttgatcgacatcatcgaaccaacacaaaaaactgttgattcacttatgaaactcgatttgccaagtggtgtaaacatcgaaattaaactctaa

SEQ ID NO: 468 - DNA, 186 bp, Lactococcus lactis
atggctaagaaatctatggttgttaaaaaccaacgccctgcaaaattctcaacacaagcttatactcgttgcgaacgttgcggacgtccacattcagtttaccgcaaatttaaactttgccgtatctgtcttcgcgaattggcttacaaaggtcaattgccaggcgttaaaaaagcttcatggtaa

SEQ ID NO: 469 - DNA, 270 bp, Lactococcus lactis
atggcaatttcaaaagaaaaaaaacaagaaatcatcgctcaatacgctcgtaaagaaggcgatactggttcacctgaagtacaaatcgctgtattgacttgggaaattaaccaccttaacgaccacatcaaatctcataaaaaagaccacgcaacacaacgtggtttgatgaaaaaaatcggtcaccgtcgtaaccttcttggataccttcgtggaaaagacgttcaacgttaccgtgaacttatcgcttcattgggacttcgtcgttaa

SEQ ID NO: 470 - DNA, 261 bp, Lactococcus lactis
atggaacgcaaacaacgtaaagtttatcaaggccgcgtggtttcagacaaaatggataaaactatcacagttgtcgtagaaactaagcgtaaccaccctgtctatggtaaacgcattaactattctaaaaaatataaagctcacgacgaaaacaactctgcaaaaactggcgacatcgttcgtatcatggaaactcgtcctttgtctaaagacaaacatttccgtcttgtagaaatcgttgaagaagcagttattatctaa

SEQ ID NO: 471 - DNA, 279 bp, Lactococcus lactis
atgggtcgtagtcttaaaaaaggacctttcgtcgatgagcatttgatgaaaaaagttgaagctcaagtcaacgccgaaagaaaatctgtgatcaaaacttggtcacgccgttctacaatcttcccgaactttgtaggacttacaattgctgtttacgatggtcgcaaacacgtaccagtttacgttcaagaagatatggttggacacaaacttggtgaattcgcaccaactcgtacttatcgtggtcacgctgctgacgacaagaaaacacgtcgctaa

SEQ ID NO: 472 - DNA, 177 bp, Lactococcus lactis
atgtcaaaaacacttgtacgcaaaaatgaatcacttgacgacgcactccgtcgcttcaaacgttcagtaacaaaagctggaactcttcaagagcttcgcaaacgtgaacactacgaaaaaccttctgtaaaacgtaaacgtaaatcagaagcagcacgtaaacgtaaaaaatactaa

SEQ ID NO: 473 - DNA, 1197 bp, Lactococcus lactis
atgacttatcatatcaaaacaattggaaataatatcgaccaaattgcattagatgaaattggcgaaggctttcttgttaatcaagtgtcagaagctgaatctgacgcatttatttgtcgggctcagcctttccacgattatgaattttccaaagcgcttttggcgattggacgtgctggtgctggttttaataatattccgatagaaaagtgtgccagtaaagggattgtagtctttaatgcgcctggtgggaatgccaatgcggttaaagaattagttttgtcaatgatgatttttggaacacgtaatttaaaaccagcaaacaaatggttgactggtcaaaaaggcgatgataataccattgatggggcggttgaacatgggaaaaaggcgttttctggttctgaaatttcaggaaaaactttaggggtaattggccttgggaatattggttcaaaagttgccaatgatgcacagcgtttaggaatgagagttattggttatgacccttatctttcaattgagcacgcttggaacttgtcacatcatgttaaaagagtgaatgatttggctgagatttttgagaaggcagattatatcacggttcatacgccagcgacggatgaaacgacgaaaatgctcaattggaaaaatttatctaagtgtaaaaagggagtgattttgctcaattatgcacgagatgagattacggataaagaagcagtgcttaaagcgattgatgagggaattgtccgcttttttggaacggattttggttctgaaaaattttatcatcatccacaagtttttttaactcctcatttaggtggttcaacggcggaagcgagtttaaattgcacaagaatggctctggattctgttcaaacttatttgaaaactggcgaaattattaattcagtcaattttccacgtgttttgcaagagttgaatacgccttatcgtgtgaccttaatcaataaaaatgtgcctaatgttgtggctcaaatttcacttgcggtggcagcagaaaatattaatattgctaatattgttaatcgtggtcaaggagattatgcctatactttacttgacttggatgaaaaagatgaaggaaagttggcggctttagtttcacgttttgaggctgctgataatattattcgtgttcgcttaattgaaaatcagagtttagtttaa

SEQ ID NO: 474 - DNA, 651 bp, Lactococcus lactis
atggctgcaaaaggattacttgtgatggatgtggatagcacattgattgaagaagaggtcattgatctcttaggggaaaaagcgggtatgggtgataagatttcagaaattacggctgccgctatgtctggcgaaattgattttaaggaatctttgagagaaagggtggctttgctttctggtttgcccacaactatttttgacgatgtttacaaagaaattcatttaactaagggtgcaacgggattaattgaaactttgcatgcgaaaggctggaaagttggccttgtttctggtggttttcatgaaatagtggataaaatcgcaagagatttaaaaatagattatgtttttgctaatcgtttgtctgtggaaaatggccatttgactggaaaaacgcatgggacagttgtggataaagatttcaaagttgataggctcaaacaatgggcaaatgaaaataagttgaatttatctgaggttattgctgtaggtgatggcgcaaatgatattccaatgctaaatacagctggtattgggattgccttttgtgcaaaacctgcggttaaagctgctgtttcctatcatattgataagcgaaatttactgaccgttttggaatttgtggataaacttgctgataaagaataa

SEQ ID NO: 475 - DNA, 1098 bp, Lactococcus lactis
atgatttataattttggcgcaggacccagtgtacttccaaaggaagtcttgaagaaggttcaagaagaactgttagactttgaaaaaagtggtatgtcagtgatggaaatttcgcatcgctccaaggctttccaaaaagtaattgatgaggctgagaacgatttgcgtgatttgatgtcaattcctcaaaactataaaattttgtttttacaagggggagcttccagtcaattttcaatggttccaatgaatttggcaattggcaaaaaggcttattacaatatttcgggcgcctttggtgaaaaggcttatgatgaagcggtgaaattgagtcatttccttgatttgatggcgattagtttgggctcgactaaaaaagataattataatcatctattgaaaattgataaatctaaaattgatgaaaaaaatggggcctatctccatttgacaacgaataatacgattgaaggaacaagtatttttcctgaaaatttgcctgagtttgcaagccttcctttggttgctgatatgagttcaaatattttggcggttgattatgatgtgagtaaatttggattaatttacgctggagctcagaaaaatttaggtattgctggtttaaccattgtcattattcgtgaagacttattgaatgaagctgaaagcctctcatcaatgatggattatcagattttggttgaaaatggctcgatgtacaataccccgccgacttttgctatttatgtggccgggctggttttcaaatgggtaaaagcgcaaggtggcgtaaaaaaactcgaagaaatgaatcagagaaaagctcaattgttgtatgatttaattgaccaatctgacttttatcagaacccaatcaaaaataaagatgagcggtcgatttgcaatgttgtttttacaagtccaagtcaagaattggatgagctattcacccaaaaagctgaagaaaaaggtttcaaatcactcaaaggtcatcgttccgtgggaggaatgagagcaagtatttacaacgcttttcctttagagggggttgttgaattagtgaaatttatgaaagaatttgaagagggatataaatga

SEQ ID NO: 476 - DNA, 648 bp, Lactococcus lactis
atgaaaaataaaattttagacctgagggcatattttattgctggcccacaagattttccaaaactttcaattgatgatgcaatcgataaaatttctgtaatcataaaaagtggagtaacggtttatcaatttcgtgataagggaacaatttataaaaataaaaatcaacgattagaagtagcaaaaagactacaagaagtagctcagaaagcggctgtttcttttattgtgaatgatgatgttgaattagcgcgtgaattgtcagctgacgggattcatgtcggacaagacgatgattctgtcagtaaaattcgtgagctgattggccaagaaatgtgggtaggactttctgtcagtaatgatatggaattagaaagcgctcaaaagagtggggctgactatttgggaattggtccaatttatccaacaaatagcaagtccgacgcagcagaaccaattggggttgaccatttaagaaaaatgcttgagcataatcaattaccaactgttggaattggtggaattactgaaaattcactgacagagctttcaaaaattggtctgggtggagttgcggtaatttctttgctgacagaatccgaaaattacaaaaatatggttcaaaaaattaagcaaaatattagatga

SEQ ID NO: 477 - DNA, 1176 bp, Lactococcus lactis
atgactcagtttaccacagaactacttaacttcctagcccaaaagcaagatattgatgaatttttccgtacttctcttgaaactgctatgaatgatctgcttcaagcagagttatcagcctttttagggtatgaaccttacgataaagtaggctataattctgggaatagtcgtaacggaagctattcacggcaatttgaaaccaaatatgggactgttcagttgagcattcctagagatcgtaatgggaactttagtccagctttgcttcccgcttatggacgtcgagatgaccacttggaagagatggttatcaaactctatcaaaccggtgtaacgactcgagaaattagtgatatcatcgagcgaatgtatggtcatcactatagtcctgccacaatttctaatatctcaaaagcaactcaggagaatgtcgctacttttcatgagcgaagcttagaagccaattactctgttttatttcttgacggaacctatcttccattaagacgtggaaccgttagtaaagaatgtattcatatcgcacttggcattacaccagaaggacagaaggctgttcttggatatgaaatcgccccaaatgaaaacaatgcttcttggtccaccctgttagataagcttcaaaaccaaggaatccaacaggtttctcttgtagtgaccgatggattcaaggggcttgaacagattatcagtcaggcttacccattagctaaacaacaacgttgcttaattcatattagtcgaaatctagctagtaaagtgaaacgagcagatagagcggttattctggagcaatttaaaacgatttatcgtgctgaaaatttagaaatggcagtgcaagctttagagaactttatcgccgaatggaaaccaaagtataggaaagtcatggaaagtctggagaatacggataatcttttaactttttatcagtttccctaccagatttggcacagcatttattcgacaaacctcattgagtctcttaacaaagaaatcaaacgtcaaacgaaaaagaaggttctttttcctaacgaggaggctctggaacgttacttagttactttgtttgaagattataatttcaagcaaagtcaacgcatccataaagggtttggccaatgtgctgacacacttgaaagcttatttgattaa

SEQ ID NO: 478 - DNA, 1029 bp, Lactococcus lactis
atgaaaacaaggagtcatcaaatgaaaaatgaacttgaaaaagtgatgtcaggtcgtgacatgaccgaaaatgaaatgaatatgcttgctaattcaattatccaaggtgaattaagcgaggtccaaattgccagctttttagtagcattaaaaatgaaaggtgaagcagcaagcgaattgactggtttggctcgagctttacaaaaagcagcgattcccattccaacaaatttgacaaatgcgatggacaattgtggaacaggaggcgaccgctcattcagttttaatatttcaaccacagccgcttttgttttagcagctggtggagtcaatatggcaaaacacggaaatcgctccattaccagtaaatctggctcggcagacgttcttgaggccttaggaatcaatctttatttaccagcagaaaagttagctcaagtttttgacaaagttggtttagttttcctttttgctcaaaatctccacccagcgatgaaatacttcacgccagtccgcagacaactcgaaattccaacaattatgaacttgactgggccactaatcaatccaattccacttgatacgcaacttcttggtacctcacgtccagatttacttgaattaacagcaaatgttttgaaaggcttgggccgtaagcgagcattagtcatcacaggtgaaggcggaatggacgaagcaactccctttggacttaatcattacgcacttttagaaaatgacaaagtgactttgcatgaatttagagcctcagaagttggtatttcagaagttcaactcaatgatattcgtggaggtgaagccccagaaaatgctgaaattttaaaaaatgtccttgaaaatcaaccgtcagcctttttagaaacgaccgttttaaatgccggacttggattttatgccaatggaaaagttgattccatcaaatccggagttgaccttgcaagagaagtaattagtacaggagcagctcttaccaagttgcatgaattacaagcagaacaaattggttaa

SEQ ID NO: 479 - DNA, 1188 bp, Lactococcus lactis
atggctaaagaagtatacgaccgtagcaaaccacacgttaatattggtactatcggacacgttgaccatggtaaaactaccctctcagctgcaatctctaaagtattgtctgacaaaggttactctaaagcgactgatttcgcatctatcgatgctgctccagaagaacgcgaacgtggtatcacaatcaacactgctcacatcgagtacgaaactgaaaaacgtcactatgcccacatcgacgctccaggtcacgcggactacgttaaaaatatgatcactggtgctgcccaaatggacggtgcaatcctcgttgttgctgcaactgatggaccaatgccacaaactcgtgaacacatcttgctttcacgtcaagttggtgttaaataccttatcgtcttccttaacaaggctgaccttgttgatgatgaagaattgatggaactcgttgaaatggaagttcgtgacctcttgagcgaatacgacttcccaggtgacgatattcctgtaatcgctggttcagcacttggtgctttgaacggtgaaccacaatgggttgctaaagttgaagaattgatggacatcgttgatgaatacatcccaactccagaacgcgacactgacaaaccactccttcttccagtcgaagacgtattctctatcactggtcgtggtacagttgcttcaggacgtatcgaacgtggtactgttaaagttggtgacgaagttgaaatcgttggtatcaaagaagaaactaaaaaagctgttgttactggtatcgaaatgttccgtaaaacacttactgaaggtcttgctggtgataacgtcggtgcacttctccgtggtattcaacgtgacgaaatcgaacgtggtcaagttattgctaaaccaggttcaatcactccacacaaacttttcgaaggtgaagtttacgtattgagcaaagaagaaggcggacgtcacactccattcttcgacaactaccgtcctcaattctacttccacacaactgacgttactggttcagttaaacttccagaaggaactgaaatggtaatgcctggtgacaacgtgcatatcgacgttgaattgatccacccagttgcgatcgaacaaggtactactttctctatccgtgaaggtggacgtactgttggttcaggtatcgttgctgaaatcaaagcttaa

SEQ ID NO: 480 - DNA, 1371 bp, Lactococcus lactis
atgaaaaaaaagattatctcagctattttaatgtctacagtggtactctctgctgcagcaccgttgtcaggggtctacgctgacacaaattcagatattgctaaacaagatgcgacaatttcaagtgcgcagtctgcaaaggctcaagcccaagcacaagttgatagcttacaatcaaaagttgatagcttacaacaaaaacaagcaagcacaaaagctcaaattgctaaaatcgaaagtgaagcaaaagcgcttaacgcacaaattgcaacattgaatgaaagtatcgcagaacgtacaaagacattggaagctcaagcacgtagtgctcaagttaacagctcagcaacaaactatatggatgctgttgttaattcaaaatctttgacagatgttattcaaaaagtaacagcaattgctacagtttctagtgccaacaaacaaatgttggaacaacaagaaaaagagcaaaaagaacttagtcaaaaatcagaaactgttaaaaagaactataaccagttcgtttctctttcacaaagtttagattctcaagctcaagagttgacttcacaacaagctgaacttaaagttgctactttgaattatcaagcaacaattgctactgcgcaagataaaaaacaatctttattagatgaaaaagcagccgcagaaaaagcagctcaagaagcagctaaaaaacaagcagcttatgaagcacaacaaaaagaggccgctaaagctcaggcagcttctacagcagcaacaactaaagcggtagaagaagcaacttcaactgtttcatctagtcaagcttcacaatcaagttcatcaagttcaaacacaagtagcaataatacatcatcaaattcaagcagctcaagtagcaattcatcaagctctaatagctcatcaagctctaatagctctaatggtggtggaagtacaaatactggtaacaataatgctgctggtactggtaatactggtggttcaagttcatcaggtattaatagcacaccaattgctaatccttatgctggtggtggatgtactgactatgtatggcaatactttgctgcacaaggaatctacatcagaaatatcatgccaggtaatggtgggcaatgggcaactaatggtcctgcccaaggtgtactccatgttgtaggagctgcacctggtgttatcgcatcaagcttctcagctgattttgttggatatgcaaattcaccttacggtcacgttgctattgtaaaatcagttaactcaaatggtacaattaccattaaagaaggtggatatggtacaacttggtggggacatgaacgcactgtaagtgcgtctggtgtaacattcttgatgccaaactag

SEQ ID NO: 481 - DNA, 468 bp, Lactococcus lactis
atggctaaatttggatttttagatgttttggaagaagttttagaaaaaggatttacttatgattttgaaatgaattgggataagcgtaattttgcggtagaagtcagctttttactagaggcagaaaatagttctggagcgcttttgactgatgcagaaggagtagaatcagcagaaaatatcgtctatgaggatgcagttttattttataatcccgctaaatcacgttttgatgaaaatgattatttggcaacaattccttatggtgaaaaaggcttatctcgtgaatttttggcttattttgctcaatttttacaagaaagtgccgatcaaggcttggatgatttaatggactttctagctgatgaagctgccgaagaattttcagtcaattgggataaagaagcttttgaaaatggcattgctgatttatctgaaacagacttttataagtatccaagatattaa

SEQ ID NO: 482 - DNA, 300 bp, Lactococcus lactis
atgatgaatatgcaatcaatgatgaaacaagcacaaaaacttcaaaagcaaatgcaagtttcacaagaagaaattgccaatacaacttttgttggtaaatctgctcaagaccttgtaactgttgaattttcaggtgaccgcactttgaaatctctcgacatcaaacctgatgtgattgaccctgaagatcctgaaactttacaagatatggttactgatgctgttaatgatgcactaagccaaatcgaaaaagttactgaacaaaaacttggaaaattcactaaaggattaccattttaa

SEQ ID NO: 483 - DNA, 5952 bp, Lactococcus lactis
atgaaaagtagaaaaaaagttatttctataattttaggtttaatgctgcttttacaatatgttattaccccagttggagcaattgcaggagcaataaatgaagaaacaaatgattcggatataacattaagtcaatttaaaatagatgaatccgaaagtaatgctgatttaatgacatttgatttaagtctcaagattaatcagtcaatattgaaaagtaaaacaactattattgaattagataaatcaattaaaattaatgaaccaaatgaggctaacagacaaaagtcaacagcatcttatactgctgacgaaaatagattgacaatagaccttaattcactaaatacaggcgaagtgaaagtcaatttttcaatctctaaagaacttttgaaaaactttgagcgattaacagccaaattaaatgatagccaggttgatgtattgttgccaaaaacgagttcaacttcagaaactccaagtcagtcaacttccactgtgactcaaaatactgttacacctgaaatcaaagaaaaagaaagtagtacgactaaacattcagagcaagctataaaaactgtggaaagtcaagatattcgtaaacttctagaagactcaggaatttcaccagcgactattattgactcagctaaggtcatatatcttgataaagaaggaaaaccttatccagatcaaacagatgttccgatagatgcagaagttcaaatcgattatacctggagtattccagaagatattttaccattgaaatcaggagattactttgattttaaacttcctgatggtgtaacaattgagcaagcgacatcgtcactgggagattatggaacctatacaattaatgcagatggaaccgttcgtttcgtcttcaatgaaaaagttgaaacctatcatgatattaagggtacctttcattatgatgcacatttcgataagacaattgttccaggagaagttgtagttgatacaccaacggaggaaaattttcccccttcagaaatccatgttcggccaacctatgaccaagcaattgataaatcaggacatttcgataaaactccaaatcctagtgaagtgatttgggaaataaatattaaccgtccattaaatacaatggaaaatgctacacttaccgatccaatgccagaaggaacaacttatgaatccgtcgaaatttaccctgagacagttggaaaaaatggagaaatcatttccattgataaagaacatcctttagtaaaaggtacagattatactgttgattcaaatggaaaaattacttttattggtaaatatgctaccaccgatcaagcgttcaatgttgtctatacaacaactatcgatgaaagtagttttccggaaaaagagggagctgtaagttttaaaaatacagcgacattaaatgatggaaaaacagataccaatgaaagtgcctctgttactgcgcaatataaagggccaattaaaaaaaatggaccatttacaacagggaatgatcaaatttataattggaatatagaatacaattataatgaaaaaaatcataaagcagggtcatttattgaagataccatgagtgatgccatcgagctggtgaacggaagtgttaaactttataaaattacttttgatagtaacggaaaagaaattaaaggtgctcaattaaaagaaggggaagattataaacttgtacaagaccctgataatcctcaaaaatttaaaattgagtttattactgatattgattatgcagtaaaagttgaatatcaaacgaaggttaaagatatcgtagatggaaatgttaccattgataactcagtaacaactgatacgggagataacagcgagtcaggtggtaatgcaactcaacaaggaatcgttaaaaatattgatggagatattgattacgagaatagagaaattccatggaaaatagatattaatagtccaggctattggatggaaaactggtcacttgaagacaaaatgtctgaaggtttgactttccttgaaaatactttccaaattattgataaaactgctggaaataaagtactctccccaacagaatatacactgataaaaacaacagcaggcttttcagtttcctttaattccccacttaaggaggggacagatcataaatatcaaattaaatacaaaacaaaatttgatactagtgtgattgataatgggtctggtcatgaaggagatatcaaatttgtaaatgatgcttcaatgacttggaaggataaaaatggaggagatcatactaataatgatcataaagaatttaaaccaatacctccgttccaatataatggacaaaaatctggttcatataatgcaaccagcaaaaaaattacctggacaattgcagcaaatttcaatcaacaagaattaagcaatgcctcaataactgatccaatctctgatgatcaaaactatgtttctggaagtgctaaagtatatgaagctacgattaataaaaatggtacttatactttaggtgctgaagttacttcagatatgggaataaaaatagtagaaagcaaaggaagtgttaaggtagaactaccagatggaagcacaaaagcctatgttctaatatttgaaacaagtctagaaggtaacctcatcaatcagaaggagtacaaaaacaaagcgacatttacaaataaggacatttcacatgatttaagtgctagcgttactccagcacatcaaggagaattcgtaacgaaagatggttcacagtcaagtacagattctaattatgtaaattggaaacttacagtaaacgcctcgcaatctaccttaaaaaatgttgaagtcactgataatccttcctcaaatcagtatattgtagcaaaagatattcttatttatggaacaagtattgatgcttctggtaatattactgagaacaaaaatattattcttgaacaaggcaaagattattctgttgatatccaaactgacaattctacaggggctcaaacagttaaaattaaatttttatcagaaattaacacagcatatgttgtagaatatcgtgcattaattacttctgacaaagctaatgatgtggtaactaatcaagcccatattactggagacaacgagaaaataatagaacaagatgttgaaaaagatgtacccgtaactaatcataacggaagtgcaaacggatcaaaaggttcagttactttggaaaaagttggtcccggcaaagcaaaacttgcgggagctcatcttcaactttggtctatcggtacagatggtaaaaaagataaattaattcgtgaaggagataccgacaaaaatggtgatttaaaacttgggaatttgcgtgttactgattatcttcttattgaaactaaggccccaacagggtatacacttgatgaagaactagtcaaaggtaagaaaataacagttgcaaaagacggagaagtttctaatttcccaattcaagacgttgaaaatgaaccaacgaaagtaatcttgaaaaaagtaggactgaccattgaaaatggtaaagaggtaaaaaatccacttcaaggtgcagaatttaaagtactagacagcaacggtcaagttgtttcaggttacgaaaaacttacttctgacagttctggaaatgtaacgattgaaaaactaacacctggtaaatattcacttgttgaaaccaaagccccagcgggttatattttggacccaaccccaattgactttgagcttaaagccaatgaagaaggaatcatcccagatatcaacttggaaaaagttaactatcagggttcagcacaactcattaaacataacagtaatggtcaagctttatcaggtgctattttcaaagttattgataaagatggtaatacaatccaaactaatttaagctctgataaagatggtaaagttacggctactggtttatcccctggagattattcctttgttgaaaccaaagctccaacaggatatattttaaatacaataccagttcattttacaatttcagctgaagaagaaggtcaaccacaaatggttattgcctcggataattttatcaattatcaaggttcagccgaattaattaagcaagataacgaaggtcagccactttctggtgcagtttttaaaattgttgataaagctggcaagacaatccaagctaatttaacttctggtaaagatggtaaagtggtagttgatggattagcccccggagaatattcctttgttgaaaccaaagctccaacaggttatattctaaatacaaatcctgttcactttacgatttcagacaaagaagagggtcaacccaaaacaattatagcctcagatagctttgttaattaccaaggatcagcccaattaattaaacgagatagccaaggacaaccacttttaggtgcaatttttaaagtagtcgataacactggaaaactagtaaaagaaggtttaacatctgataaagctggtaaagtaaatgttacaggcttggctccgggtgactattcatttatcgaaacacaagctccaacaggctatattttaaatactattcctaccccttttacaatcttagctgagagtgaaggacaacctcaactggttgtcgcttcagataactttattaattatcaagggtcagctgaattgattaagcatgatatcaacggtcaagctttatcaggtgccatctttaaagtgattgatgcagatggaaaaaccataaaagaaggtttaacttctgatgaaactggtaaagtattaattgaaggtttggttccaggtgactattcatttgttgagactaaagcccctgaaggatatattttgaatactctgccagttaactttagcatctcaggtgaagaagaaggcaaagtaaaagtagtcatggcttcagataactttattaattatcaaggatcagctgagttgattaaacatgacagtcaaggtcaagctttagaaggtgcaatctttaaagttgttgattcaaaaggaaaaataatcaaagaagatttggcttccgataaaactggtaaagtattaattgacaatttggcaccaggagattattcatttgttgagacaaaagctccaagcggctatatcttgaatacttcaaaagttgattttactatttcaacaaaagaagagggtcaacccaaagtagtcatggcttccgataatttcatcaactatcaaggatctgctgaattaattaaacatgacagccaaggtcaagctttagaaggcgcagtctttaaagttattgattcaaaaggaaagagtatcaaagagaacttggtttctgataaagaaggaaaagttttaattgaaaatcttgtaccaggagattattcatttgttgagacaaaacctccaagtagctatatcttgaatacttcaaaagttgattttactatttcaacaaaagaagagaataaaccaaaaatagttatggcttcagagaactttatcaattatcaaggatctgctgaattaattaaggtagatgagaatggtaaatctctttcaggtgcagtctttaatgttactaatagtgaaactcatgaagtagttattaaggggatcaaaactgatgcaaatggagtaattaaggcaaatcatctaaaaccaggtaaatacacttttgttgaaacagaggctccagcaggttatcaattaagtcaagaaactagagcttttgaaattaaagcaagcgcagaaaacaaaccacaagttgttaatactggaaagttcgtcaataaaagacttccaattacacctaaaaagccagaattacctaagacaggagaagaacgaaatactttcttgcctatagttggtgttggactattaatggtgggtgctactttatatgtattttttaaaagacgtaaaatgtaa

SEQ ID NO: 484 - DNA, 291 bp, Lactococcus lactis
atgctaaaaaatatttgggaatggtttttatggtttactggtgtgactgacgcaggttggtcagcgtggtggggcggatttttcagctgtttgccactttttggtgtctttgctgttgtttggcgaagactaaaatgtcatgcaccaggttgtcatcaaattggacttcatcgcacagctgacggactttatgttctttgtcgaaaacatcatccagatgtacctaataacctaacgctcaaacacattcaaaaatcacacgtcaatgcaaaagcgaaaaaagataagtga

SEQ ID NO: 485 - DNA, 642 bp, Lactococcus lactis
atgtctagcccgaaaattgattataaaaaatctgataaaaattattatttaccaaaaggaatttctttaattgagctgcctgcccttaattatctaatgatagatggcaaaggagcaccaacaagtccagcttttcaagaagccattcaatatttgtatgcgacagcctatatgatttcaatgtcttatcgaaacccagactttataattgaaaatttccaaccttttgtggttccgcctcttgaaggtttatggactagtaaaaatgaacctagagctggtaaactagataaaaatgactttatttggcgattgatgattagaatgcccgattttgtggattctgaaatagttgaaaaagctaagaagttagttgagagtaaaaaaggatttgatttatcaaaagttaaatttgaagctattcaagacggattatgtctgcaaaccattcatttaggttcttttgatgacgaaggggaaagctttgagaaactctttgagtatgctaaagaacatgatttaaaagctgttcacaaagaatttcatcatcgagaaatttatatcagtgatttcagaaagacagcaacagaaaaattgaaaacaaccctccgaatttttgtggagagaggacaagaaaaatga

SEQ ID NO: 486 - DNA, 1074 bp, Lactococcus lactis
atgccactcaagctaaaattgaagccctccgtgccaaaatggagaataaaaagaatgataaaaaagcttaatattgcctatgttggttttggtaaatcaacaaatcgctatcatattccttacgtgaaagaacgtgagaatattgtgattaaacgaattgtcaaccggactttaggaaaacgtcctgaacaagcagaattagaagcaaatggaactttgttctccactgacatcgctgatattattaatgatgattcaattgatttagtagtcattgtgactccagcttttgctcactatgactatgctaaggaactcctttcagctggaaaaaatgtactctgtgataaaccattagtcgaaaccttggaacaagctaaagaattggtagctcttgccaaagaaaaaaatcttttcttcatgcctttccaaaatcgacgctttgacagcgactttttaaccgtcaaaaaagtgattgagcaaggttatttgggtgatttggtagatatcactgtcaatatggaccactttagacctaatgatgccagtcaaggtggaaattttgatggcgcttggtatggtcacggtgttcatttagtggaccaaatggtttcactttttggcgctcccaaagaagttcaatatgatattcgagcaacaagagattatgacagtgtcgatgactatttttctgtcaatcttctttatccaaacttgcgagcaactgttgctgctactgaagtcgctgctctaccacatccaaaatggcttgtttatggtacgagaggaactttcatcaaaatggatgttgaccaacaagaaaatgatttaaaagttggcatgttcccaggtgatgaaggttttgggcaagacagtccagctgattttgggcaacttacctatttcaatcaaaatggtgaccgcattgtgaagcatattccaacggttgctggtgattatggtagagtttatgattcagcttatgaatcaattattaatggagctgacaaattggtttcagatgaacaaattttggctgtcattaaaactttggaaaatggtttttctaaataa

SEQ ID NO: 487 - DNA, 867 bp, Lactococcus lactis
atgattaaatttgaaaaagtaaattatacttatcagcccaacagtccctttgccagtcgtgccctttttgacattgatttagaagtcaaaaaaggaagttacacggctttgattgggcatactggttctggtaaatcgacacttttgcaacatctgaatggattgttgcaacctacacaagggacggttagagtaggtgatattgttgtcacttcaacaagtaaacaaaaagagattaaacctgtccgcaaaaaagtaggtgtagtctttcaatttcctgaaagccaactttttgaagaaacggttttaaaagatgtcgcttttggaccacaaaactttggaatttcaaaagaagaagctgagaaaattgctgctgagaaactggaaatggtcggtctttcaaaagaattttgggaaaaatctccttttgaactttcaggaggacaaatgcgtcgtgtggccattgctgggattctcgcgatggaaccagaagttttggtacttgatgaaccaacagcgggccttgacccaaaagctagaattgagatgatgaaactttttgagagtattcatcaaacgggtcaaaccgttgttttagtcactcatttaatggatgacgtggccgattatgctgactatgtttatcttcttgaaaaaggacatattatcagctgcggtactccgtcagatgtttttcaagaagttgattttttgaaagcacatgaattgggagtgccaaaagcgactcattttgctgaccaacttcaaaaaacaggggtctatacttttgaaaaattaccaatcacacgagctgaacttgttaatttactgacaagtctgtcagtaaaatcaggaggtgaaaactga

SEQ ID NO: 488 - DNA, 348 bp, Lactococcus lactis
atgaaaaaaatttataatattggtgtcgaagcgacaatggatgttattggtggaaaatggaaaccaattattttgtgtaatttaagacataatccaagtcgtccaggagaattgagacgtcaaattccaggaatcagtcaaaaaatgctgactcagcaattaagagaattagaaattgataatattatcgtccgtaaggtttataatcaagttccaccgaaggttgaatattctctgagcccttatggtgaaactttaaatggtttattagatattctttgctcgtggggtgaaggtcatgtccaaactttaaaaagtatgggtgaagaagttcaagttttagaataa

SEQ ID NO: 489 - DNA, 1380 bp, Lactococcus lactis
atggaaaatcttcaagagaaacatgaagctcaacggggcttacagaaccgacatattcaacttattgctattgctggaacgattggtaccggactttttctaggagctgggaaaaccattcaaatgactggtccaagcgttatctttgcttatattcttattgggattgcgatgttctttttcttaagaacaatcggagaaatgctttacaacgaccctagtcagcattcatttttaaattttgtcacaaaatattcaggcgtcaggacaggttacttcactcagtggtcttattggttagttattgtttttgtttgtatctctgaattgacagcaatcggaacttatattcaattttggcttcctcaggttccactttggttgattgaaattgtcatgctagctcttctttttggacttaatactttaaattctcgcttttttggtgaaactgaattttggtttgcgatgattaaagtagcagcaatcattggaatgattgtcactgcgattattttagtagctggtaattttcactatagcactgttttaagcggaaaaaccgttcatgactctgcttcactaagcaacatttttgatggctttcaactcttcccacacggtgcttggaactttgttggtgccttacaaatggttatgtttgcctttacttctatggaatttattggaatgactgcggcagaaacagttaatcctaaaaagagtttaccaaaagcaattaatcaaattccagtacgtattttacttttctatgttggagcacttttggctattatggctattttcaactggcactacattccggctgataaatctccatttgttatggtttttcaacttattggaatcaaatgggcagcggcgctcattaactttgttgtcctgacttctgctgcttcagcgcttaatagttcattattttcagcaacacgaaatatgtactcacttgctcaacagcatgacaaaggaagattaactccttttacaaaactttctaaggcgggaattcctatcaatgccctttatatggcaactgctctctcgcttttggctcctgtcctgactcttattcctcagataaaaaatgctttcgattttgcagcctcttgtacgactaatttatttttagtggtttactttattaccctctacacttattggcaatatcgcaaatctgaagattacaatcctaaaggtttcttgacaccaaaacctcaaattaccgttccctttatcgtagctatctttgcaattgtctttgcttctttgtttttcaatgctgataccttttatccggccttgggagcaattgtctggacaattttctttggactctactcgcactataaaaaaatctaa

SEQ ID NO: 490 - DNA, 813 bp, Lactococcus lactis
atgaagtttatcgccattgttgggaccaatgctagtttttcttataatcgaaaactcctttggtacatgaaaaaacattttacaaaagaagcacaaattgaaatagtagaaattacagacctgccactattttctgaggatatcagagaaattcctgaaggggttcagaaaattgcagaggcaataagagaagaggatggtttgattttttcaacgcctgaatatgatcatgcgattactgctgctttgaaatcattgatagaatggctgtcatggataaaacctcagccattgaacagtctaccggttatgattgttggggtttctcttggaaatatgggaactgtttttgcccaagaaaaccttcgacaaattttgagttcaccgggtctggatgcttttgttttaccttccaatcaatttcttttaggacgagcagctgaagcatttaatcaacaagatgaattgatcgatgaacggacaattagctggttggagcattgttttaataattttatgatttacagtaaaacattaaaaccgatgagacttccttcgctaaaaaaagagaataataaagaaataattgagagtgaggaaagtaaaaactctacagaaaccgatgaagtttggtggactaaagaaacgaatcaaggattgccagttctttccgatgcagatacaggagcttctgagtatgaagaagtgattgaacctgaaaattcggcctatctacaatttttggaagagggagaaacttggaagtttgatgatattggagaattaagaggaaaatcggaagaagaagactga

SEQ ID NO: 491 - DNA, 606 bp, Lactococcus lactis
atgtctaaacttcttgttgtaaaaggtcacccacttactgctgattattcactttcactcaaaggtcttgatgctttcgtcaaagcctataaagctgctcatccagaagatgaaattgaagaactagatgttttcagtgctgatattccaactttgaatactgaattggtcagtgcaatgttcgcaggtgagaatgctgaacttacagcttcacaaaaagataaattggctcgttttgctggttttacagaacaatttttgtcagctgataaagtagtcattgctaatccaatgtataacttgatgattcctgctgaacttaaatcttgggttgatacagtcaatgttgccggtaaaacattcaaatatacagccgaaggtcctgttggtttagcaaatggcaaaaaagtcttgcacttacaagctaatggtggagtttatggagcacaagatccagcaacaatttacatgtcagcaatcttcaattttatcggtagcgattttagacaaattgccgttgaaggacatgcttatgatccagaaaaaacagaagaacttctttctgaattcattaataaagtagagttagaagctcaaacattctaa

SEQ ID NO: 492 - DNA, 192 bp, Lactococcus lactis
atgattcatgaacttactgacagagctcggcaacatttttcaacaagaaaaatagacgctttttggatttttgaggagccaactacgggtgctctttttgagggaggacttgtcagtgaaaataaggcaatcacttttgaaatcaatgctaaaactttagaagtctttgaaaaaaatgaaaaaattctgtaa

SEQ ID NO: 493 - DNA, 879 bp, Lactococcus lactis
atgaccgacttcaatcaattttttaaccttgagttttggcaaaagatttttgaattgaatgaatcacctctgcgaattgctattgcaatattagacattgcaattatcagttttttcctttatcaagcgattaggtttgtacaaggaacaaaattaatgacgcttgttcgtggtgtgattattttcatttttatcagaattattgccggacttattggacttacaacagttgagtggttactcaaccaagttattacctatggggttatcgccggagttatcatttttcagcctgaaattaggcgagcgcttgaaagcttaggaagaacaaccacattatttacaccaacgagaaaaagtagccctgatgggcatatttcagcttacgagaaatcttttgcttacatgtctgagcgaaaaattggcgctttgattgcgattgagcaagggcaaaatttaaatgaatttgtaagtacagggattcgtttagatgcggatattactagtgaattacttattaatattttcattccaaatacacctttgcacgatggcgcggtcattgttcagggaaacaaaattgctgtaacctctgcctatcttcctttgaccgaaaaatcggggatttcaaaacaatttgggactagacaccgtgctgcaattggactttctgaagtctcagatgctttaattttagtggtttccgaagaaactggtggaatttcaattgctcacaatggagaatttttcgcggatatttccaaagaaaaattccatgatattctagtggccattttagttcctaaagttgaaaaaaatgaaaaaggaacagggaagaatagaaaaaataaagcaggaggaaagaaaaatggcaaataa

SEQ ID NO: 494 - DNA, 3543 bp, Lactococcus lactis
atgtatcgttctaagcatcaaaaaggttatacaaccagtcatgaagtaaaaacaactcgctttcgtacttggaaatcagggaaaaaatggctatatggtgccaccgttttgactctcacagcttcaactctacttcctattggaaacctagctttccaacctaaaacagagaaagcgcaagcagcatctgtttcatccggaacacttgttccaggaaatacaagttatgacacaggaggacatacctactctggaactgaatttgctaattcttcaaactatgctttatatggtaaagcagttgtagcaagtaattggattaatcttgtttcatcaacagctaatagtgttggtttaggaatatttaatggatcagtttcagctatttcagcaacaacaggttttaccttgaagtcaacaattaaagttgattcaggaagttctctgactgatttcacaaaatcaggagatgccatcggggttattttaacaggggcatcaaaggcacagttagcagcaaatgctcaatcttctcaggcgacaaatgatgggcttggaattagaggtctgcctaacacagttttcctcggccgcgatctttattctaacttatccaacgtctcaaccggttcgttgacaggaattgacggatctgcaactgtaaatggttggacagatggtccaggagttgtaatggcaattcgcaatacggatagtagtggaactttacaagctgctaattatccttcattaggtagtgctgctccctatagtcccgtgaccaacactcaaaatgggacagcctacacctttgcaaccgacacaagctatgcattaggtgtcgcctctcctattacatcgtccgtacaagaacctattacagtcacttggactcctgatgcaacaaatactgcaagcacaggctatacttcagggactttaacatttaatttgattgctcaaacaacaagtaatggcgcattaattggagcaagtgctgtcaatggaggaacgggtggttataccttaacaactcatactaatttacaaaattcattaacagttggttttgttggcgggacaggggggaattatggtaatctttctgtttctttaaatggagcaacgattactggctcaaaaggaacagagcctgtgcctataaactatctcaataaagttacagggcagccgattccatctatggcacaaagttcaattacggcaaatgtcaatgatacgattggtgcggctttaactgctccaagttcaacaagcccagataataatacttatacctacgttgttccagcagctccaacaggttatcaagctaattctgcaacaacaacgacagttcttgcagcaaacccagcatccacaacgaatacttcagccacaactgtttctaactttattgtaggaacaaccaaccccaatgccttaaatgtaagctatacaccaagtcagcaaactgttttgttcaactgggcgaaggcaagtggaacaacccttgcaaatctcccaaatcagattgcttacggagcaactggtataacagacgcatcagttgtaaccgacaaccctttttcaaacaccactttgttatctagctatgcaacagctctttcaaatgctgttcctacaggctacaacattacgcaaatatcaaatgggacaacaacagtttccggtgctacaacggcagcgaccctagctgcttttacaagccaaaatccgactgttggtgctacaagtaccctgaatacttatacagttactttgactgcagtatcacaaaccgcaacttacacctatggatacactagtacagcattaaatactccggcaattcccgcaattttaacttcaactggaacaacaggaggaagtgttactacaccgacaggatataatactagcccacaaattccttcaggttattacatctcagctatttatgccggaacatctgcatcaggtacattaattagtagctcaacaactaatggaacaaatgccgcttggccaagtggacaagtctatgcacctactggtaaccagtattatattcaattggcacctaacactgtaaatgtaacttggtttatttcgattgaccctaatcctgataatgatcctctaaatgttgcacaaggaggttttactccaactgtaggttcaattttgggaggttcgacaacaactaattatcagagtcaagtcattgataatatgaattctcttactggtaatactttgagtacaacagataatgtcacatatactgatggtgcaacaggtattaaatatatcgttaccggatatcagtatcaagaggggacaacaactacagccacaaattcagctccaataacaacttataaaaccttttcagatttattagctgctcatccttatgttttagctgggacaaagagtaatagaacacaattggttcatttgttgatgacagttgaccagactacaattacaagcaattccacttcaggtcagcatgttaatcctgcaacaaattatattccaagtagtgaaattacatcaagtaccgatatagatggtgcggacgatgatggcttaagttatgcaatcaatggctataacgcgattgtaaatatcactggaggacaaacagactattggggagatgcaacaaattcactgcaactttcaattggaacttataccgagaattactatgctctcaattaccttggtgttcaagcctatactaactggcttcctagtcattctggtgggacagtatcacagtttttgcaaacattagatgcgacaagtttggcaaatgatacagtaacaagtcagactactctagaagtgcaagatgcaacagcaattacaacaaataatcatcatatcattccacgcgccgcttcttacaatccatcttctgacctagtaggggccagtaatgctgatggaagctcagtagaaaatattgaaacaaatccaatagtcaacggagatgcaatcggtgttcttatcactgatagctcggggaacatactatgggtaaataattctgatatcagcctaccgacaaataaacttcaagaagtaacatatatagaaaattattatgctttaactgcccaaggtttagttgattatacaaattggcaaacaactacagcttcaggtggacatacagttggcgattttataaattctggccaagcgaccacaagcgactatgttaaatcaacaacagagttgacagttactaattttgtacttccttttgcaggtggagctggtaatcaattcctgtatttgatgataggattggcggcctttggggcacttggattctactttagtcaacgacgtaaagcagaaatggatcttgaagttattaacaaggagattttaggaaaaaatgataataaacgatcaaatatttacctaacttctcgacacactcgtccttacgcaaaaatattccatacaaaaaatcggactcatttagcacaagcacagcgaaaggggactaacgaatga

SEQ ID NO: 495 - DNA, 240 bp, Lactococcus lactis
atggctttaaatgacaaacttgatgcaacaaaagataaagtaagtggaaaagttaaagaaaccacaggtaaagtaactggtgatgaaaaactagaagctaaaggtaaaacagaaggacttatgggaaaagctaaagaaggcttggaaaatatcaaagacaaagcttctgacctagctgaagatgttgcagaaaaatttaatgatacggttgactctgtcaaacataaaaacgagaaataa

SEQ ID NO: 496 - DNA, 255 bp, Lactococcus lactis
atgaaaaaatatgacaaaaaaatgaaaaatcgcttgaaacgagcgacgggacaactcacaggaatacttaagatgatggaatctggagaggaatgtattgatgttgtgactcaattaaccgctgttcgctctagcttagatagcctgattggtctaatcgtagctgagaatctcaaagaacttttactggataaagaagtgactgacaaggaagaaaaactcgaacaagctataaaattaatcattaaaaaatag

SEQ ID NO: 497 - DNA, 939 bp, Lactococcus lactis
atggttcaagcttataaaaaattttggctgggagctttcactttcaataaaaaaaccagtcgtaaagatttttggtcagccttattaactcatatcataatatttgtcatcttgtttaaagcttatcatttctttaatctactagatttttatcaactaacgactttatggcaaacttttgcttcattctttcaattaatatttaatctatatttctttggaagtttattgtccttcattgctctaactgttcggagattgaatgatgcagatttaccttggggacttatttttcttaattttatccttggtctaggaactcttgtgctcttgatacttaacctatttccaagttcgcctagagctttaaaattcaaggaatacgagattaattcttctcaagaatttaataatttaccagagacaaagacattatcaggtatattcaaggactattttaaaaattactttgaatttcgcggaagaacgacaagaagaaatttttggtgggtgcaactgttttggggactgaccgttattctttttctgtttttaatctatcttttcaatcaatttgaacaaataatgtttggctataattttattggtagtatggtcttgcgtttattctttttcctatttatcttaggaacatttttcccacaacttacgattcatgtaagacgcttaagagatgctggtttgagtaatttaggattatcacttttgttaggtggaacaagtggaatattaattttctatcaaatgttcacgaagacattaaaaataacatatacaaccggtcactatcaattagttcaatatctcttatttttactagtaatgattgcagtattgagtttaattcttgtagaagtaatggcgacaggagaattaaaaacgaataaaaaaaattctttatttgaaaaaatagactga

SEQ ID NO: 498 - DNA, 684 bp, Lactococcus lactis
atgcctggttcagataaaactgtagatagtggagcgatttatatctcaaatacagaacctgaatataaagcttatgttccttatctttcaggaaatcctaagcagctcatcaacggagaacaagctttagtttttgcccgagatagagatacgttagctaatgggaattatggacgcgccgctcatcaacgagaagttatgactgaattaatgaacaagatgcttagtcttaatagtgtttttaaatatcaatcatttttaaatgatatttcatcagattttaaaacgaacatttcgataaatcttgctaatttgaccgcacttatggcttataaagattgtcttaacaaggtagtttctattcaatatcaaggggtaagtcaaatggtggatggtggaagttatgaattcataccagaaaatgtggatttggctattcaaaatataatgagacaagcaaatgatgagtctgtcaatgataagcttgatcaaagtgtcattacttatgaaaactattttggaagtgaaactgaccaatattatatgccttctgcgacggtaactatcaaaggtgaaaaaagtgaaacttatggagtggatactaaagggagtctggtaaaaataaataaggagaatgctcaagactatgtttcaagtcaaggaggagctttagtcgctaattaa

SEQ ID NO: 499 - DNA, 447 bp, Lactococcus lactis
atgacttacgaagattttatcaaagaagcaggattggcaagagaaaattttaggtgggcttgggcattttgtaatgaggttgatggtccaataactgagccagaattggctgataaacttttagatttagtattagagggaaagaaaagtgcgacggctagcgctgtagctgagtatggtgaagatgaaccattcccttcagttgatggaaaatttgatattttactagatggaaaaggtcaaccaagagctgctattacaacttctaaagtttatgtgcgaaatttttttgatgtcagcgctgagcatgcttttaaagaaggagaaggggatcaaagtttagactactggcggaaagtgcatcaagacttttggagtgacttaaaagtatatagtcctaatatggaagttctttgcgaagaatttgaagttctttaccaaaactaa

SEQ ID NO: 500 - DNA, 558 bp, Lactococcus lactis
atgaatcaaacagaaaaaaagaaaaaagcgattctagaaaccacttttcacttattaaaccaaaaaacaattagagaaattaccgttgacgaaattgcccacaaagcggatgtttcaaaagtgacactctttaaatattttcatagcaaaaatcaattgattaaccaggttattaggcaaaatctcaatcaattgtctttggaaattaaaactcttattgaaagtaatttagattttaatcagacttatcaagcaattcttcaattaaaaattcagcaacttgaacattatcagccgattttttcagaaaacatgatgactcaatatacaaatagtcctgaattactagatgatgatgccctttctttacagaagcagatttatctattactttttcaaaaaggccaggcggaaggaaaaatttctagtgattatagccaagaagattttcttctgattttaagtattttcaattcaggagtgaaaggtttatcaatgaatttacttatagaaaaagctgaaatcgtttctcgttttttcctcaatgggtggaaataa

SEQ ID NO: 501 - DNA, 450 bp, Lactococcus lactis
atgacagcaatttggaaagaaaaaagttttaatcaacttacattagatgaaatgtatcaacttttaagcctgcgtactgctgtctttgttgtggagcaaaactgtccttatcaagagcttgatggcaaagaccaagtagccaaacacctctggttagaaaatgaaaatggtcaactgatggccctttgtcgcctacttcccaaagggatttcatttgcagaggcttcaattgggcgtgtccttgtcaatcctgaatttcgtggacaaaatttgggaagaggactcattgaaaaagccttagaagtccttaaagaagatggggaagaagcagtaacaattgaagcacaatattatttgcgtgatttttatgcttcatttggttttgttgaaaattctgaacctttttacgaagatgatattaaacatgtcaatatgattttgaaattctaa

SEQ ID NO: 502 - DNA, 657 bp, Lactococcus lactis
atgaataaaaaaatctattatatttcgggtgctattaccacccttgcctttttaattttagcgctctttgttaaaattgattttactcatggtccatttccttttgatcgaccaattcaaacttgggcttttcatttacaaagctcttcaggactcacttactttttctctcatatgacaaatatttttggagataaaggtggaataattgtcgcagttctacttgctttggttttatatcttctctttaaacagaaagaagcgacaatctggtttgcggcaacagttgttttaagccttgctttaaatactgttattaaagcaattattggtcgagaacgtcctgatattcatcggttagcggcttttgcaaatgaagctgggaaaagttttccaagcggacattccatttttgcaacaattatttttggaagtattttctttatctgtctaggaaaacttaaaaatcgttcttctaaaattttattaggcattttatgtattatattaattgcattaataatgttttcaagaatttttgtaggggtacattatccaagtgatacaatcggcggatttctcgaaggaattagtattctattacttacttaccccacatatattaagtatcaagaaaaatctaaaaaaaccaattga

SEQ ID NO: 503 - DNA, 336 bp, Lactococcus lactis
atgattgaagcttgtatcaggacaaaaagagacaaaattgtttcttatgaaatctcaggacatgctgaatctggcgagtatggacacgatgtagtttgtgcggcggtcagcgttctatcaattacaacggcaaataatatctacgagatggctcacattaaacctgtgactcagatggaagatggttacttgtatgttgaaattcctttgagcatacctgaaaaacaaggcgtattggctcaaactttgctcgaagcttttgcaaattcgatgaaagcagttgagaaaagctatggtcagtacattacacttaaatttgaaaatggagggcaataa

SEQ ID NO: 504 - DNA, 375 bp, Lactococcus lactis
atggttttaattggattttcatcagtttttttaatctcttttaatgcttttgttttctttggactaatgcttttctttgaagtgttacttgggtttattacaattttagtgaatgtaccaatgacgtctttttttcagagccaagttcccctaaatattcaaagtcgattttttgctctcctttctttttctgcaaatttgatcgtccctcttggaatcctgtacacaggatttttagcatcagctattggagccgatgtcacatatatcatcaataatattttagttatagtaattgtatgttttgcattttggaaagaaataggaagaggctttcgtgcatttctgttgaaaaaatggaaaatgtcgaaatga

SEQ ID NO: 505 - DNA, 321 bp, Lactococcus lactis
atggttgaaaaaaatgaaattataaaatctggagagatagttatttctaatccaataggtggcaaactggttatgaaaagaacatcaacctccaaaaaaggaatgaaattcaaagaagtatttgcttcggaagcttctttgattgctggaaatttaactcaaggtagcttgcagatagcaaatcaagctatgtctgttgctcaaatatttaaacaagcacccaatgggctatttactgcaacggttgatccagcaaaattatctaaatttaaaaaatggaacatttactaccatggttcacggtggagaaaaaaagcttga

SEQ ID NO: 506 - DNA, 564 bp, Lactococcus lactis
atgtccagtccaagaaaaaaagaaggtaaaggcatacaaaacgtctttatccatacaattgcgcttcggattgccgaaaatgatacacctgttcactccgaactgattgggggcgatgtcaaaatcggacaggaaaatttacacaaccaagtcagtatggccattcgcaatcctcaagctaaattaatgtctcagctgaatggggattttatcatcactaaaaaaggagaaacaaaaccattagttaatatccaaaagcagaacctgagtattgcgcctaatagtgcttttgaactccctgtatcacttaatgatcactttaaaccaggaacctatacttataagatcgtcttgaagaatgatcatgaagactggcaatttttaaaagactttactattaaagagagcgaagctaacatgtacaatcagacgtctgtagattacacaaaaaaaacaaacttaaattggatacattatatgttggtaggaataactttgtttttattgctaatattattctatttttggggaaagcgaagtaatgatgttatccttaaatcttag

SEQ ID NO: 507 - DNA, 834 bp, Lactococcus lactis
atgaagaagcaatctcagcttacgaacaaaaaaatcaataagagcgagcctaaaatgacaattattaatttaaagaatataaatcttactcgaaataaaaaagaaattcttaaagatattacttggaaagtaaatcccggcgaaaattgggttattctgggcctcaacggttctggaaaatcaagtcttttgaaattgattttagcagaagaatggaaaacttctggcgaaatcactgttttaaatactcaatttggaaatggagaaattcctaagttgagaaaaagaatcagcgtagttggctcatttattgctgaaagatttcaaccaaatattaaggctgaaaaccttgtttatactgggaaatttaattcgagcatgctctataaaccctacacagatcaggaacttgatgaggcccgtcagcttttaagacaaatgggtgcaaaatcacttattggccgaaattatgccagcctttctcaaggggaaaagcaagttcttcttattgctaggagcttaattttaaagcctgagcttttaattttggacgaagcaacgaacggtttagatttatttgctaaagaaaaattattaaagcaactgcagcagattaatcaattaaaaaccgcaccaacactcatttatatttctcatcatcccgatgaaatcactgatatttttactcaccttttacttttaagagaaggaaaagtgattcaatcagggaaaaaagaaaacttattaaatgaaaagatacttactgatttttatcaagaaaaagtagaagttcaccgttttgagcagaaatattttgtaattcctgctaactga

SEQ ID NO: 508 - DNA, 303 bp, Lactococcus lactis
atggaacatgaatatttatttgtttactcaagattaaagttgttgattaaagatgctcataaatcttttaatcaagtagagcgggaacttggttatcctcggaatactttgaaaaattataagtataagaaaaaaccgagtgttggtcgtgtttttgaaatggcaaattattttaatgtatcaattgaatttttgttaggaatcgaagaaaaagacaataaaaatagtttagcttaccgtttagaaaaattggatcgtgagaaaaaggaacttgaaatcttgattttagaaggtcaaaaataa

SEQ ID NO: 509 - DNA, 171 bp, Lactococcus lactis
atgaatcgtacatttattaaaggctttttggcagggaatgcacttttgatagctggacttgctgccactgctattggcattaaagcaaaagttatcaatcctatcaagaaaaaagaagaacaaattgaaatgggtagaaaacgagcagccagaaaacggattgcgccttaa

SEQ ID NO: 510 - DNA, 948 bp, Lactococcus lactis
atgaagaaagtaagtattattatcccttttaaaggacagacagaagctgagttaatgttgccactttcgtccatttataatcaaattggagttgatctttctcaactagatattcatcttgttaatgatggtgggaagactattgaccttagtaagtttgatgttttggcagataggttagaaattcattaccacgaaattcccaatggtggtcctggtgtagctagacaatacggtattgataacagtataagtgaatatattatgttcatagatgctgatgatgttctttattatgtaggagcattatggcccttttataacgcttcaaatcaagggcatcaaatgattagagcgagttattgggaacaaattgcgggaaatccttacacctacacagttcatggaaatggcgaccgcaaggcagcatatgggaagtggtacaaacgaagttatatagaaatgttaggcttacgatttatgcctgatttaccaatctatgaagacacttattttgtaggtttggcttgtgaattagcaacagatacttgtttccttgaagaaaaagtttatatgtggttagcaaatcctaattctattactaggactgttgaaaataagtttaattatcaagcacatatttatgctcgcgaaaatagatattggtttgaaatgattcgcaaatggaagccagagtgtttagtaacggattttgaaaattatttgacaaatatgtatttaaaatctcaaaaatatccaccggtcgatgaaaaagcatggtgggaagagcaacataaactaattactagcgtttctgatattttttcgggctggacacaagaattacaaaaacaagtagaagataaaagtgccaatcctcaaaacgaatggcatggaattgaaactgatggttttaaagaatgggctactcaaagtctcccttggtaa

SEQ ID NO: 511 - DNA, 2154 bp, Lactococcus lactis
atgaagataaacaaaattgatacccgtcatggtactgctaatcaatccactttttcacatgggaattgccttccttacactggttttccttggggaatgaattatttttccccttcaaccggtgctgctcgtggagcttggtggtttcatccagaagaccgtacctttgaaggctaccgaatcactcaccaacccagtccttggatgggagatttctcacatttgacaatgacgcctgttgcaggtcctttgcctgaaacttccttgtggcacacagtgagttcataccgtccagaagaatcaacttttaatccaacgcaactcaaaattactcaattacgttatcagattacatctcagttaattccatcaatgtatggtggaattctatcaatgaattatcaaaatttaagccttaaagataatggcttgatgcttcatctccccggttcttatgaacttcaacaacttgacgattacagcttagagctttcaattattaattttgcgggttgtgaagatgaaaattttactttctatctcaaatttactgctgaccaaccttttgttttaagtggaaatttatctgatgaagattcttctgttcgcttagatttcaaagcagccaagcaggttcaaatacattttgctacctcttttatttccaaggaacaagccgctcttaatctggagcgtgaacaagataattcagcagaaacatatttggaaaatgctgaatcagcttggaataaccttttttcacgtatcgaaattgagcatcataatcaacaagaagtttccactttctatcacaatctttatcgctcatttctctttccacaaactttttatgaatttgaccaagagcatcaaaaaatccattacgatacaagctctaaaactgtcaagaaaggcccgctctatacaaacaatggcttctgggatactttccgaacagtctatccgctttatagtctaatagccgttgacgagtacggtgatatgctcgaaggtttcctaaattcttatcgtgcgactggttttcttccaaaatggctttctcctgatgaacgtggtctaatgcccggtaccttgatagacgctgtcattgctgatgctgcaagcaaaaacattcgtcctgatttgatgcccgagtttttggaagcaatgaaaaaaggagccacaagtcaatctgaaaactctaattacggccgtcgtggcacaaaagattatctaaaacttggttatgttccgctcactcaccatgaatcagttaatcacactttagattacgcattttctgattattgtatttctcaagtggcgaaacaaaccggtgacaaagaaatttcagacttctatgcccatcaagcaaaagactatcaaaatatttttgattctgaaactggttttatgcgagcaaaagatgctgacggaaatttcagagctgactttttagatattcgttggggtcgtgattatgcagaaggttctgcttggcagacttcttggtcagttcttcatgattttgctggattgattaaactacatggctcaagagaaaattttgaaaacaaactcatcgagctttgcaaccaacgaccaaatttcaatgttgaaggatatggttttgaaattcacgaaatgagtgaaatggctgctatcgaatttggacaagtggctatctcaaatcaaccaagtttccattacccatacctttttagctacattggtaaaccttggatggctacgcctttaatcaaaaatttactgacagaaacatttaatgatagtccgaagggctatcctggtgacgaagataatggaacaatggcagcttggtatattttttcaagtttaggattctatccagtcacagctgcttctaatcaatatgtattaggaattccactctgggacaaagctagaatcaacctttcctctggtcagcaacttactattcttgcagaaccaaatgctccgcaacaagttttcgtcaaccaaatcacatttactgacaaaaaagtcaatgatacttttatcaagcacgaagaattgataaaaggcggaaccctaaaatttgatttaggaatcgtaccaaatccacttaaatatacgaacgaacaacttccttattcactgacagaaaattaa

SEQ ID NO: 512 - DNA, 402 bp, Lactococcus lactis
atgaataaaaaagaattagagaatgcacttatttttcctcaaggtgaaaaaaatccttatggcgcttattttactggccaatcttatttagaaggaatgattgcggataaggacttgccctttggtgtgggaaatgtgacttttgagccgggctgtcgtaatcattggcatattcataaagatggttatcaagttttattggttacagccggtgagggatggtatcaagaagagggtaaggaggcccaacttttacatgcgggcgatacaattgttactcatgcaggagttaaacattggcatggagcgacaaaagatagctggttcagtcatgtggccattaccgcaggagaagcagtttggttagaagaagtttctgatgaacaatatgaaaacttataa

SEQ ID NO: 513 - DNA, 753 bp, Lactococcus lactis
atgtcaaacaatattgaaaacaaagtcgtcttaatcacaggagcctcaagcggtattggccaagcaactgccgaattacttgctaaaaaaggagccaaaattgtactagcagcaaggcgtgaaaatcgtttgcaggagctggctgataaaattaaaaaggctggtggacaagcaatctatcaagtgacagatgtaactaatccagaagaaagtaaaaagttggtacaatatgcgaaagaaaattttggcaaaattgatgctattttcttgaatgcaggaatcatgccaagttcccctttatcagctcttcatgttgaagaatgggaaaatatggttgatattaatttaaaaggtgtacttaatgggctcgctgctgtactgcctgaatttacagctcaaaaatcaggacatgttatcacaacgagttcagttgctggcctaaaagcatatcccaatggtggtgtttatggggcaacaaaatgggcggttcgtgaattaatggaggtactccgaatggaatctgctcaagaaggaactcatattcggacagctactatttatccggctgctataaatactgagttactgaatacaatcactgacaaagatgcagcagaaggaatgacagctctgtatgaacaatatgggattagtccagaggcaattgctcgcattgttgcttttgctcttgaacaacctgaagacgttaacgtcagcgagtttactgttggacctacaacacaaccttggtaa

SEQ ID NO: 514 - DNA, 1047 bp, Lactococcus lactis
atgaaatcagtttattttgtcgaaaaaaataaaatgcaagttagagaatttcccaaagcgcaacttgtaaaagaaacagatgctatcataaaaattgttcgtgcctgcgtatgtggttccgatttatggtggttccgtgggatttctgaacgtcaacctggaccggtagggcatgaagctattggtctgattgaagaagtaggcaccggagttaaaaactttaaagtaggagattttgtcattgttccctttacgcacggttgtggacactgtccaatttgtttggctggctttgaagccaattgtccaaatgcaaaagatggtgtgaatggcggctatcaaggagaattctatcgggcgattaatactgatggtgcacttgtcaaaatcccgggccaaccaagtgattattctgatgaccagttggcttcattgacggctttagctgatgtcatgcctacaggttttcatgcagctaaagcagcagatgtccatgaaggtgatacagtggttgtctttggtgatggagcggttggactttgtgcagtgatttcagctaaacttttaggagcaaaacggattattgccatgagtcgccatgaagaccgtgcagcacttgcgcgtgactttggtgcaacagatattattgatgaacgtggtgaagaagcgattcaaaaaattatgtccttaaccaatggttatggtgcagatgctgccttagaatgtgtcggaacaaaacaagcaattgaatctgcttttcaagcggtaagagcaggagggcgagtaggtcgtgtgggagttcctcatgatgttgattacaatgaatggattgattctcttttttggaaaaatattcaacttggagggggagtagcctctgtcgcacgctgggataaggaaatcttacttgaagcagttttaagtggggagattaatccaggccgtgtctttacagcagaatttagcttagatgaaattcaaaaagcatatgaagcaatggatcaacgtacagcaattaaatctctattgagaatttcagaggtataa

SEQ ID NO: 515 - DNA, 165 bp, Lactococcus lactis
atgactagccaaaatgaaggcgtggtcgaggctgaaattaagaattttggcagacagatgattatcgaaggggagattcacgaatgtgaattgaactggaacaaaacatggcttatagaaaactgtatgacacaggctggggcttttagcctcggctttttttga

SEQ ID NO: 516 - DNA, 600 bp, Lactococcus lactis
atgaaattaagtaaagttgctatttcaacgggattagttgcatcattcatgtttattgggggcggaatcgctcatgcggatacacctaaatcaactcatgaagttgctatagaagtaattaacggaaactacggaaatggagatactcgtgtcactaaccttcaaagtaaaggttttgatgtgaaagcaatccaaacagaagttaataacattcttacaggaacaacaactcaagtttctgcaacaactaaaactgctgaagaacaacctactaaagttacatcagttgcaccaactcaagcaacacaaagtgtttctggtgggcttaatatgagccaaacttctggacaagttgacatccaagctcttgctaattatatggcatcgaatacagctaatgcagcgggctattctgctagcgaatgggcttatatcattactcacgaatcaaatggtgggattgatagtgtgaattcaagttcaggtgcttatggtgctttccaattgctaggtcatggcgaatatgctggaatgactttggcagaacaaattgcgatggcaagtaaacttcctgctggtagctgggttgtttataactaa

SEQ ID NO: 517 - DNA, 1539 bp, Lactococcus lactis
atgaaattaaaagatatagagaaatcaacaaataaaaatctttatctgctttttctaagtgtactcgtgggcttgactgcgggttttttggccagtctttatcggttggcactggaaaaagctgaaacttggggcttgagtatttatcgcttcgttagctcacaccttatttttattcccctccttattttgggtttggctttcttagcttttgtggttactttctttatgaagaaatatccgatgagttcaggttctgggataccacaagttaaagggcaattacagggttattttaaaaataattggttcacgactgcttttgctaaatttatcgctgggactttagcaatgtttgcaggtctatcactggggcgtgagggtccctcagtccaacttggggcttcaatgggtcagatggtttctagtcgtttggctgaaactgaacgtcataaaagaattctaattgcttctggagcatctgctggtttatctgctgctttcaatgcacctttgtcaggtgtcatgtttactttggaagaagtatttaaatacttttctccattgattttattaacttgtatgacctcagcaatggttgctgatatggttgcacgaataatgtttgggagtggtccagtttttcatttccaaattgttggttcaattgaactctcaaattattggctacttattattttaggaattattttaggatttttcggtgctttttataactggacactcctcacgagtcaaaatttgatgaagaaaataaagagtccatttcttcgtgttttacttacttttttagtggttggggcaactggtttattgtttcctaatataattgggagtggccatcgtttaatggattcctttagtttaggaatgggattagcctttctatgtttgattctcattgggaaatacctgatttcaatggtatcttatgcttcgggtgtgccaggaggaattttctttcccctgttagttttgggtgctagtcttggagctgtttttgcgacaattgttatttcactttttcatcttccaagtcatttatttgccaatctagtaattttagcgatggctgggacttttacagcaattgttcgagcaccgatgactggaatccttcttttggtggaaatgactggttcatttgaccatttacttcctctggctcttgtctctttaattgcttatgtcgttgctgatttattacaatctgagccaatttatgattccttattagacaacatgttgaaagaaaaagaaattgatgttgatgattcggataagcagatgatgtttgaaacaattgttcaatttgattcagttgcggatcgtaagaagttgtcagagatacatttaccagaaggatgtttgctagtttcggttcatcgttcaggtaaggatatcattccacacgggaatactgaattacaagcaggagattatttgacctttttgattagacgagaagatgaagtgattgctagagaacagcttcgtcaggttttaaatgaaaaataa

SEQ ID NO: 518 - DNA, 270 bp, Lactococcus lactis
atgttacttagtatcgctatactattgataatctggggggcttatttaataggaaaaaaatataaagattctttttttatcagctatggccgaagcaaaagaggattgattatcattgtttcgtcgttattactgcttagtttctttgttttcgtaaaaaatgatagtttgttcccagtagttttattctctatttttttaattggcttaggtatctattatttaatacacgatagtaaacgagattctgaggggaaaaaagagaattaa

SEQ ID NO: 519 - DNA, 267 bp, Lactococcus lactis
atgaaaaaagtattagtaaaagcagtacatggctaccaacgctggatttctccagccttgccaccagcctgtcgctattatcctacctgctccaattacatggttcaggccattgaaaaacatggaccagccaaaggtttggcaatgggaacagcacgtattttacgttgtcacccattttgccagccaggatatgatttagttccagaccattttagtttgcgaagaaattgggcagaaccagaaaaagaagaagactcaaattaa

SEQ ID NO: 520 - DNA, 714 bp, Lactococcus lactis
atgaaaaatatgaatgataataatgttatctttgaccaaagaagcgatggattgaatgcatttttcagtaaaatttatgcgttgatgggagcaggagtattagtttctgcactcgtttcttggataatgattacatttttcttagataacatgacagcaattctccaaagtggaagtttattcttccttgtactctggattattcctttagtgatggtagtatcacttcaagggttagcaatgaaaaactcaaaaatggcactaccgatttttatcggttatgcggcatttatgggattcttgattagttttacacttttgatgtataccgccactgatattactttagcctttgttacggcagcagcaatgttctttggtttatctgtttatggacgatttactaaacgtaatttatcggcaatgggtaaagcatttggtgttgcagtctggggcttgattattgcaatgtttcttaatttcttctttgcaagtacaggacttacaatccttattagcctagtaggtgttgtgattttcgcagggcttatcgcttgggataatcaaaaaattacacaggtttataatgcaaacaatggacaagtaagtgatggttgggcaatttcaatggcactttcactctatcttgacttcatcaacatgtttctcttcctactccgtcttttcggtatcgcaggtggaaatcgcgattaa

SEQ ID NO: 521 - DNA, 933 bp, Lactococcus lactis
atgacattaaagattgacaaagttcgaaaaagctttggtgataaaatcgctgttgataatctcaatatggttgttaaaccaggtgaagttatgggcttaattggtcaaaatggtgctgggaaaacaacgacttttcggatgattcttaattttatatcagctgaccaagggaaaattacttggcaagatggaccgattacgcaagaaatcaagcaaaaaattggtttcttacccgaagaacgtggtctttatcaaaagatgacagttgaagaccaaattctttattttgcggaactccatggaatgaaacgagcagatgcccggataaagttacaagactggatgaaacgtttagaggtcgttggtaaaccaaccgacaaagttcaaaccctttctaaagggaatgcccaaaaaattcaattcattgccactttgattcatgagcctgaatttttgattttggatgagccatttacagggcttgacccagtgaatacagaactcttgcgaaatgagattaaacggagtcgtgataagggagcggcggttattttctctaaccataatatgagtgatgttgagcttttatctgaccatttgttaatgctaaaaggcggtcaaacaattttaaatggaacggttgaagccattcgagcttcttatggccgtacccgtatttatttggagtctgatctgcccaatgaagagctctctgtaattacaggagttgaatcaattgaaaaaagaggaagtggtcgttcaataaaaatatctgaggcagaagttggacgtgaaattttccaaaaagtggctaaagatggctatgttcaagcatttgttcagtctccaccgtcactagatgaaattttccgaatggaagcagctgagaacaatcaagaaaatttaagtgcaagaagtgaggaaataaaatga

SEQ ID NO: 522 - DNA, 399 bp, Lactococcus lactis
atgaacaaatttatctggtccatttttatccccgtcctgatttttgcaggactattgacagttattggttttagccttgagagtcagcatttttactggcttcaatccgttgagctcatttatctttttggaagtttaatctttacttttgctgctttttggatttggcatctggggataaaatctcggaaaatgaaaagcttaaaagttttgtggctcattctgagtttagtttttctaattgacttaatcaacacaggagtttatttagctcaggggcaaggatggctgtggggtatgagtagttttagttctgctggacctgctttttttgcaagcatgctccttttgagcctaagttttttaggatttagaggtcaaatgaagaaagaaaattaa

SEQ ID NO: 523 - DNA, 909 bp, Lactococcus lactis
atgacttattatctccttgcaaatcccaattctggtgcaggtaaaggtgcgcggactttggagactttgattccatatttggaaaaaaataattatgaatatcgactttttaaaactaaagctgctggagaagaaggcgctttggtcagacaaatattagaccttaaaaatccggatgaccacttagttattattggtggggatggtaccatttcacttgtcattaatgaacttccagaagaagaggccttttcttatattccttcaggttctggcaatgatttcgccagaagcttaaagttgaagcttgacccaattgaatcttttgaagctgctcgtagaggaattaatcatgagatttttatcatgaattatcaatctaaaggattgagtggctatgctctaaataatattggaattggtttagatgcaactatcgtgaaatctgccaatgaaggaaagcttaaacaagtgcttaacaaattgaaattgggaagtttttcatatattttgactgccttgcacgttttgataactaaaaaaccatttccagctttaattgaagtagaaaatcaagaaatttcactagaaaatgcctttctgatgacttttaccaaacatccatactttggaggtggagtaaaaatttctcctgaggccaccaatgaaaatgcagatattcaccttgttgaatataataaacatcatttattacggactttttcattaattccaagtgttcttcgtggaatgcatttaaaacatcccttatttttacaccgagtgagtcctcagttttccgtagaattagcagaaagtcaaccagtccaaattgatggagaaattcatgagttagtagctgctgacagactttcaatcagtactgaaagaagaatgattatttactga

SEQ ID NO: 524 - DNA, 588 bp, Lactococcus lactis
atgaccataaatacaaataatctgacaataacaatttcagcagcatcaaaaaaacaatatccagaaaatgattggccagaaattgccttagctgggcgttcaaatgtcggtaaatcaagttttattaatactttacttaatcgtaaaaactttgccagaacttctggtcaacctggtaaaacacagttgctcaatttttataatattgatgatcaacttcatttcgttgacgtacctggttacggctacgctcgtgtttctaaaaaggaacgcgaaaaatggggtaaaatgattgaggaatatttgacaacaagagaaaatttaaaagcagttgtcagcttagttgatattcgtcatgaaccctcagaagatgatttgatgatgtatgagtttttgaaatactaccatattccagtgattttagttgcgaccaaagccgataaagttccacgtggtaagtggaataaacatgaatctattatcaaaaaagcaatgaaatttgatagtacagatgattttattatcttttcttctactgataagacaggatttgaagaagcttgggaagcgattttaagatatctctga

SEQ ID NO: 525 - DNA, 183 bp, Lactococcus lactis
atgggcttaacttttagaaaacgtgatgattttgataaaatgatggacgatttaggcgtctcaactgttgatttagtgactgatgatgacaaaaaaagcgttccttctcctgaaaaaaaggaagatccatttgctaaatttttgactccaaaagaaaataataaggagaaagacccaaactaa

SEQ ID NO: 526 - DNA, 927 bp, Lactococcus lactis
atgacattaaatagtttagatgttcaaaacaaaacttttaatccacaatttcgcggcttcagtaaacatgaagttgatgaatttttggatatcgttgttcgagattatgatgaattcgctcaaacaattaaagatcaagaacgtgaattaaaggcgttacgcgaacgcgtgaaatattttgatgacatgaaagattcactgaacaagtcaattgttgttgctcaagatgctgctgataatctccgtgaacaagccaaaagtgaagctgatacgcttagaattaattctgaaaaagaatctgctgatattattgcaaatgcaggacaaaagagttctttaattattgaagcggctaaaaaagaagctggatttattttgaatgctgcttctgatgatgcgcgtaaattagtacgtgatactgatgatttgaaacgtaaaatgcgtctctatcaccaacgaatgacttcaattattgaaaatcaacttgcgtctattcaatcggatgactgggctgaaatctttagacctactcaagattatgcaatcaatcctgaagaaaaattgcaatcaatcattgaagaacatttggaaaatgctgaatctactttggcaaaaactcaagcaattaaacctttaacagatgaagatattgcacaagcaaatgaaacatctgatgaaacagaaacaattgtttcagaggaaattgtttttgaaaccgaagtacctgacgaagtaaaagaagaagtagaaattactgacgaagctaatactactgatgattctaacgaagagtcagaagttgaagctccaaaagcagatgattcagaaattttcccagaattagattcaaaagcaccagctgaaacagctgaggttgttgaaaaagataatcaagaaacaattgatttaagcgaattaaaaaattaa

SEQ ID NO: 527 - DNA, 678 bp, Lactococcus lactis
atgacgattaaagagaatgttaaaagaatactgagtaatgtagatgcggcaaaggctgcgtcttcttattctaatcagtcagtttcagtcgtcgctgtgaccaaatctgttgatgctaatcttgcacgtgaagtttttgaaaatggagtttcacatttagcggaaaatcgaacagaactttttttggaaaaatacgaagctcttaaggatttagaaattacttggcatttgattggtaatttacaaagacgtaaggttaaacaagttattaattatgttgattatttccatgctttagattctctgaaattagctcaggaaataaataaacgtgctgaacacaccattaaatgttttattgaacttaacatttctggcgaggaaagtaaacatggattttctgtcaatgaacttatggaaatattacctgagttttctgaattggaaaatattgagattgttggtttgatgacaatggctccgtttgatgcgactgaaagtgaatgtaatgacatttttggacgaatgaaaaaattacaagttgaaatatccgaaatgaatctttccagaattccttgtactgaattaagtatgggaatgagcagagattatgagattgccattaaaaatggtgcaacttttgttcgaatcggtacagaattttttaaaaatctataa

SEQ ID NO: 528 - DNA, 522 bp, Lactococcus lactis
atgtttgagaaattcgatttattgaagcattttggagtctatggtgtggcaattgacaatgagaaattacttgtcattgaaaaaaattcaggtccctatcaaaatcgctatgatttacctggcggttcgcaagaagttggtgaatcaatggttgacacattagagcgagaagttcttgaagaaacagggtttacggttcttgcaagtactaataatcgcctgtattcggcttggatttatgaaaatgaccgtcgagtcgttgggcaccacattttcaacctttttgatgtaaaattaaatagtgtagccaaaaaattaccacaaattgttgctgacggaaaaaatgactctgacagagcagtctggaaatcgattaaaaacttgtcagtagaaaattcatctccacttgtcctaaaagtaattgccgaaatcaataattatccccatgtggataaagctgaaatttacagagattggaaggtcaactatggaagcaaaaattatcccaagcctttggtttga

SEQ ID NO: 529 - DNA, 714 bp, Lactococcus lactis
atgaaaaaaataatcactaaagattacgccacaatgagtgaacttgctgcagcgattgttcttgataagatgatgctttcaaaaagggtaaatctttcgcttacagcgggaaatacccctcttggaatgtatgaaattcttattgataaactccaaaaaatgaattttgatcgctcaaatatccattattacaattttgatgaagtaccacttgctggtgaacgctatggattaacaatgagtgctttaaagacagctttttatgatcgagtacatattgatgatggtaatcttcatgaattaaatgctcaaaataatcaagtttttgatcaaaaaatcttacaggacggtgggattgatttgattgttatggggataggagaagatggtcatttttgtgcaaatatgcctggacatacaagctttgagcgagaaatttttgctgttccatttgaagaaggggatgagatttatcagtcaatcaaaaatttgacagataaagaaccggcttctccttatgtcacttttggtccacgaacagttctagctagcaagcaacttttagtttttgctgacggaaaaaagaaagcagagattatgaaaaaagttcttgaggggccaatcacagaagaaattccagcttctattttacggacgcatccaaatgttacttttattttggatgaagaagccgctgctttacttgaaaattag

SEQ ID NO: 530 - DNA, 507 bp, Lactococcus lactis
atggtacaagaaaacacaaaaacagaagtaactgaagttaaaggtagcttgacttacgaagataaagtgattcaaaaaattgttggacttgcccttgaatctgtcaatggactattgtctgtcgatggaggatttttctcaaatctgacaggaaaactagtaaatacagatgatgttacagcaggtgtcggtgtagaagttggtaaaaaacaagttgcagtggacctaaaagtagtcacagaatacaagaagaacgttcctgatatttaccgaaaaattaaggatgtcattcgtaaagaagtttctgatatgactgatttagaagttgttgaagttaatgttacagttgttgatattaaaacaaaagaacaacaaaaagatgatgaaaaaagtttacaagatcgtgtggttggcgcagctcaaacaacagggaaatttacatctgatcaagtagataaagtcaaagaaaaagttgatgacatgggcgatgatgctcgtgtaaaataa

SEQ ID NO: 531 - DNA, 1005 bp, Lactococcus lactis
atgattttgtcagtactaccatctaatctcttaggagtaacaaaggtaaatgctgagagctctcaaacggaagtcaaccaagaacttacaaacttccaaacagaactcgatagcaaattagcgcaggcgaataagatttatagtcaagcgcaagaagctcaagaaaaagttaagcagtcaaagagcaaaatcacagaatatgaaagcaaaattgctgaaactgaaaatgatattgttcaactcaaggcttctgtcgcaaaacaaatgcgggcagtacaatcaaatggtggggctacgttctcatatattgatgtcgttgcgtcatcaaaaaatctctcagagatgattacacgtttgaccaatctgaatgtagttttgacagccgaggctgaccaagctaaatctttgatagagaaagaagcttcacttaaaacaatgaaagttaaattggaagaaacgcaagaatctcttgtgaaaaaccaaaatgactatcaaggacaagtagatagcttgcaaagtagtatttcatcgcttaaggataaaattagttctaataaacaacttttgagtgaaatgcaagaaaaagcagcagcagaacaaaaagctcgcgatgaagcattggctaaatcggtagctgaggttaaagctaaagcggaaacagttaaaaatacgagctcaaatccaccgacagtgccagatccaccaaaacaaactactccaacaactccttctggtggtcgtactttaaatgtagaagcaacggcttatgctttgaatgggattacagcaacgggaattgatttaagtaaaaatccaatttgtattgcggttgacccaagtgttattcctttgaattctcttgttgaagttccaggatatggaattgcaattgctggtgatactgggggagcaattattgggaatatcattgatgtccattttccaactaatgaccaagcaattgcttggggacggaaaaatattcaaatcactgttttgagttaa

SEQ ID NO: 532 - DNA, 576 bp, Lactococcus lactis
atgaaatcgaaaaaaactttaataggtctgatgacctcagtcacattcttagtttttgcaacacctttaatggttaatgcagatactgattcatctactcaaagtaataatcaagttcctcagatagtaattgaaaatgtggataactctttagtttcaactgttgatgtactagatagttcagagtctgcggtttttgacccaactatattaccagtaagtggtgctgttcaaaccataaaagataaaaatggagcagtatccaatatttctcttactccactatttaacccaagaacacgcgtttcaaatggaagttatacaattaatgcttggggaattggttggaatgtaacttattatatcaatatttctagtaacaaaataacttctgcaaataatcttgactatattattgcgatgcctgtaaactcggcaactgtaacagttgatagttctaaacaagcaacagcccgcttctcatttagtacaccaatttacaatatcctgtcttggaccggctgggtacgtgccacaattaatagttcaaataatattgtaattacaactaattaa

SEQ ID NO: 533 - DNA, 1233 bp, Lactococcus lactis
atgcctaatggcttgacagtttattatcttccaaaagcagattacaatcgaacttacggcttgttcactacaaattttggttcacttgatacaagttttgtcccattgggagaaagtgaatttcagacttttccagaaggaatcgcccatttcttagagcataaactttttgaaaaagaagagggtgatgtcatgtataagtttggagctttgggagctcaaactaatgcttttacaagtttttcaaggacttcgtaccttttttctactcgtgaaaattcttatgaatgtacagaacttttacttgattttgtccaaaaaccttattttacaaaagaaaatgttgaaaaggaacaaggaattattcaacaagaaatccaaatgtatcaagatgacagcgattggcgtctttttgcagggcttttggaaaaaatgtatcctgattctcctttagcagctgatattgctgggacaccggcaacaattaatgccattacggcagatgatttgtataaaaattatgaagttttttatcatcctaaaaatatgaatttgttcctaacaggtccttttgatattgagatgatgtcagactttgtaagaagtaatcaagctaaaaaagactttgctgatctatcagaaattcaaagaaaagaaattaaagcgagcgaaccaatttcgggagagagtttggaacttgaagtcgccatgccaaaatttgctttgggtctgcgcggtgaagaccaactttcaagtgactcaaagaccctatttaaatataaattagccaatcaactttttctcgatttgctttttggtagaaccagtcagcgctatgaagagctttataattcaggcctaatcgacgattcctttggtttctcctttgatttggacaagagatttcattttgcagtgttgactgctgacacagaaaatccgcaaattttaggtcaaactttgcaagaagccataaaaagttataaaatagatagagattttagtgaggaacatctcgacttactcaaaagagaaatgttgggagattattttagttcattaaattcgcttgaatatattgctaatcaattttcatcagaaatttatggtgacttaactttctttgatttccctgaaattttgaaagaattaagtctgtcagaaattgaaaaatttgctgaccaatttatttctgagatgaaaaaagtagaatttacaattttacctaaataa

SEQ ID NO: 534 - DNA, 282 bp, Lactococcus lactis
atggaattaaagaatttaaaagatttttatgagaagcaagaatatgtcgattataacgaaagtaaaaattttgagcaaagacaagtcaacaaaagaattgaagaattaagcttcttcactaatattgctgttttctcaatttttcttgtttttactacttacattttggtgagtttattggcaagctggattgctattccagtttctattgttctctcgcttgctctttatatttccgtgaaaaaaggaattgctaaagcgattaaatttatgatgaaataa

SEQ ID NO: 535 - DNA, 594 bp, Lactococcus lactis
atggtagaaagaagagtggtatttccagttattggtgatgacgaagcacttcaaaaagatactcgggtaatttttactaaccagcagttgctgacaagaaatcccagccttcaggatgaagcttcaattgaaaataataagccaaaaactgatgccaagagacctgagagtttcaaaccttataaagctaaaacaagctttagcacacagcatcgtccgctaaactctaatcatgacggcgtaagttcctatgataaaatgcctaagaaaactagcgttgacgagtcaaaagaacgggcaaaacgtgcagcagcaacacttccaaagcctcctaaacagtatgtttcaccattggagcgggacaaggaggatatcacagttcgtcgttcaacatcagcaattttgaataagcgaccttcagctaatgataacccaattcgggatatgaaaaatcaaggaatgaacgtttctgatgcagtcgctaaaggcggaatgaagaaggcagttccacatggagccgctgctaatgacacacaaaaaggaagttattttgaaaataagcggaaaaatatctttgaccgtggaatcgtttaa

SEQ ID NO: 536 - DNA, 4353 bp, Lactococcus lactis
atgataaaaaaatggacggtttgtttaagtataataatcttagttctaaactttgttccaaacttactgcaaggtcatcaagtatttgcagaaaatcaaaaaaattataaagataaagttgagcttattaatgatgaatcattcaatatctcatatagtatgcaagctttagaaaatcaatacgaatgggaaattgattatagaataaataaaacagaaaatgataaagaattaaagttaaagttttcttttgaagggaatcagcctattgaaatagaggaaaatgaaagctggacacttaaagaaaaaaatacaataatttcagattttgaaaaagagaatgaaggaaagattgtacttagagctaacaactctatttcattgttaaacttagaaattcaggcagatgctaaacttattgaaaacgatcaagaagtcatcagtgaagatattttagcgaagaaagaatcaacaatttttagcttatatattccagaaaataataaagcagattcaaaagagaaggataataaaaatacagaagaagtattaaataacgagtcaagtcaagaagaaactgttagtcaattaaaaaaagattcacaattagcattttcttatccttcaaactttgggataaaggctagttttaatgatttagcgcaaaattatgaaaatatttctcctgaatatagacaagatgagacaggaatttctccaaatcattcttggatacctacgggaaatacaacagtggtcaatcatcaaggctggaattctttttcttcacagtgggatggagtcaatagttggaatggagaagcaacaaatttagaaaattcgtatattgaatacgctggagttaataatccagtcgattttgccttaagaaaatatgcaaaagaaacagaaacaccaggcttatacgatgtttatttaaatgttcgaggaaatgttcaaaacccaataaaaccagttgatattgttttggtaattgatatgtcaggctcgatgcaaggggcaaaagaaactgctgttcggcaaggagtgagtgattttttatcaacgattcaaaacactgcttatgcagactatgtcaatgttggaattgttggatattctagtcccgggaattatgtaacgggagctagtggatatatcactgtaccgatagataaagtatcatcagaaagccatgttaaatcaattaatcaagcattagcaccacaattttcaggtggaacttttactcaattgggacttcgtaagggaactgagatgcttgaacaggactccagtgataatcaaaaaatgatgattttgatgactgatggtgttccgacgtttagttacaaagtaaattctgcctcaaaagttgataatgtcatttatggtcaaagctttgctgaaagccgagatgaaccaggaaacacttctaagattcaaagcccatattatgttaaagatataaatggtggaagtaatatcgaaattcgggacacttgggccgcaacattaggagaggcagaaatttctaaacaagagatttcagaaattcatacacttggaattcaacttgggaatgatggaagctatctgagtcaagaagaagtcaaaagtcggaccagtctaatagctacgacaggattataccaagatgcaaatagtgcaaatgatattactgattatttaaaaaatcaagcaaatgtcgttctaagtcgatttaacacaattacaaatggattgattctcgacccactaggtgctcagtttgaatataaggatacaaagtttgaaattactagtgtcggagaagactcaattgataatttaccaacaggtaagataaacgaaaaaggattagaaatttcaaatcttaatattgggaaaaatcaagaagttcaaattcattatcaggttcgattaaatactgaaaccgatgattttaaaactaattattggtatcaaatgaatggagaaacgacgttgactccaaacggtagtaacccagataataaagtaaattttggagtaccatcagcaaaatcatcaggaataaatcttacccttgaaaaacaatggttagctaattcagaaaatatacctgagaatgttgagctgcttataggccgaagaagtgctcaaatatcatctgattggaccaagactgttacgcttaaagaggatgatgaatggcggagtcagttagaaaatttacctaagtattctattttgggcgaagaattcatttatgaaataaaagatgagattgttcttaatagcgaaatatatgattggataacaattggggaagacaaaactacaattgctaacatagagaagtttagattacagctaatcaaaacatctaaccatgataatgaaccattgtcagaggtggaatttgtacttaaaaatagtcaaggagaagaaattgacaaggcagtaacgaacgaaaaaggtgaaattttatttgataagacccgtttaaattacggagaagaatatcaactccacgaaataaaatcgcccggtcactcactggaaggaccatggaaaataaaaactgagtttgaaaatgggcagcctataataaaagttgatggagagcaaatcgctttagatgaacactataataaattcatgattagtctcaatatcactaatgatataaatgtagaggaatttagaaactctgttacaattgataaaagagcggttgattcagaagaaaaacttgatggagcagtttttaatttatatcagatagaatcagtagatgatgaattgacccaacttaagccccttgaaatcacaaataatctattacccggtctttacgccttgcaagaaagtgttagcccaaatggatattacagagatgatgaagttcactttttccgagtcaaatttaatggaagcattgttgctattggtagtgagggtatagatattccatttttagatgaaaatgaaagtggaaaaaatggattagtattgaatgaagaagaaaatggtgatttgcatctcacactaattttttataatcaggccgttccgcccttgcagttagaagttgataagatagatgatgactttacctcccctttagctggagtaagttttgaattgactcgcttaggtaggaagtctactgattcggattccgtaaaaagaatcaatagttttgatagaatactaaaaacatttaataatgaatttacaggagaaacaatagccttaaaatctaatttagatggcaagctaactgttattgacaatgaaaataatggtcaagaaagtacatctccaattagtttagagtatgatactcaatataaattggttaaaaaaagttcgattggattatttccaaattttggagaaacctcccaatggataatcacaacaccaaatatggatgaacttaaagaacatgaagaagataataacattgaaattgatggtggagatttacttgaaaccccagatgaatcaatactagaaagtataaatcaaacgccaagtacactcggtgtcgtttcgcttattaaaacaaagaatccagaattcaaagcattagagagtactgattctcaggtcgaaaaagtaaaaagtgactcatctttccaagaaaaaatctcagaatatttaatttcttttgagattcattctaatattactcatagttttacaataaaaaaagttgatggagaaagtaatagaccaatggacacccaatttgctttaaggtgggttgagaagtttgaaccgactcaagattttgacagccttgagcgtttaaatcttgacactttggacttgtcagggaatgatatttcaacgagtagtaagacttctattgatgccaaagcaggagccactctttctactgaaaagggttctagaaccttagaacatatggctagaggtaatctttatatcataagtgaagaggaggtgcctacaggttatcaaaagactaacactgttattgtggcatacatggataaggcacaaggatatgcagataaagctaccattcatattagattagccaaacgttcggcaactcatccagaaatcctagagtttggaagtttagaagactttaaagaatataaaggtgatttggaagatgaaatagggatagtatttgcaaattacaaaatagctgaaggaggaagtgaagaaaaagagaaagaaaaagaagaaaataatgagatgcggaataagcaagaaacaaataaaccgaacatagaactccctgctcttggagcaatcggtgtaggaggagttgggttactacttatcatctcagcttacttattgaaaaagtatcgtggaaagtag

SEQ ID NO: 537 - DNA, 780 bp, Lactococcus lactis
atgagcgagattataaatcatattaccgcttttcaaccagtctatcgtgtgcttaaccgtgaagaaaatttagatttctaccgtgaagtgcttggatttaaggtcttggtagaagaaggcgcaatggtatggcttggtgggcatgaagcgaaaaaagatcggtttcaattagaagaatcaccaggttttcgtcctgttgaaggattgaaaaaacacgggcaaacggtgatcaaagctaattcatctgagattgagcaattaattgttcgtaacttggacaagatttctaaggtctataaaggaaaaaacggctttgctttttcagcactttcgcctgaagcagaactttttttggtaacatcagatttactgacagatttatcatcactgacagaaattgataaatcagaaattgaacttgaggaagataaaacttttaaaggtttgtcagattttgaaattatagcaatggatttgaatgttgctgaccaatcaattattgaattttatgaatcagtttttggtcttaaagcaatcaataaccaaattgaatttccttttgtaactttgacttttagtgttgaagaaagcgaagatttagctgcaggaaccgatgaagtacttgaccttgagtttttagtgttcatgattgataaagattttgatttgaaagattttgctcatcaattttctgatgtggacggaacatatttggatggctcagctaaaactttttcattagaagttcctgaccatgtagaactttggtttgtaaaataa

SEQ ID NO: 538 - DNA, 843 bp, Lactococcus lactis
atgaaaaaaataaaattgttgactcttgcaacagttggaattgcctcaattggcttacttgctgcttgctcgtcaaaagataattcatcttctaaatcaacagataaagtaacaaccgtaactgttgcaacttctgccgcttctgtcccttatgaatacagcgaaaatggcaaaatgactggttttgaatatgatattttaaaagctgctgacaaagacatgaaggattataaattcgactttaaagtctatgaagatagtgcgattttagctgctttagacggtggtcgtgcacaaattgcggcaaataattttggtaagacaaaagcacgttctgaaaaatatctctttagctatcctgttcgccaaggaattgatgcgattttctcaacatctaaagaaaatattacaaaaatctctcaacttgctggtaaaacgacagaaattcctgctggaaccaactatggtgatatgtttgaaagctggaacaaaaatcatccagacaaaaaaatcaatgtaaaatacagccaacgtcctttagccgaccgtttatctgctatttctagtggacaaattgatttcttatttgcttctaaagcacccgcagaaaatttgattaaagaacatgcaatcacaggtttagtggatactgttccaacagacttggataaacaaccagaatttaaaacttatgattactttattcttgataacagccaaagcaagttgcaaaaagatttgaatgttgagctcaaaaaactttacgacaacggcacacttaaaaaactgtcagaacaatatttccatgacagccatattccagctgctgaccaattcaaataa

SEQ ID NO: 539 - DNA, 495 bp, Lactococcus lactis
atgaatgaaattacttatactcaaattatgccaaatgatatagatgatgtcatccgtattgaaagagctactttctcagaaaatgaagccctctctgtagagtcaatgatcgaaagaattaacttaattcctgatagctttatcgcagcaagaaatagtgaaggaactgtcgtaggttacgtttctggtcctgttacagaaggtcgttacttggatgatgaatcttttgaacgtaccgaagccaatcccaaaacaggtggtttccaaaaaatcatcagtttaaccgttgaccctgattatcaaggcttaggaattgcgacaaacttactccttttacttgaaaaagaagccaaatcgaaaaaacgtttgggaattagtcttacttgccatgattatttagttccctattatgaaaaacacggctttactaacgaaggactttccgagtcaaaattcggtggagaaacttggtacaatatggtcatggaattttaa

SEQ ID NO: 540 - DNA, 1086 bp, Lactococcus lactis
atgcgtcgttggattattcatcttgttatgactgtcatcggagcatcgctaggtgttgctgttgtaccatcaattttaaaggtatttggttgggacacagggattttgcagaacgaagctgttgacgctgtgattggtgcaattatttttattattctttcatttatatttgccggttcaatgcttaatgggttgaaaaaaatagattctagaatttccaaaatgaatatgtcaaaaatggtcttcaatattattgggattgttcttggtcttctcgttggggttattggaagtattccattaagatttttaaatgttcctattttaagtaatatcatttcattcatacttgttttggtgatgatttatttgggatatgttttgtttgatcgacgaggagacgaaattgctagagtgctttttcgtaagcgccgtgaagcaatggcaactgaaccagcagaagttgctgaggaagttgtcggtgaatctaagagtgataatagtattttattggatacaagttcaatcattgatggtcggattttagatgtaattaaaacagggttcatttcagataaaattattgttcctaattttgtgattttagaattacaattaatttctgatagttcagacccactgaaaagggctaaaggacgtcggggcttggatttggttaatgaattgactaaatttgatcaagttgaaatttctcaagttgattttgcagatgttcgagaagttgatactaaacttcttaaatatgcaagttctactggctcaaaattagtgacgaatgattttaatcttaataaagttgctgaaattcagggtgttcaagttcttaacattaatgaccttgctaatgctgtgaaaacacaacttgttgtgggcgaacatattaacgtacaaattattcgtgctggttctgaacgtcaacaaggcgtggcttatttgccagatggaacaatgattgtcatcgaagatactgcaaaattgattgataaaacagttactgttgaagttgctaaggtgctacaaacaagtgctggtcgaatgatttttgctgatttagtaaaaaaataa

SEQ ID NO: 541 - DNA, 210 bp, Lactococcus lactis
atgaagtataaattaaacccattatttacgctcagaaaaacagataaagcagtcttcaatttctcaagggcggaattaacacaattcaacgatacaggttttgatattttattggcagttcttgaacaagaaagtgatagagagtggacagatgatgaagatgaatttctgaaagagttaatcaaggagaaaatcgttgaagaatcttga

SEQ ID NO: 542 - DNA, 474 bp, Lactococcus lactis
atgaataaaaaatcgagtgctcttttaactatgggaactttaacgcttctggcagatggcggggttgttttaacaaacctccccgactcttttaaaatacaacgggtttatgccgctacttccagagatataacagtctattcaaaagattttctaacttatttccagagaaatggttcagctgctgggtttgattatgatttagctacctatactcaaactctaacacctgaccttggaaatcaagcgggaaatgtaactctgaaaacaaaagttgatatgtcgcaaaactttacttttactggacaaatcaacttagggaataaatcacagcaaaatggtggagctgatggtgttggtttcctttttcatcctggtgatacaagtgtagtaggggcaccgggtggagctgctggtttggtggtgttaatggagcatttggttttaagctggatacttactataatggagtag

SEQ ID NO: 543 - DNA, 309 bp, Lactococcus lactis
atggcattttctaacactagacgacgctacgcaagttttgataccgttgcgtcaattcctggagaagtcattgatgccttttggtttattattgaccatcacctcaagggcgtttttccactagaaacaattatcaattttgacttggttaattcgggtaatttactttctattcgtttttctcaagacaatagtccaacaaccatcctcgttgattttggctacccttttaatcctgaatggcctctacactaccgagccgttgataatatgggacgcgaaacgatcatgactgcaagagaaatgtaa

SEQ ID NO: 544 - DNA, 441 bp, Lactococcus lactis
atgaatcatattccagttttcggtgaaaaaaatgaagagaaaaattatcaggcaagatatggtgtctattcgattgtcgcaagagagaataaagaaatttgtctcgttcaggcacccaatggagcttattttcttcctggaggggaaattgaagcgggtgaagatcaagaaaaagcacttcatcgtgaactcatggaagagttaggagctaccgctgaaattggagaatttttagggcaagcagatgaatatttttatagttcgcatcgtgataaatattattataatcccgcctatatttataatactaagaatgtccgctttgattccaaacctctcgaagattttaaccatattagctggtttgacccagaaacagctattagtaaactcaaacgtggctctcataaatggggagttcaagagtggttaaagaaataa

SEQ ID NO: 545 - DNA, 666 bp, Lactococcus lactis
atgaatagcagaatattccaacacaatacttttacgacactttctagtggtttttacaagggaacgattaccctcaaagaagcactagaacacggatcagtcggtatcggcacacttgatactgcaaatggagaagtgaccattatcaatggaatcgcttatcacggggactcagaaaatcatgtccgattagttgaagaagatgagacaatgccttatgtggcaatggtcgaacatcagccaatcgcaaagtttactgacagctctgtcagtaattcagaagattttctgtcagcactgaccaagcgatttccaacagtaaataccgcttatactattgttatgactggtcaattcaaagaagtgacagtcagtagcaaaccagccaataacactcgtccttatgacgaaattatggctgaccaaccttattttacaaaagaaaatatttctggaactatggttggagtttgggcgccaaaacatttgactgacctttttggtcttggttttcacttacattttgtcagtgatgataaaacttttaccgcacatgtccaaaatttcattacagaaaatcttgagattgaaattggtaaaataaccaaaattgaccaagaatttcctgacgatgatgaaaactttgaccagcacttatttcaataa

SEQ ID NO: 546 - DNA, 393 bp, Lactococcus lactis
atgacaactactaaaaaaatgattgctgccgcacgcgaagcggcgagtttggcatatgttccttactctcattttcctgtaggagcagcttttcatacaactgatggtcgaattatcacaggttgtaatattgaaaatgctagttttggactttctaattgtgctgaacgaacagctatttttaaagcaatatcagaaggcctgaaagattttgatgctctttatgtattcggagaaacagaagaaccaattagcccttgtggtgcttgtagacaagttattgcagaattttgtccagcagatatgccagtttttttgatttctaaaaatgataatgtaaaagaaacttcagttgaggaacttttaccatattctttcaaaaatcttgattaa

SEQ ID NO: 547 - DNA, 930 bp, Lactococcus lactis
atgaaaattggcctagtaaaaacaaacttcccaggagagagacgagtcccacttctaccaaaagacattaaagattttaaaaatgaaatattagtagaggaggggtttggaaaatttttagatattgatgatcaagaatacattgataaaggatgtcatattttatcaagagctgaggttttttcggaatcagaggcaatcttctcactaaaactcatccagcctactgattacccttatcttagagaggggcagatgattatagggtggacacatccttttggttcaggacgattattcatgaaagagcaagctctacctaaaaagttaattgtagtagatttagatagtaattcaccttgtatttattatgaaaatgagatatttgaatcaggtattccgaagggacttttatataaaaatagtttttacgcaggctatgcaggtgtccttgatgctttattgcaatatggatttattccaactgaagagacaaaaatagctattttaggttccggaaatgttgcacagggtgcctttagtagtatctcaaaatattcctcaaacatccgaatgtattatcgaaaaacaatgtccatcttcaaagaaaattatacaaagtacgacatcatcatcaatggaattgaaattgggaaagaggatgatccaattttaagcttttcagaacaaaaatcattgaaaaaagggacttttattattgatgtagcagctgatgctggaaatactattgaaggaacgcattttactagtatggatgaccccatctacgaaaatgatggaaaatactattatgttgttcctaatactccatcactgatctaccgaaatgtgagtcaagatttaagtaagattttgagcgagaatatctttagtgaagattgttcacgatttttaagtattaaatcttga

SEQ ID NO: 548 - DNA, 1479 bp, Lactococcus lactis
atgatttcagtgaaaaaacgtagagaaattaaggtttttttggtaacagcatctataggaattgttgtgttaggagggcaacaagtcttagcagatgcagctagtgaaatggtcaatccaaaagataaagtgcttgtaggttattggcacaattggaaatcaacaggaaaagatggttataaaggaggaagttctgctgacttcaatctttcaagtacacaagaaggctacaatgtaattaatgtttcctttatgaaaacacctgaaggacaaacccttcccactttcaagccttataacaaaaccgatactgaattcagagccgaaatttcaaaattaaatgccgaaggtaagagcgtcttaatcgctttaggaggagctgacgctcatattgaattaaagaaaagtcaggaaagtgattttgttaatgaaatcattcgtcttatagatacttacggctttgatggattagatattgatttagaacaggctgcaattgaagcagcagataatcaaactgttatcccatccgctttaaaaaaagttaaagaccattatcgaaaagatggtaaaaactttatgattacgatggctccagaatttccttatttaacaagttcaggaaaatatgcaccatatatcaacaatttagattcgtactatgatttcatcaatcctcaatactataatcaaggaggagatggtttctgggatagtgatttaaatatgtggatttctcaatcaaatgacgaaaaaaaagaagattttctctatggtttaactcaacgtctcgtaacaggatcagatgggtttattaaaatcccagccagtaaattcgttattggtctaccatctaataatgacgctgctgcaacaggttatgtgaaagaccccaatgccgtaaaaaatgcattgaatcgcttaaaagcttctggtaatgaaataaaaggtttaatgacttggtcagtaaattgggatgctggaaccaattcaaatggcgaaaaatataataatacttttgtaaatacatacgccccaatgctctttaacaatcaaccgattgaagatactgaaaaaccaaccttgcccacaatttcaattagtaatgtgactgcttctactgccacgattcaaggaaaatctacagacaatgttcgcattgatcactatgaaattaagattggtactcaatcatttaaaagtacttccggcttacaagatgtgactggattatccaaaaaaactgaatacaatgttgaaattgtagcagttgacccttcaggtaatcgttctgatacggccagagctacatttatgacactggacacatcagcggaaaataatacttggcaaaaggataaagtttatgttcaaggtgatcgtgttacttttaatggagtaaattatgaagcaaaatggtggaatactggccaactacctgaccaatcaggagattttggtccatggaaaaagctataa

SEQ ID NO: 549 - DNA, 990 bp, Lactococcus lactis
atgttgacagcaattgatgaaaatggacaagtagtaaacttattagaaatagaagtaaaagaactgacaggaaaatatttttgtccttcttgtaaatcagagttatttataaaaaatggtgaaataaagatgcctcactttgctcataaatctctcaaagcttgcgacttatggcttgaaaacgaatctgaacaacatttaggattaaaaaaagcactctatcaatggtttaaaaaaactgataaggtggaaattgaagcttatattcctgaatttaagcagaggccagatttattggtaaatgatacaatagctattgaaattcaatgttctcatctttctatgaaacgtttaaaagaaaggacagagaattatcaagtccacggttttacggtactttggcttatggggcaagatttatggttaaaagaccaaataacagaacttcaaaaaaatctagtctatttttcagaaaatagaggtttctattattgggagttagatttcaaagctcagaagatgagattaaaatccctgattcatgaagatttgcgtggaaaaattatttatttacaagaagaaattccttttggggaaggacgacttattgagcaattacgactgccttttttatcacaaaagttactgacaataccacttattgttgatcttaaactagcggaatttattcgtcggcaactttattattgttcaccaaaatggttgaaacttcaggaaaaatattaccaaagaggtgaaaatttgttgaatttgacttttgaacgttcttttattgcgcctttggggttgaacttacttgaagtttttgatgatgaaatccctttacataaatttactcaaattaagcagaatattaatctctattatgaaaactttttaataaattttcagcaaaatagctttaaggcagtctatcctccccgtttctatgttataatgaaaaagcagaagaaggatatgaatgaatga

SEQ ID NO: 550 - DNA, 666 bp, Lactococcus lactis
atggacattttatttatatttttaattggaagtatttttggctccttttttggcttaatagttgaccgtattccactaagaaaatcaattatttttggacgctcacattgtgattcttgtcagcaacttttagcctatcgtgatctaattcctattttttctcaaataagctctggctcacattgccgttattgtaaaagtaaaattccatatttatatgtttttttggagttctcatcagctttaatttttgttttagcttgggtaaattatcttaaacctagtcaatttttactgattattctttcactaattttatctgcttttgattatcgtcagcacagttttccttttgttatctggtttatttttgcactcagttttattttaatatttcctctttctccccttttctatttttggcttattttagccgtcttagctgaaaaattcaatttaagagttggcagcggtgattttttatggttttttaccgcttcattttctctaactttcttaaacgaaatgctgctccttcaaatcgcttgttcacttggtatcatttattatctaatcacaaaaaaacgagttgaaattgccttcatcccgtttctaactattgcatatctaatgttgctttttgggcaccaaattctgtcaccgtaa

SEQ ID NO: 551 - DNA, 651 bp, Lactococcus lactis
atgataaagtgtttgctttgttcaagaaatattgctcaaaactttctatttagtgaacttttcctactcaaaagtcctcaaaatcttttatgttctaaatgtcaaaaaaattttgaaaagatccctgaagctcactgtccttgctgctgtaagccaaatgtccatgagatctgtactgattgtcaaaattgggaaaaaagaggatacaaaatcagacatcaggcaatttttcactacaatcaagcaatgaaagattattttagccagtataaatttgttggagattatcgattataccaaatttttgagccctattttaaaaatatttcccaaaaatctcctttggttccaattcctatttcaccaaaaagattagaggaacgtggtttcaatcaagtgactgcttttcttcaacaagataattttattgaacttcttgaaaaagagaattcggtcaaacaatctagccttaatcgaaaagaacgattggaaagtccaaatccttttcgattaaaaaaagggctaaaagtccctacaaaagttatattaattgacgatatttatacaacaggtaccaccttatatcacgcatcacaaattctaaaagaagctggtgttcatgaaataaggagcttttctctctgccgttaa

SEQ ID NO: 552 - DNA, 2088 bp, Lactococcus lactis
atgtcaaataaaactcattcgtctaatcacgatgaaatgatgtctgagcatcatcataatcatgaaataatggatatggagcacgaaaaccatgagatgcacaacatgcacaatatggataatatgcatgatatggacaatatggatatgatgaatcatggaggacacatgatgcatatgggtgatatgagtaaaaagctcaaagtggctatcattcttatgattccgctactactcatttcaccaatcgctggctttactatccttaaattccccggaagtgaaattttgcaacttatacttggtacaattatcttcttttactctgggactcctttttttagcggagcaaaaggtgaattaaaaagccgtaagccagccatgatgatgctgattacaatgggaattaccgttgcctatgcttattctgtttatgccacaattatgagtcttaacggacatatgggcatgaacttctggtttgaactggcaactttaattgtcattatgttgattggtcacctgattgagatgaaagcaatcatgggtgctggcgatgcattgaaagatttagcaagccttgttcccaaaaaagctcacttaaaaagtgggaaggatgtggagctttcagaactaaaagttggcgatttgcttttagtgaaagaaaatgaaaaaattcctgcagatggccttatattaagtgaagcgctcgttgatgagtcaatgattactggtgaaagccgagcagtcaataaaaaaacaaatgaccttgtttatggtggttccctcaatcaaaaccaaccatttgagatgaaagtcacaacccttggaaaagattcatttctcaatcaagtggccgaattagtcaagaaagcccaagctcaaaaatctaatttggaaaatatggctgacagagtggctggttaccttttctatgctgcacttattgtcggtatcttctcattaattttttggacaattagctctaactttagttttgctctacttcttgcggtttctgtttttgtaattgcatgtccacacgctttaggtcttgcggttccacttgttgtttctcgcctaaccagtatttctgctaaaaatggtttattaattcaaaacagaacttctctagaaaaaataaatacaattaaatatgccttaatggataaaacgggaacattaactgacggtaagtttattgttcgtaatgttattgattttactgatgaaacagacattctccaaatcatggcagcacttgaaggaagttccactcacccgattgctcaatcaatcgttgcagctgctaaacctcttggaaatctaaaagttgaagcggttgaaaatattccaggagttgggattaaagggcaagttaatcaaaacttttatcaaattgttaactataaatatcttcgtgaaaatcaactttcttatgatgaacaaaagattgctcaatatttagatttaggtttaactgtatctttcctaatcaatgaacaacaagatgttttaggatttattgccttaggagattctcctaaagcagacgcgaaagcctttattaatggtttattagcccaaggaattacccctgttatgctcacgggtgataataaagaaactgctaaaaaaattgctagtgcactaaatattcccgaatttagagcggaattaaaacctgaagataaagcagaaattgtgaaagagtaccaaaagaaagccggcgtgcttttcattggtgatggtgtcaatgattccccagctcttgcaactgctacgattggttttgcgattggagcaggaacttcggttgctatcagtaccgctgatgtcgtcctagttaactccaatccaagtgacgtcttggatatgattaatatctccaaacgcatgcttagaaaaatgaaacaaaacctctggtttggagcaggctataacattattgctattcctgttgcagcgggtattctttatccatttacagggatttatattgaccctctcattgcagcagtcctgatgtcaatctcaaccgtgattgtctcaatcaacgcgatgggattgaggtatgataaaaaatag

SEQ ID NO: 553 - DNA, 747 bp, Lactococcus lactis
atgaacaaacgaacaattttgattaccggtgcaacaaggggaatcggctgggcaattgctcagaaagctgctcaagccaatcacaaagtcattttaactggccgtgacccacttagtttaaaaagtagagctgaagaattgaaaaaaaaatttcccaaaacagaaatccaagctattccactagatgtttctaatcgctctagcgttgctaatgcagccaaattaataaaggatattgatattctaattaataatgctggaattactgctgatagtacttttaagaaaatgagcccagaaatttgggatgaagtcatttctgtcaatttgactggtgtatttaatagtactcacgctttgcttgataaaatcaatcaaggtggacaaatcattacactaacttcaaaatcagctttatttggtaactttgggcaagcaaactacgcggcgtccaaagccggcatcattgcttttacgaaaacactagctaaagaattgcaaaaaagtatgatacgagtaaattctgtttctcctgctgccgtaactgatatgactctaccagtattaaaaagtttaaaagaaacttatggtcagaatatccctgatgaatggaaaatgggttcaagctctgatgtcgctaattttattattaatgatttaattgaaagcgaaatgacaggcaaaattttttccattaacggctctgagattggctattggcaagaacctacatttcataaactttaa

SEQ ID NO: 554 - DNA, 1923 bp, Lactococcus lactis
atggataaaaaatattatcaattactaaaaaaccagttttcgtcaaaggaagcagtactgacagaaattattaatttgagtgctatttgtgaactaccaaaagcaacagagcattttatgagtgatgtgcatggtgaatatgatgcttttaatcatgttttgagaaatggttctggcagtatcaaagaaaaacttagagattgttttccagaattttctgcgacagaaatatcatcacttgcaaccttgatttattatccacaagaaaaactagattctgagtgtcaactaaaagagacagaagaatttgagaactattgtcgaatcaatttagtttatcttttaaagactgtaaaatttgtcggtcaaaaatatactcgttcaaaagtccgaaaagcttttccagaaaaatttcgatatatcttagaagagttaatcaatgaagtggattcgacgactgataaaagagattattttgattcaatcctttcgcaattgcaaaatttgggtgaatttactcgcttaattgttgcacttgcagatacgattcgcagattgacggttgaccaccttcatgtggtgggagatatttatgatcgaggaccttatccagataaaatcattgaccgcttaataaaaatgccctcagttgatgttcaatggggcaatcatgatattgtatggatggcagcttttagtggttcacctttagccatgatgaatgtaattagaatctgtgcccgctatggaaatctcgatattcttgaagaatcttatgggattaatttacggatgattttagagtatgctgaacgttattatgagccaagtgaggcttttcaaccacgtttggtcgaaggggttcgtttgtcagacgatgaaaaggcgctccttaataaattacaagaagccacagccattttacaatttaagttagagagtcagttgataaaacgccgacctgattttcaacttgaacatcgtgatgtccttcatttcattgatttttccgaaaaaacaataaaattgggaactgaagtttatgaattaactgattttcaagcgcccacagtaaatcctgagcagcctgaaagtttgactgctgaagaagaaaaaataatcagtcatttattaaataattttagaagttctgataaacttaaacgtcatgttgaatttttacaagaaaagggagctatgtatctttcttacaatggaaacttgttgattcatggctgtcttcccttacatgaaaatggtgattttaaatcatttacggttaacaaagaggctcatgctggccgtgatttgcttgatttctttgaccaagaggttagaaaatgtcttgctcatccagaaaactcgacggatttagcaacagatttgatgtggtatctttgggtgggagaatgctcttcattatttggtaaaacggcaatgacaacctttgaacgctattatatcaaggataagaaaacgcatgtggaaaagaaaaatccttattatcaattgcgtgaggaagctgaaattatcaggaaaattttagaaaactttggtttagatgaagggggacatttggtgaatgggcacacccctatcaaagaaaaaaatggtgaaaatccaatcaaggcagatggaaagttgattgtgatagatggtggttttgcaaaagcttatcaaaaggaaacaggaattgctgggtatacaattctttataatagttttggcattcaactggttgctcatcaacccttttcaaccgttaaagaagcagttgaaaaagggacggatattattagcctgaaatgcttggtagccgaagttgaccaaagaaaacgagtcaaggatacaaatgttggccaaactttgttaagtgaaatagcagatttagaagtactttttgaacattatgaggaattttaa

SEQ ID NO: 555 - DNA, 1302 bp, Lactococcus lactis
atgtataaaatgtggcaaactcgagttttaatttcgacggcattcgtttatattggttattatattattcgattgatctttaccgttcaacaaaatgatatttccaaggcttatggtttttcgatgggacaaattgggacaattctctccatgtttgggattggctatggaatttcaaagcttattatgggaacattagctgaccgggccaatccaaaccgttatgtggcaacaggattgattgtgtcagcgattatcaatgcgctttatggaacaacccaaagttttgggatgatagtctttctgatgttgcttaactcggttatgcaaggtatgggagctgcggcttgtcagcgtttagtcggtttatggtttggccgaaaagcaaaaggttcgattatggcgcgtgggacagcattttcaatctggtcatcagctcataatgctggagctttcatgtgtgtggctgtcattaatttatctgctttctttttcggcgcttcgcttcaatggagtttttggacagcatcaattgtttcgattgtcattgctattatcgttttatttctgggttctgaccgtccaacgacgaaaggattaccgacaattgaagaatattctggcgacaaagtggtcattaaagacggagaaattgttgaaggcgatgtttctaatgacaatgtttttaaaatattttttgaatacattgtcaaaaataaactcgtgtgggcggtcattttgacctcattgtcaatctatgtcgttcgttatggaattatgagttggattccaaactatctggttaatatcaaaggatttgataattcaacagcaaaatggctgacaggaatttttgaacttgcagctgtacctggggttattatcatcggatttatcactgatttacttaaaggtcgtcgggccattatggttttggtttcattgattgcaatgcttgcctgtctgattacttattttgcagcgaccaatcatactttgattattattgtgttattaattatgggaactttcatttatgctccagcaacaattgtcgggctgatggtcaatgaagctgtcccaaaatttgccaatggaatgtcaacgggtacgatggggttctgtcagtacattattggtgaagtgacagcaactctggttattggttggcttgttcaagcatacggctggtcagcaggaaatatcattgtttatatttttgccggcattgccattcttgcttcaatttatatcttggttcatcaaaatcgattatataagaaaattgatgatgcaggctaa

SEQ ID NO: 556 - DNA, 861 bp, Lactococcus lactis
atgcccccaagctttgaatatacacaactctatacagcacttgaaagtaatggaaaaacttttaatcaagaaaaaatgtttcagtttatcaaacatgagggacaatcaattacacttcgttatgattttacacttcctttagttagactctattcgcaaatcaaggattctactagtgctcgttattcatattttggaaaaatatttagaaaagaaaaacggcataaaggtcgttcaactgaaaattatcagattggtattgaactttttggtgaatcagccgataagtcagaattagaaattcttagtttagcccttcaagtgattgaacagttaggtttgaataaaacggtctttgaaataggctcagcaaaattttttcaacgtttatgtcagttagctgatggttcaacagagttacttacagaacttttactcaagaaagatttgagtggcctcaatgcttttatcgaaaaaaataatttttctaaggaattgagaggacttttaaaagaaatatttattactaatgagttatcaaggttggaaaatttagtgacaaatacaaaagatgatgtgctcatttcttcctttgatcagctcaaagagttttcagaaaaactttcaatgattaaaccgattatcattgatttgggaatggttcctaaaatggattattatactgatttaatgtttaaagcttacagttcagcagctaatcaacctattttatcaggaggaagatatgaccaactattaagtaattttcaagaagaggcgtttgccattggtttttgttgtcatatggacaccattctaaaggctctggaaagacaagaattggaggaagacaatgattaa

SEQ ID NO: 557 - DNA, 543 bp, Lactococcus lactis
atgcatccacatttaaaagaagttttatttaccagagaacaaattgccgaacgtgtcaaagagcttgcggaagttgtttcacgcgattatgaaggaaaaaatccacttgttgttggaatattaaaagggtcaatcatgtttacggttgatctgcttaaagaattatcaattgatgctgaagttgattttatggatgttaccagttatggttatgggatttcatcttctggagaagttagaattttgaaagatttatcaaccgtggctcatggacgtgatattttgattgttgaagatatcattgacactgggaatactctgctctatcttaaaaaattgctgacaggacgtcaagcacattcagtaaaaattatctctttattagataaaccaagtggtcgtaaagttgatattgacgctgattatgttggctttgaagtaccggatgcctttattgtgggctatggaattgattatgccgaacgttaccgtcagttgccatatattggaattttcaatgaagagtttttaattaaagactaa

SEQ ID NO: 558 - DNA, 1755 bp, Lactococcus lactis
atggccaatcgtatcgaaggaaaagcggttgacaaaacatccattaaacatttcatcaaattgattcgtgctgcaaagccacgttatcttttctttatcattgggattctagcaggaatcgttggaacactaattcaattacaagtccccaaaatggttcaaccacttgttaatagttttggacatggagtaaacggtggcaaagttgccttagttatcgctctttatattggttcagctgctgtttcggctattgcagcaattgtccttgggatatttggtgaatcagttgtaaaaaatctaaggacgcgtgtctgggataaaatgattcatctgccagtaaaatattttgatgaagttaaaacaggagaaatgagttctcgtttagccaacgataccacccaagttaaaaatttaattgcaaacagtattccacaagcttttacgtctattttacttttggttggttcaattgtcttcatgcttcagatgcaatggcgtttgacccttgccatgattattgctgttccagtagttatgctcattatgttcccgattatgacttttggccaaaaaattgggcgaactagacaagattctttagcaaatttccaagggattgctagtgaatcattatcagaaattcgcttagtaaaatcttcaaatgctgaaaaacaagcctctaaaaaagcagaaaatgatgtcaatgccctttataaaattggggtaaaagaagccatctttgatggtttgatgtcaccagttatgatgttatcaatgatgctgatgatctttggacttcttgcttacggaatttatctcatctcaacaggagtcatgagtcttgggactttgcttggaatgatgatgtatttgatgaacttaatcggcgccgtaccaactgtggcaactttctttacagaacttgctaaagcttcaggatcaacaggtcgtttgaccgaattacttgatgaagaacaagaagtacttcatcaaggagaaagtcttgatttggaaggaaaaaccctctcagctcgccatgttgactttgcttatgatgattctgaacaaattttacgtgatatctcttttgaagctcaacctaattcaattattgcctttgccggaccttcaggtggtggtaaatcaacaattttctctcttttagaacgtttttatcaaccaacggcaggagaaattacaattgatggtcaaccgattgataatatttctttggaaaattggcggagtcaaattggttttgtcagtcaagattcagcaattatggctggaaccattcgtgaaaatttaacttatggacttgaaggagactatacagatgaagacctttggcaagttcttgacttagcttttgcaagaagctttgttgaaaatatgcctgatcaacttaatacggaagttggtgaacgaggtgtgaaaatatctggtggtcaaagacaacgtttagcaattgctcgtgctttcttgagaaatccaaaaatcctgatgcttgatgaagcaacggctagtttagatagtgaatcagaatcaatggttcaaaaggctttagatagtttgatgaaaggtcgcacaacgctcgtaattgcgcatagactttcaacaattgttgatgcggataagatttacttcattgaaaaaggtcaaatcacagggagtggcaaacataatgaacttgttgccacacatccactctatgctaagtatgtttcagaacaattgactgttggtcaataa

SEQ ID NO: 559 - DNA, 1683 bp, Lactococcus lactis
atgaccaatgaatatttagctccctttgttgatgaacttttcaatttaggggtacgtgaagctgtttttagtccaggttcacgttcaacggctttagccatgctctttgaggaatacaaaaaatacgatacttatgtcaacattgatgaacgttcggctgctttttttgctctgggaattgctaaagcgaaaaaacgtcctgttgttttagtttgtacttcaggttctgctgcggctcatcattttccagctgtccttgaagcaaaaatgagtcgagttccccttattattttaacggcggacagaccggctgagcttcaattcgttggagctcctcaaacagtcgaccagaccagattttttggaaattttgttaatcattttgaaaatcttgaagctccacatattcaaaagcagtctcaaacagaaaacttttggacctatccacgtaaagtcgcacaacgagctgtcttatcagctatttcccctctttcgggtcctgtgcaaatcaatgttcccttgcgtgatcttttagttccagaattaaaaagtgaaaattatgaaaaaggacgttctaaacatgcctttaaattctatgagggacaagcacaagtaatacttccatttgatgaagcattgctttctggaaaaacattaattttagccggtgccaattttgacaaagattattctgaagcacttttaaaacttgcggaacaattaaaagctccaattttagcggatccactttctaatctgcgtaatcataatcatcctttggtcatagactcttatgatgcttttttagcaaataatgatttaaaaactcaattaaaagcggatgctattctgctttttggacaaatgcctgtttctaaacgtttgcaacaattcgttgctttcaataacgaagctgaatttattcaagttgaccctgctcttgattatcgcaaccctagtttgacaacgacaacgatggttcagtctgatgttctcccttttgcttcttcaattaaaaaagtaaattctgatagttcttatttggaaaaatggcaaaatgctcaagaaaaaatgcgacaacttcttgaaaaagtgacttatgaagaaagtccttttgaaggacgttatgtccaagaactacaaaaacatttggaagcgctggatgctcaacttcttgtttcaaatagtatggaaatcagagatattgattattggtggaaaaaagcggatgccaaagttagaattttaggaaatcgtggtgtgaatggcattgacgggactgaatcaactgcactcggaattgctacaacgggtaaaccgacggttttattgactggggatttgtcaatgctacacgatttaaatggtttaattgttggtaaaacacatgaacttaatctgactattgtgctatttaataatgacggtggtgggatttttcatcatttagctcaaaaaggcgtaccgaattttgattatcttttttcaactccacatggtttaaattttgctggactggctgagttgactggtttagattatcatttggtcagtggctatgctgattttggtcagcaatttgaagcttctcttcatcaatctggcattcatcttttggaaattaaaacggataaagatttaagtcttgctttacatcaaaaatatacaacttatgaaaattga

SEQ ID NO: 560 - DNA, 1263 bp, Lactococcus lactis
atggctgaacatttggccccccttattgacaatcaatcacgggttgcgctcctttcagaaaactctgttgaaatggcagtcgttttgtttgccttgctcggtttgtcaaaagaggttcttcttttgaataggcatctgaccgaatacgaactggctgaccaaatcaaggaactcaaaattgacaaagtctttacttcggatttactgacagaaaaagttactgacagcatttctttttcggaaatttggactagtaacccttgccctgtaagtctgtcagcagattttcctgatgaaaaaattgcagtcatcatgaacacttccgctactaccggaaaatttaaatctgtccctattacttggggcatgatttcaaatcacgtcaaagcctcaaaggaaacgcttggcgcttatgacaatgataattggcttgtcatcttacctatgtttcatgtctctgggctttccattattatgcgtactttatataatgcaacatcagcgaccgttgttgataaatttgatgaaaaccaacttcttgaaatgatcaattctgggaaaatcaacatggtttcactcgtcccaaccctccttacaagaattgctgacaaattgcatagcaataacttacgtttaattctacttggtggtgaatttattccccaacctttaatcaaaaaatgccaagaattaggtcttcctatttacaaaacttatggaatgactgaaagtttttcacaatctgtcacttttaatattttagatttccctgataaaacaagctctgtcgggcggcctttaccaggtgttgaaattgagattcgtcaagctgaccttgctggcgttggtgaaatttggttaaaatctccgatgttgatgaaagcttacctaggccaaaagccttacggcacagcttttgaaacaggcgatattggttatcttgatacggacggttttctctatctgctcaatcgcagaaaagatatcattatttctggcggtgaaaatatttaccccaaagaaatcgaagatttagtttattctcttcctgaaatcaaggaatgtgcacttgttgctaagccagatgccaagtggggacaagtgccaattctcttcgtttcaggcaatatttcccaagaaaaattagaaaactttctcactgaaaaactggcaaaatacaaacgaccacaatccatcactttcatggatgaattgcccaaaaatgcttctggaaaaatcttgagaaaagagcttaaaggatga

SEQ ID NO: 561 - DNA, 1089 bp, Lactococcus lactis
atggataaaagattagatactttattggcgcaagtcggaattcatcaagatgaggcaacgggagctttagttagtcctttgcatttttcaacgacctatcaacatccagaatttggccaatcgactggctttgattacaccagaaccaaaaatccaacaagagcaaccttggaagaagcacttgcttcaattgaatcaggacaatttgctctagcaacttcgtcaggaatggctgcaattgtcttggccttttcagttttcccaatcggttcaaaaattgttgccagtcgagatttgtatggaggttcatttcgctggttcgatgaacaagaaaaagagggacgattttacttttcctatgctaaaactgaaaaagaaatgcttgagctaatagatgaaaatactgatattgtttatattgaaacaccgacaaatccaatgatggttaaatataatattgaaaaaatcgccaataaagcacaggcatatcatgcaaaagtgattgttgtcaatactttttataccccaatttatcaaaaaccattagaattgggtgcggatttagtgattcattcggcaacaaaatatttatcaggacataatgacgtcttggctggagcggtcattgtttatgatgaagaactttatgaaagattattatatcagctcaatactactggagcagttctttctccatttgacagttatcttgtcatgcgaggtttgaaaactttaagcctcagaatggagagggcaactaaaaatgcccaaaaaattgtgactttcctaaaaaaacttccatcagtaaaagaagtactttactcaggattaggtggcatgatttctctaaaagttactgacaaaaccaaaattcctgctattttaaatcacttgggcgtttttacctttgctgaaagcttgggaggtgttgaatctttaatcacttatccaacagcgcaaactcaccatgatattccacttgagattagagaaagttatggtttaacagatgatttgcttcgcctttcgattgggatagaagatgttcgcgatttaatagaagatctcaaagaagctttagaaaattaa

SEQ ID NO: 562 - DNA, 1143 bp, Lactococcus lactis
atgacaagtataaaaacgaaagtaattcatggtggtatttcaacagacaagacaacaggagcagtatctgttccgatttatcaaacgtcaacttataaacaaaacggacttggacaacctaaagaatacgaatattcacgttctggaaatccaacgcgtcatgccttggaagaattaattgcagatttagaaggtggtgttcaaggatttgcatttagttcaggacttgctggaattcatgcggttctttcgctattttctgcaggagatcatatcattttagctgatgatgtttatggtggaactttccgtttgatggataaagtgctgacaaagacagggattatttatgatttagttgatttgagtaatcttgatgacttgaaagcggcttttaaagaagaaacgaaagctatttattttgaaactccttcaaatcctttattaaaagttttggacattaaggaaatttcagcaattgctaaagctcatgatgccttaacactggtggataatacctttgcgacaccgtatttacaacaaccaattgctttaggagctgatattgttttgcattccgcaacgaaatatttaggtggacattcagatgtagtggcaggactagttacaaccaattcaaaagaactcgccagcgaaattggctttttacaaaattcaattggggcggttcttggaccacaagacagctggttagtgcaaagaggtattaaaacacttgcgcttcggatggaggctcattcggcaaatgctcaaaaaattgctgagtttttagaaacttctaaagccgtctcaaaagtttattatccaggtcttaatagccatccggggcatgaaattgctaaaaaacaaatgtctgcctttggagggatgatttcatttgaattaacggatgaaaatgccgtcaaagattttgttgaaaacttgagctattttacgttggctgaatcactaggtggcgttgaatctttaattgaagtgccagcagtgatgactcatgcttctattccaaaagaacttcgtgaagaaattgggattaaggatggcctaattcgtctatcagtaggggttgaagcaattgaagatttactgacagatatcaaagaagcacttgaaaaaaaataa

SEQ ID NO: 563 - DNA, 2280 bp, Lactococcus lactis
atgactatgaaaaaatcaattattgctttcccacgtatcggttcaaaccgtgaattaaaatttgctcttgaaaaatattttcgtaaagaaattacagaagaagaattacaaacagtagccaaagaaattcggttggaaaattggaaaagtcaaaaagaagctggaattgactcacctatttccaatgacttttctttctatgaccaaaccttagatctatcaattgctcttggtgcaattccagggtcttataaaaatttagaattaagtgaactagatactttatttgcattagcgcgtggtttccaagatgaacaaaatgacgtaaaagcaagaccaatgaaaaaatggtttaatacaaactatcattatttagttccagaaattaacaaagatacaattattaaagcaaatttttcaaaattattaaatgaatataaggaagcaaaatctgctggatttgaaaccagaccaacaattattggcccatatacatttttagttttagcagattacaagtcaggagccacgaaagatacagtattatctgatgttattgtagcttttcaaacactattaaaagaacttaatcaactaggagtagaatggttacagattgaagaaccagcacttgttttagaccaaactgaagaagaaaaaaaattatttgtgagtatttatgaagaactacttaagagtaaaaacaaccttaatatacttcttcaaacttattttggagatgttcgtgatagctataaagaaataataaagcttgattttgatggtattggtcttgattttatagaaggaagagattctttagctcttattcaaaaatacggttttcccaaaaagaaaatactttttgcaggattagtaaatggaaaaaatatttggcgtaataattatcaaaagacacttgagctactaaccgctttagatgaagtagcagatatcgtaattaatacaagctgctctttacaacacgttccagtaacaattaaaaacgaaactaaattatcaaaagaaatccttaaacacttttcatttgccacagaaaaattaaatgaaattgatgaaatttccgatatttattttaataaaaacacttcttttttgaagaagaatgtcgaactttttgaaaatgaaagagttcgtgaaaattctaaacttaagcaaaaacttgataaattaacagaaaaagactttactagacaaccttcactagtcgaaagacgagcaagtcaatctcaatcgcttaatttaccagttttaccaaccacaaccatcggttcatttcctcaaacggcagaagtgagaaaagttcggctacaaaataagcgaggagaattaagacaagcagattatgacacattcttagaagaaaaaataaaagaatgtcttaaactccaagaagatattggattagacgttttagttcatggtgaatttgaacgaaatgacatggtagagtattttggagaaaagttagaaggttatgtttttactcaaaaagcatgggttcaatcttatgggacacgttgtgtcaaacctccaatcgtgtggactgatgtcactagaccggaagctatgaccgtccgttggtcagcctatgctcaatctcaaacatctaaaccagtaaaaggaatgctgacaggtcctgtaacgattctaaattggtcttttccgcgagaagatatttcgctaaaagcaagtactttacaattggcattagctgttcaagaagaagttcttgacttagagaaagctggcattaagattattcaaattgatgaggcagctttgagagaaaagttacctcttcgcaaaagtgattggtataaagaatatctagattgggcaattcctgcctttcgtttagttcactctaaagtaaaaccggaaacacaaattcacacgcatatgtgttattctgaatttgaagatattattccatccattgacgcaatggatgctgatgtaatttcttttgaagcaagtagaagtgagctatcaattatcgatgcattgaaagctcaccattttaaaactttggttggacctggagtctatgatattcattctccacgaatacctagcgtaaaagaaatacaaaatcaattagaaaaaatattggacaaattaccaattgaacaagtttgggtaaaccctgattgtggtcttaaaacacgtggtaatgccgaaaccattcctagtttaagacacttagttgaggcaactagggtgttaagaaaggaaaaggttgtatatgacaagtaa

SEQ ID NO: 564 - DNA, 852 bp, Lactococcus lactis
atgacaagtaattccaaaattctttcttttgaagtttttccacctacaactcaaattggaagtaccaacttggtaaagaccttggatagcctaagaactctctcgccagattttatcagtgtaacttgtagtaacaataattatgataatattggagatacaactataaagtttgctgattatgtaaacaatacactagatattccagcggttgctcatttacctgccgcttatttagataaagctcaagtgatcgaaattttggaacggttaaaagataaacaaatcaaaaaaattcttgctttaagaggtgatatcagcgatgaaccgatgaaagatgattttaaatttgcaagtgatttggttaaatttatcaaagattatgatgatagttttgaagttttaggtgcttgctaccccgatattcatcccgaatcagtaaatcgagtgagtgattttcattatctgaaagaaaaagtagatgctggttgtgacagattaatcacgcaactattttttgataatgatagtttctatgattttcaagaacgatgcgcaattgctgagataaatactccgatattcgccggaataatgccagtaatcaatcgaaatcaaattcttcgtctattaaaaaattgtaatacgccattaccagcaaaattcattagaatactcgaaaaatatgaacataatcttatcgctttaagggatgctggaattgcttacgccatcgatcaaatcgttgatttagtaacagaggatgttgctggaattcacctctatacgatgaataatgcaaatacggcacactccatccatgcttcaatttcttctttatttaccttttga

SEQ ID NO: 565 - DNA, 876 bp, Lactococcus lactis
atgagtttaaatttaagagatcttgaatatttttatcaattgtcaaaattgcgttcgttcaccaatgttgccaaacatttcagggttagtcaacccactatttcttacgcaatcaaacgtttagaaacctactatgactgtgatttattttataaagattcctcgcatcaggtagttgatttaactccggagggcgaacttttggcaatgagaaccaatgaaattctctctgaactaaatcacacgaaaaaagctattcatcgttcgagtatgaaagattttaaagttggttttccgccaattataagttcatatcttctatcaaagcaagataatttgaacttttttaatgccttacatatgatttatggtggttctaatgaactcttgagcctacttttaaatgaagaaatagattcgagccttttaggaagtctagaaaagattaagcatccccaattagaaatagaagaactctttcaaaaagaattttttatcattatgtcggatagtcatccactagccaatgaaaaagaattaggatttaaagacttacttaatgaagactttatcttattgggagagcataatatccactttaatgcctttaatcgtttaaatgaaaaatataatcaatcagctaatgtagttttgaaattagatgatgctcataccataaaagaacttgtcaggaaaaatttagggatcagtcttatggcagatatccgcttatcagaagactttaaaaatctagttaaagtaccatttattgaagaagataaacaattctttcatattaattatgcctatcaaaaaaattctattctctctgaaagtgaaaaaaactttttagaaatattgaaaacattaaaataa

SEQ ID NO: 566 - DNA, 432 bp, Lactococcus lactis
atggaaattcaaaaaagtctgattaaaattaatcaaaacttttcaaataaagaagaggccataaaatattgtggaagtttgttggttgatggaggttatgtcaaacctaactatatctcagcgatgattgaacgagatagagaattgtcagtctatatgggaaactttattgcaattcctcatggaactgatgaatcaaaaaaagaagttttaaaaacaggagtagccattgttcaagttcctcgtggtgtaaattttggaacagtagaaaatcctaagatagcaacaatgctatttggaattgcgggaattaaagaggagcatcttgagctgattcaaaagatttcaattttttgcgcggacgttgacaatgttgtaaaacttgctgatgctcaaacaatcgaagaaattgcaaaatactttgaaaattaa

SEQ ID NO: 567 - DNA, 1938 bp, Lactococcus lactis
atgtttttaacaagtcgtgagcaaaaattaatccagacatttttgaaacgtggaaagcttacgatagcagaaatgatggaaattacagatacaagtcgcagaacgctttatcgcgatttgaacaatttacaaaagtctttaccagaaaatatcagtttggaaaatactgatgaaggatattttttgaaaggggatatcaatcaacttactcaagctcatgaattaatagactattcaataagtgaacgtttgtatggtgagttgcttttattaattgaaaataaagcatctatcgcttctctaacagattattttggaattagtcaaccgacagtaactagtgatttgaagcaaattgagcaagctctgtttgaaaatgaactagtactaatccgagatcgtggcttaaaacttaaaggggcagaagaaaatattcgtccagtatttgtggcagtaatttataattcagcaagcattcaggaactacttcttaatcaactttctaacaataaaattttaagaataatagatttaaataaatttaagcaagttaatgaggcttttaaacgtatagatttacctgaaaaaatgactgacaaagtcaaagttttaatgcaacttttttgcttagttgttttgctgcgtttggatgagggggattctgtcagtagtgaaactctgggcagaccaagtaagcaagccttaaactttgtcaataagttactgacagagttgccagtaacaaaatttgttgtttctgagatcacttatcttgcatcagtttatgatattttatattttggctttggaagagagctgctatttatggaaaaatttgataccgatttttcttataaaattcgccaactcattgataaagtttcaacaattcttgagatagaatttgggaaagatgaccgtttatatggtttactatatgctcatctcaaagaatcagagatgttaccagtcctctttcctaaaaaagaaaatgattttatcaaaaagataaataaagataatcctgaaatttataaaacagtcaaagaatcattaagggaggtctttgataagaatttttcagaaatggaaattgcttttataagtcttcactttgtggcgactcttgaacgcagtgacctagttttacctttaagtgccgtacttgtcagcagtcgtggaagaatttcttgcgaatttatcatgagtaatttaagaaagaattttcccttcttaaaaaagatagaacttattcaaagttcaatccatatcactcaggaaaaatatgacgtcatttttacaacagagaaagagttagattacatctacatcaatccaatgctagatcaaaagaatttggaaaatattcgtcaccagctgaggttaattcaacaaaaatcacgagcacttacctctgattcagaaaaagaaaagaattttttaaatctcaatgacttattttcaataggcaatgaaatattaaaatcttttgaaatcctatctcttgaaaataaggcagaattacatgatactgtaaaacaaattattcagcgagtaaacccagaggatagtggagaactcgttcatttggtggaagaaagatttaaagaaacacatctagcaattccagaaacaaaaattgctctctttcacgcagttcattcatcaatctcaagtccaatgtttaaaatctttgacttaagtcaaccaattgaaggaatagcaatggatcatcaggctattcaaattggacgagttctattgttattagcgcctccagaagttccagagtatgtttcctttttattaggtaaaatctcaagttcaattattgaaaacaagctttatactaggatatacgattccggaaattatgaaattgtaagtgagttactaagagagataattatcgaagctgttaaacattatgatgactag

SEQ ID NO: 568 - DNA, 1341 bp, Lactococcus lactis
atgaaaatcgtagttatcggtacgaaccacgcaggcattgctacagcaaatacattaattgatcgatatccaggccatgagattgttatgattgaccgtaacagtaatatgagttacttggggtgtgggacagctatttgggtcggaagacaaattgaaaaaccagatgagctgttttatgccaaagcagaagattttgaaaaaaagggagtaaagatattaacagaaacagaagtttcagaaattgactttactaataaaatgatttatgccaagtcaaaaactggagaaaagattacagaaagttatgataaactcgttctggcaacaggttcacgtccaattattcctaacttgccaggaaaagatcttaaaggcattcattttttaaaactttttcaagaagggcaagccattgacgaagagtttgctaagaatgatgtgaaacggattgctgtgattggtgctggttatattgggacagaaattgctgaagctgccaaacgtcgtggaaaagaagtcctactttttgatgcagaaagtacttcacttgcttcatattatgatgaagagtttgctaaagggatggatgaaaatcttgcccaacatggaattgaactccattttggggaattagctcaagagtttaaggcaaatgaaaaaggtcatgtatcacagattgtaactaataaatcaacttatgatgttgacctcgttattaattgtattggctttacagccaatagtgcattggctggtgaacatttagaaacctttaaaaatggagcaatcaaagtggataaacatcaacaaagtagtgacccagatgtttctgctgtaggagatgttgccacaatctattctaatgctttacaagacttcacctacattgcccttgcctcaaacgctgttcgctcagggattgttgctggtcataatattggaggaaaatcaatagagtctgttggtgtacaaggttctaatggaatctctatttttggttacaatatgacttctacgggcttgtcggttaaagctgcgaaaaaaatcggcctagaagtttcatttagtgattttgaagataagcaaaaagcatggttccttcatgaaaataatgatagtgtgaaaattcgtatcgtttatgaaacaaaaaatcgcagaattattggtgctcaacttgctagcaagagtgaaataattgcaggaaatattaatatgtttagtttagctattcaagaaaagaaaacgattgatgaattagccttacttgatttattcttcttaccacacttcaatagtccatataattacatgactgttgcagctttaaatgcaaaataa

SEQ ID NO: 569 - DNA, 1803 bp, Lactococcus lactis
atgaaaaaattaaaagtaactttattggcaagtagtgtagttttagcagctgcactcctaagtgcttgtggctctaaccagaactcaagtacaagtaccaaaaaattaaaagcggggaattttgatgttgcttatcaaaatccggacaaggcaatcaaaggtgggaatttaaagattgcttatcaaagtgactcaccgatgaaagctgaatggttggctccactttcagatgatgctacctttggttctatgtctagccctggtggtgggcaagatggtctcttctttaccaacagttcatttaaatatatcaatggtgggcctgctaatgtaagtctttacaaagatgcaaaaacagcaacgattaccttgcgtaaagatttgaaatggtctgatggatcagaagtgacagctaaagactatgagttcagttatgatcttaccgctaatcctgcttatggttccgaccgttggactgattctctggcaaatattgttggcttgagtgattatcatgcgggtaaagctaaaacaatctcagggattactttcccagacggtgaaaacggaaaagtcatcaaggttcaatttaaagaaatgacgcctggaatgaatcaaacaggaaatggttattttcttgaaactgtagctccttatcaatatttgaaagatgttgcccctaaagatttggcttctagtccaaaatcgacaacaaaacctttggttacaggcccttttaaaccggaaaatgtggttgctggtgaatctattaagtatgtcccaaatccttactattggggtgaaaaaccaaaattaaattcaattacttatgaaattgtatcaaccgctaaatcagtcgcggctctttctgctcacaaatatgattatatcaatgatatgcgcgcaagccagtataaacaggtgaaagatgtcaaaggctataaagttttgggtcaacaagaattatatattagtttgatgtattataatcttggtcactatgatgtgaaaaagtcaattagtgttcaagaccgcaaaacacctttgcaagatcaaaatgttcgtgaagcccttggttatgctcgaaatgtcgcagcagttcaagcaaaattctctaatggacttgccacacctgctaatggattgattccaccaatcttcaaagaatttactagcccgtcagttaaaggttatgaaaaacaagatcttgataaagcgaataaacttttagatgaagacggttggaaactcaataaatctacaggctatcgtgaaaaagatggaaaagaattatcgcttgtttatgcagctcgtgtaggtgatgcaaactccgaaaccattgcccaaaactacatccaacaatggaagaaaattggtgtgaaagttagtctttatcatggaaaactgatggaatttaattcttgggttgaccatatgacgactcctccaggatcagacgattgggatatcactgacggtgcatggtcactctcaggagaaccttctcaacaagacttgttctcagcagcggcaccttataactttggtcactttaatgaccctgaaattacaaaagatttgaatgatattgattcaaccaaagctgaggattcaacttatcgtaaggctgcttttattaaatatcaagaagatatgaataaaaaggcttatgttgttccaacggcttatgctatcaactacaccccagttaacaaacgtgtggtagggatgacgcttgactatggtgcaatgaatacttggtcagaaattggtgtttcatctgataagatggcaaccaaatag

SEQ ID NO: 570 - DNA, 1305 bp, Lactococcus lactis
atgtctcaaaaaaatgaacaaagccaggagcaaagtaactcaaaatctgctgttttaggattacaacatctgctggccatgtattcaggttcaattcttgttccaatcatgattgctggagctttaaattactcagctactcagttaacctatttaatttcggcagatattttcatgtgtggtttagccactttcttgcaactccaactacgtaagcactttgggattggcttaccagttgtccttggtgttgcttttcaatctgttgctccattaattattattggtcaaagacatggctctggagcaatgtttggttcattaatggttgcaggggttttcgttattttggtttcaggaattttctctaaaatccgaaaactatttccaccaatcgttactggttcagtaattacaacaattggtttaagccttattcctgttgctattggcaatatgggtaataatgttgataaaccaacaatccaaagtttaattttagctgtttccactatagtgattattcttttaattaatatctttactactggatttattcgttctattgctattttaattggacttattgctggaacaattttggctgctagcatgggcttagttgatttttcagttgtttctcaagcaccatgggcacacttgccacaacctttttatttctcagcacctaaattttatttggctgattcattaatgatgattattattgctatcgtgtcattggttgaatcaacaggagtttatttagctcttgctgatattactggtgaaaatcttgatgaaaaacgtttgcgtaatggttatcgtgcggaaggatttgctgtatttcttggtggtgttttcaacactttcccttacactggtttttcacaaaacgttggtttagtgcaattatcaggaattaaaacacgtaaacctatttatttcacagctggatttttaattgtattaggacttattccaaaatttgccgctgttgcacaacttattccaactccagtattgggtggagcgatgttgattatgtttggtatggttgccacacaaggaattagaatgctggcaaaagttgaatttgaaggaaatcaaaatcttctgattgctgcagttgctattgcgatgggtgttggttttaactcaacaaacttatttacagcacttccaagctttattcaaccttttgtttctaatgggattgtgatgagtactgtttcagcaattatcctgaatttagtatttaatcatggaaaaaaagatgaattagttactgacgaaacaaaataa

SEQ ID NO: 571 - DNA, 534 bp, Lactococcus lactis
atgaaaacatttaaaagcttagaagattttgtcggaacacactttatctatacctatgataatggttgggaatatgaactttacgtcaaaaacgaccataccattgattaccgtatccatggcggaatggtcgctggccgctgggtcaaagaccaagaagtttcattagtgatgttaaccgaagggatttataaaattacatggacagaacctactggtactgatgttgccttagattttcttccaaatgaaggaaaattacatggcatgattttcttcccgaaatgggtagaagaacacccagaaatcactgtctgcttccaaaatgattttattgatttaatgcatgaatctcgcgaaaaatatgaaacttatcctaaatatttagttccagaatttgcaaaaatcacttatgctgctgaagcaggcaaagataatgacgatgtcgtcgcacaagctccttacaaagaaatgacaaatgatattcgtaacggaaaatactttgaccaaaattataaaatgattaagcattaa

SEQ ID NO: 572 - DNA, 741 bp, Lactococcus lactis
atgataaaatttgaaaatgtgtcaaaaatttatccaaatggcacaaaaggtttgacggatgttaatttacaaatcaatcaaggagaattcgtagctattattggaacatcgggagcaggaaaatcaactctgattcgttgtgttaatggtttaaatgatattacttcaggctcgttaattgtgaatgatacagaagtgtcaaaacttaaaggaaaagagttaagaaaatttcggagacatgtgggaatgatttttcaatcctataatttagttcctagagtgacggttttgaaaaatgtaatgtttgctcgtgtaccagatatgagtttatttaaggtcatttttggtttgttttcaaaagaagataaacttgttgccttagattctctgaataaggtaggaattttagataaagcttatatccgagcagatcaactttcaggtggacaacagcaacgtgtatcactcgctcgtgctcttagtcaagaaagtgaaattttactcgctgatgaacctgtttcagcacttgacccagtcacagctaaagaagtaatggatgattttaaaagaattaatgaagaattcaataaaacaattttactgaatattcaccatgttgaacttgctttagaatacgcttcgcggattattgctgtaaaaaaagggaaaattgtttatgatggtccttcgcaagaggtaaccaaagaaattttggatgaagtttatagaaaagaggcctaa

SEQ ID NO: 573 - DNA, 330 bp, Lactococcus lactis
atggaacaaacacttgaagtacaagcgactatttcagttttaattccagaagataagattcttgtagataaagttgaatatcaagagcttaaagaaaaagactttgacggttgggttggtatggatgtattcataaaaaaatcaaaccgctcaagaactactatcaagaacttgttaaactgtccagagatggtaaaaaagttatccatagaaaatggcggttgggtattttatccggctgatgctggtaaatggtcatttcattataaagagatgatggaatttataaacaatgaattttatcagaaatttaatggaggaagtaaataa

SEQ ID NO: 574 - DNA, 153 bp, Lactococcus lactis
atgatgggtatttccatagcgaactttttaattacattactgacttatctttcaatatggtcagtaattgtagttatattcattggactgatgagcctgatagcttactgggcttatttagtatataaatttctaagaaagataggaaaataa

SEQ ID NO: 575 - DNA, 306 bp, Lactococcus lactis
atggcactaattacagcacaagaattacttgatgaaaatcatattgattcaaactatgatgaaattgcaactatgaatagacttattcatgatgcaagtgccttaattcgtggttctatttctgattcagttactgatgagcaaatcatggataatttacccgaccagtataatagagctgtttcagctcttgcaacccgtctatatttcagtagagatttgtcagaaggctatggtattggtattcagattatgattaatcaaataagagctagaatgtgggaggtgctgaatggcacaacttaa

SEQ ID NO: 576 - DNA, 345 bp, Lactococcus lactis
atggaaattaaaatcaaaaaacttaaaaaaaccgttgaagtcaaagcttcaattaaaaatctcaagaagagttataaatttgccaaaaacatggccgaagcagaagaaaaaattagtgaaggaaacgatgaactagtcttagattatcttgattcaattatcgaatttgtctctgatatcgctaaactcagcaaaaaagaaaaagaagaacttgaagaacttgaaatggaagagttgatggaagttgtttcttatattgttgcaaaattgcaaggcgcttctgactcggatatcaaaaaagccaaagaaaatggcgaagtgggtttagcccaagagagcgaataa

SEQ ID NO: 577 - DNA, 327 bp, Lactococcus lactis
atggaatcagttatacaacatgccttagttgttgtgaaagatgttattgataattggggagcgataacagtggtttctattattattgggagtggttatcggattttaaataaaaagcaggaacttagagataaggctcaggaagaccagcttttaattatgcgccaagaaataaaaagaattgagttatcacaagctattaatcatgactatggcttacaaattgtgagtagtatttttgatgaatatacatctttgggcggaaatcattatgctcacgaaatttacgaaaagtataaaaaggagaaagaacatgaaaacaattga

SEQ ID NO: 578 - DNA, 438 bp, Lactococcus lactis
atgagtaaacttagagagctttctcgagagcttggtgctgaaattatatatttcattccatcagaaaataatattgtcctagttgatgatattaaaggattatatcttcctgaatatgatattatctatatcagagatgatttgacaataacagaacaagaaaacgttattcttcatgaattaggacattgttactgtggacacacccattataattgccattctaaaatgtttgggagtaagcaagaggcacaagctgaccgattcatggtagttcacagattcaatgaatggctttctaaatgggattttgcaccagaaccaaatgaaattaatatcagtcagttcatggatgcgtatgaactcaataataaacttaagtggatatgcgaattagttattgaagagtatactgctgaatatcaagaagttatttaa

SEQ ID NO: 579 - DNA, 543 bp, Lactococcus lactis
atgaaaactgatactagtaataggcttaaacagatcatggctgaaagaaatttaaaacaagttgatatacttaatctttctattccttttcaaaaaaaatttggtataaagttaagtaaaagtacattatctcaatatgttaattccgttcaatctcctgaccaaaatagaatatatcttttagctaaaacattaggagtaagcgaagcgtggttaatgggatttgatgtacctatggtagaatcttctaaaatagaaaatgattctgaaactatagaagaaactattacagttatgaaaaaattggaagagccaagacaaaaagtagtcttagatactgcaaatattcaattaaaagagcaagaagaacaaaataaagttaaacaaatagaagattaccgtctgagtgatgaatatcttgaagaacaaataagtaaagctagtgcctatggcggtggacagcttaacgataatgataaagaattcttcaaacgtttgttgaaaaatactcttaaagaaaaaattgataaaggcgatttatga

SEQ ID NO: 580 - DNA, 219 bp, Lactococcus lactis
atgagttatgattattcgtcactactaggtaagatcactgaaaagtgcggaactcagtataacttcgcaatagctatggggctttcagagagaactgtgtctttaaagttaaatgataaagtgacttggaaagatgatgagattctaaaggcagttcacgtattagaacttaaccctcaagatattccgaaatatttttttaatgcaaaagttcattaa

SEQ ID NO: 581 - DNA, 336 bp, Lactococcus lactis
atggaacaaacacttgaagtacaagcgactatttcagttttaattccagaagataagattcttgtagataaagttgaatatcaagagcttaaagaaaaagactttgacggttgggttggtatggatgtttttacagaaaaatcaaaccgtagtattccaacagtttccaaagttttaagaaaacctgatttaagaaaaagaatatcagttgaaaacggaggttgggtatattacccaaatggtaaaggagataactggtcgtttaggtttaaagaaatgatggattttataaacaaagaattttatcaaaagttttcaggagggagtggtctatga

SEQ ID NO: 582 - DNA, 216 bp, Lactococcus lactis
atgcacacacaaattatgaatggacgagaagtcctgacagttccaacagtcattggatataaacattatgacttagaaaaaagagaagtagttggagaagttattgaatctacttatcgaagaaaagacggaacaatgtacattatccgcagatcacgaacagaacgagaaaaagctgctatgctcaattcgtgcttgtctgactggggatattag

SEQ ID NO: 583 - DNA, 519 bp, Lactococcus lactis
atgacggaagaaaaagaaccgtataaagttaaaaatgatagtgaactgaactgggtacttggtaaatataaagaacatcaaatccaatgtgatgagtatgaaattcaagctgaagaatcaagaaaagctatcgaagaaaaatataatgccgaattgtatgaaattgaaatgcgccgtttaaaacttcaagctgaagaacagaaagaaatggattatttcaaaggactggctgaacaatattatttaactcttgagacgaaaagtcctaagaaaacaatcaatggtagtgttcgattttcaaaaaaagaaaatgtctcttatgacgataatttgctttcagagcttaaagaaaaagggttcggcaaattcatcacagctaagactaaaacaaccgagagtgttgataaaaaggcactcaaagcatttgtaaaagatggcggtcagctcgtgtcagaagatggagaaattgttgaaggattcaagtttgataaaacagaagaatttacagtgaaagtttga

SEQ ID NO: 584 - DNA, 624 bp, Lactococcus lactis
atggcagataaagataattcggtttttgaactgttaaattcgatagatgtcagtgacaaagtcgaaaaaaagaaatcaggtaaaaatgagctaagttatcttagttggacatgggcttggactgaatttaaaaagaaatttccaaaagcaacttatgaaatcaagaagtttgtttcaaaagatggaaatgagcttccatatatgtatgatagcacgactggttttatggtttttacatcagtaacagtggatgatgtgacccatgaaatgtggttgcctgtcatggatggagcaaacaaagccatgaaagataagccttataaatatatgactaaatataatggtgaaaaatcagttgaacaagcttcaatgtttgacgtaaataaaacaatcatgcgttgtttggtaaaaaatatagcaatgtttggattggggctatatatctatgctggagaagatttaccagaagaaccacctcaacctcaattaagcgatgctgagttaattgagaaatacttaaaacaaaatccagaaaataaacctaatgttgatgaatttttgaaaacaaagtcggaacacgaagttgctgaaatgatgaaagcatatatagattggagtaaataa

SEQ ID NO: 585 - DNA, 390 bp, Lactococcus lactis
atgaaatttgaatttgaattggataaaatgccaactactcagcagcaaaaaggcataaaaaaagtgaaaggtaaacttcaattctatgaccgtcgtggaacaaataactacagtcttaaagctcaactcatgaaaaataaaccgaaagagtgctttgaaaaaaacgttcctttgaagctatccgttacttttttctacgctatcaagcaaaaaaagcgttggtggcaatggaaaacaagcagacctgacttagacaatcttatgaagaacttacaagattatatgactaagctgcgttattacagtgacgacagccagattgtatggcttgaagctaaaaaggttaatgacgagaaaaacagaatagaaattgaaattacagaggtgtaa

SEQ ID NO: 586 - DNA, 195 bp, Lactococcus lactis
atgattaaagaaattatcgtaattaaatcagaatatgaaaagctcaaagccgataacgaaaccatgaaaatggcactgaagaacatttataatcaacctgaagatgatggaattatcagcattgaggagtatccatcacaaattagatactatgctaaaaaatcactcgaagcgattggagaaaaaattgattaa

SEQ ID NO: 587 - DNA, 348 bp, Lactococcus lactis
atgatgagtgataaaagacaaggttggttagctgaacttaaagcaggagatttagtaattattgaatatcctagaagcagttcaacagtaaaaaaggtagataagataactccaacgggaagaattaatattgaatcttatgtatttaatcaaaatggattagctatggggtgggattattccgcaccgcgtttggcacaatacagtaccgaggcacatcaaaaaatcaaagattatagaaaaagaaatgttttggcactggaactaaggaataaaaatttcaaaagtttgccattagaaaaattggttaaaatcaaggaaattattgaagggagcggcgatgagtga

SEQ ID NO: 588 - DNA, 264 bp, Lactococcus lactis
atgactaaaaataaaaatcgaagtaatcttcagtatttcgctcaagcttggtcagcttgggctttttttatttactccgaagtaagatgtactgccaaaagctcattatcttgtcgtacccaaagagatgataggttactagagataatccaaatcctacagcaattactattagagcaattagtatcttataaactattttcatcttttagtctccttataatcttgatacaatccttcaaagattgctgtagcgcattgtaa

SEQ ID NO: 589 - DNA, 369 bp, Lactococcus lactis
atgaaaaaaatcccaacagaagaaacaatttataaagatacgattgcacaaatgaaacagttaaaaacctataactatgcctttaatcggctagtacgaatttatgcaggaatggtccgacaatattatgaagctctgaaagtttgggaagaagaaggttctccaatttcaacgctaagtgcgtcgaactcaactaaaaaacatcctgctttagatcaaatcgaaaaattaagaaaagatatcttatcttattcaaatcaactcatgctgaacccgaaaagtcaaagagattctgaaactaaaccagaagaaaaaacttcaccgtttgctctatttatgagtcagagtggcggtggtggaagtggataa

SEQ ID NO: 590 - DNA, 282 bp, Lactococcus lactis
atggatgaagatagtattttgaaccttgttaaagccgttttgggatatcgttctgcagttagagatgagcttctaaaagtgattataaaatcagttattacagaactcaaagataataaaggaattgtactagagccaaaaagcgatgaacaagtcatgtttattgtagatttagcagcttttagatataaacaccaaggcggtgaaacaatgcctcgtaatcttgaatatcgtttacggaatttaatcattaaatatcgaggtaaaaatgatgtgggatga

SEQ ID NO: 591 - DNA, 360 bp, Lactococcus lactis
atggaaaaaacaattgaaattggagagattaagattcgtttggcttcaaatgcagctactccattgcgttataaaatgcagtttcataccgattattttgcggacttgatgaaacttgcaaaagctttggaaacaggaacagaggaagaatttaattttgataatgtttcttgggaacagttgtcaatgttaaatttgacgttactttataactttgtttggatctatgccaaaactgcggaccattcaattccagaccctttggattggttggatagtttggaaagtttgccaattgaagactttaccagtgaattacaagatttgattgcacattccatcaaatctaaaaaaaagtag

SEQ ID NO: 592 - DNA, 177 bp, Lactococcus lactis
atgttcactgtcgagtcgttccttttgctttgtaagcaagttggtttatcaagtgaagatatgcaagtaatggatattggggattgtttagactttattcaagagtgggttgatttcaataaccctgataaagagaataaacgtaaggcaacacaagatgatttcgactcgttctag

SEQ ID NO: 593 - DNA, 339 bp, Lactococcus lactis
atgacaatagatgataacacaaaagctgttatccaaatacttataggtacagcaggtggatggcttgcttcctggctaacatataggggtaaacgtggtgataatggggaaatcattcgattagaaaatggaaatgttgaattttcagaagatacaagagaggaaggaatcaaagaacaagaagaattatttgatgaggaaatttccattaatcttgatgaaattaaaaagaaggttaagtttttagttacaaacctagaccagcttgacactaaattatcagggtatgatgcagaaatctatgacatgctcatggataaattagaggaggaaatataa

SEQ ID NO: 594 - DNA, 531 bp, Lactococcus lactis
atgaaaaaaataggtttagtaattttagcagcaatggcatttataatgggaggggttattaatgcacaccaagtttctgcagatacagatccacttcacgaaagattatatagagtttataatccaaattcaggtgaacatttacttacacctgctggttgggaggttctaactttagaaaaagcgggatggaaatctgaaggagtcgcattttatatcccattaactgaacctccatactcaggatatccagttgtgcaacgtttatataacccgaatgcaggtgaccaccattatacaacaagtgattttgaagctgctagccttctttctattgggtggaataatgatggaacagcatttagattcccagttgctaaagcgaatactggagtccctgtttatcgtctttataatccaaatgcaaaagtaggttcgcatcactttacaatgagctcttttgaaagagattctttgataaaagccggctggaaaaatgaaggaatagcatttaacgcttatactaaataa

SEQ ID NO: 595 - DNA, 420 bp, Lactococcus lactis
atgaaattatcattaccagaaattagagaagaatcatttgaagttaaaacttcaattaagaacattaaaaaaatgcatgcttatcagttaggattagcagaacatcaagagaaactcgcttcagctcaggatggaacgctagacgaactaacgaaagcaattgcccttgatgatcagtttgttattaatactgctgaaaaatttatttcggaagtcctaggcctaaataaaaaagaaatagataagtttgaagaagaaattgaacgcgaccaacttatgaagcttcaatcaaaactcgttcttttacttcaaggctataatgatgatcaaatcgatactatgtttactgaggaggttgattctgccgaaaaaaaagttcaagcattgaagaacgaaaagtctaccaccacaaccaattaa

SEQ ID NO: 596 - DNA, 324 bp, Lactococcus lactis
atgagtgtaactgttgatgacttactagatcagttatcagaagatgatgatcgcaaaccacaacttcaaatttattttgatacagctacagcatatgtgaaaaatgcagtgagttctgatacagttgatgctccatttttcaatgtagaaaacgtttctccaatttatgatgtagctgttcttagctattcgatggatttgtggattaatcgttctacaactatgcctcctactacggctgtagatcatatggttggacagttgagaggtctttattcttcatggaaggaggcgcaagatggtcaaaacttacaaaccgaatga

SEQ ID NO: 597 - DNA, 180 bp, Lactococcus lactis
atgggatattacgacacaagaaatgaagctaggcgaatcagtaagcttgctagtcaaaatatatcgagtgagcaaaccaaaaaagaatttgaattagatagacaaagcaagtttaatcaggaaatgcaagctgagtttcacgaaaaaattaaaaaattaggagaaaaaaatggtagttaa

SEQ ID NO: 598 - DNA, 375 bp, Lactococcus lactis
atgaagtttcagcaaactaaaaagtcaaaatatggagcaaagaaaacaacggtagatggcattgtatttgatagcaaagctgaatcaatctactatttgcaacataaaaatgatgagcggatgaccatgcaagagaagtttgttcttatggataaatttagattgaacggaaaactttatagagaaatagcttataaagcggactttgttttcagaaatgaagctaatgagattatcaaagttgtcgatgtaaaaggcatggtcctacctgaatttaaaatgaaagcaaaattatttgctaacagatatggaattccaataacaattgctaagaaagtagcaagaataaatatgttcgaggagagcgaaatatga

SEQ ID NO: 599 - DNA, 840 bp, Lactococcus lactis
atggcaagaccaacaaaacaaggaattgactattatccaaaagatgtaaaagcaaaatatgataccaaatttaagtacgtagaatcaaagaacacagtgattgctagacttgtaatttacgaattatgggatttaatttatgcagaaaatggttactttttaaagtttgataatatccaaagagttttattcttaggagatttaccaataaatgatgagcagctcacagatattttagatagctgttttgaaattggattatttgaaaagggacttttcgataaatatcaaatacttacatctgaaagcatccaaaaaagatatatggaagctgtaggtcgcagagctaaagttcctataatttcctcttactttttattgccgaaaaacagttatcgcaacattaacttagttaatgactacattaactcaataaatgatgacaataactcgattaatgacaacattaatccacaaagtaaagtaaaagaaagtaaagtaaataaaagtaaagtaaaagaaaatagagaaaaggaaaacaaaacaaataaccaagaaatcttttctcgctttttcgaactcttttcaaactttaataaaaaaaacatttccaaaagagcaatggctttacaagtttttcttgacttaccccaattccaaaaagattgcattgtaaaaagcgctgagaattacattcaagattatataaataatcattcggatgacctagatggtaactatagtgttaatccgtatgagtttttggataatgtaatgttcatgaattaccaagaagaagtcaaagcagatactggatatgacgaggatttgggattctag

SEQ ID NO: 600 - DNA, 291 bp, Lactococcus lactis
atgtttgaagaaatgattcaaaagctgagagattcagttagaggaattgttttagattccatgcacgactatatctccaatgacgggaagtatcctcttgctttaactcaaaaacaagttatggagctgattggctgtaaggatgaaagtaccttcgctatttcatttaaagaacatttgaaatttgctgaaatgaattacgggaaatcagggacaaagtggtcaagggatttagttattgaatggttcaaagaaccacgaaatttgcaattgcaaagacgaggtaaataa

SEQ ID NO: 601 - DNA, 861 bp, Lactococcus lactis
atgaatccaagaaacagaaatattttaattgtcgttattgttgttgtaattgttgctatcgctgcatttttcggttttaatcataaatctggtgaaagtaaaacggcaaataaaactgtgaatattggaataatgacaggaaccaaagaagatgatgccatttggtcaactgtttctaaaacagctaaagataaatatggaattactttaaaattcactcattttacagattatacacaaccaaatacagctttgaaaaacggcgatattgatttgaatgccttccaacattatgctttcttgaatgcttggaataaagctaatgacggtgatttgaaagcaattggtaatacaacaatttcaccaattcgtctttattctaaaaaaattacttcattgagccaaattaaatcaggagatacaattgcagtacctaatgatgcttcaaatgaaagtcgtgcactttatgtcttgaagaatgctggtttgattggcctttctgtatcaggtgatacacttgcgacagtcaaagatattaattcaaatccaaaaaatttggtcattaaagaattagatgcggcacaaacaccgcgtgcgcttgattcaattacagcggcagtaattaatgacgattttgcaacaacagcaaaattaacggttgaagagtctatttatactgaacctgtaaacaaagatagcgagcaatggattaatattatcgttgcaaataaaaaagatgctaataacaaaatttataaagaagttgtgaaagcctaccaaactgaagcaacgaaaaaagcaattgagaaagcttatcctgataagagaaaaattgctgcttggggattgaaactcgactaa

SEQ ID NO: 602 - DNA, 861 bp, Lactococcus lactis
atgaatccgaaaaatagaaatattattgttgcactcgcagtgattatcgttgttgctttggttgctttctttagtttaaatcatcaagcaagtaaaaaatcaaccgctcaaaaaacagttaaggttggaatcatgagtggggacaagcaagatcaagaggtctggaaatcagtagctaaaaccgccaaagaaaaatatgatttaaagctaaaatttgtttatttttctgattataatcaacctaatgaagcacttctttcgggagatattgatgtcaatgcctttcaatcttataattatgtgaaaacttggaataaagcacataagagtgatattgtggcagtaggaaatacttatattacaccaatgcacatttattcaaaagaagtcagcaaattgtcagatttaaaagaaggctcaaccgttgcaataccaaatgatgcttcaaatgaaagtcgggcattgttcgtgctccaaagtgcaggtttgattaaattgacaacaagtgattctagcaaattagttggcttaccagatatcacagaaaatccgcatcaattgaaattcaaggaagtggatgcaagccaaacaccgcgtgcgcttgattctgttgctttgtcagtggttaactataattatgcaaccgcagctagcttaccaaattctgaatctgtctatatggaacctctcaacaaaacttctgctcagtatattaactttattgctgcgacaagtaaagaaaaaaataataaagtttacaaagaagttgccaaggcttatgcttcaaaagcgacagaaaaagcaatcaaagaacaatatccagatggcggagaattgccagcttggaacttgaaactttga

SEQ ID NO: 603 - DNA, 252 bp, Lactococcus lactis
atgaagtttacttcgagatatactttaaaagatctacgagaactcaaccacttaacattaaaacaagttgctagaaaagtaaaactgaacagggaacgtatagctgaactagaacaagatagtagttttatcacaattgatgagatgtttcgattttcaaaattttatggtctttcaataaaatatatttttataggggaacaagttgattttgatagaaaactaaacgaatatttaggaggtactccgtga

SEQ ID NO: 604 - DNA, 255 bp, Lactococcus lactis
atgattgaacaccaccaaggttacacggctattaaacggtacggacggaatagttttagaccagcaggcaaacacccgtttaagatgattcacaatgcacgagcagtcaaatatgacttgatacagcagttcgaagcaagtacaggtattctcttatctagcggaatgaaaagcaatttatgcacgcaaccagtaccgtttttaggtaagcaattagctgttatgaaagtacaaataaaggaaaataaaccatga

SEQ ID NO: 605 - DNA, 573 bp, Lactococcus lactis
atgaaaacatttgaagaaattgaagcagaacttatcaatcaaaaagacggtaatttattggaaattgagaagtttaaaaataataaagaaaaagcggaaagaaccttgaaaatcgctaatgaggaattaatcaaagccgaggagaccgctgacttagtagcttatgataaagccaaggggaatatttcaacgtctcaacacgctattgaattgtatcaaaagcagttagacaaattggaaagcactccattagtgaccaaagatgattataatcaattggtctcagatattgaaaaggctgccgataagttacaagatgagttgaatattaagggcgctaagctaatggcagaactcaagtcattggctgatgaatctaatgcggtctaccataaagctgatgagttgttacgtattgcgcagtatgatgtttataaagacgctgactgtttagtcgcgtcaaacggtaccagaataacacgagcggtagagtataaacgaaacaactcagtccgaaatgtttataactttaaatatcttggcaacacatttcttgatgatatgaacgcataa

SEQ ID NO: 606 - DNA, 183 bp, Lactococcus lactis
atgagttttaattttacaaagacagtagtttttacagtcaaagaaaaaatgccatttaatattccttatgatgaagaggaatttgagaaatttagtcatgcacttttagttgataaaaatgcggagtggctaggtggctacttatttaacataaaaaatattgtttcaataaaacgagtttaa

SEQ ID NO: 607 - DNA, 1470 bp, Lactococcus lactis
atgacagaagttaaaactgattacggagatttggaaaaacaacgcaaagcatgggaacggttagaaaataatctaaaaaaggtgattaatcttccctgggaaaaatttggaaacattgatggcgctaagattcctcaaagtcttgatttagtccatatcttgcatcgtgatatttatgaatatccttatctgtcagtaaagtctacaggagaaaataaaagaatcaaaagacctagtttgcatttaaacaatggtcaaaatactgtatctattttctacggtggagttaataaaaaagctgaaaaaactgacgatggagaagataaagaagtagttacattaaaatcaagtaaaagtattcctcgttttgttaatgtgattttagattatctatttggaaagattgctttgcatcatggatatttatatgatatttcaacctcacaattcaaacgattgtcagagatggatattgctcatgaatataaattaggcaagcgttctgacttcacagctagtgaagttgtagaaattatatcttttatagatgaacagataagcttaaaacctcttaaagaaataaaaacatctattattgcttgtcatgactttcaaatggatctgcatcaaaagataattttaaaaaattgttctatcaaagacaatgaatgttactttaaagtgtttgattgtcagctctctgaggtaattgagatgtcaatcttgaacgctaattacttaggaatggtgatagacgatgcagatagtttgcataatgcgcaactacagccaatctatcaaatgctagtggcatgtcgtgaaattactaagacaaggttctttgtcagtaaatctgggacacgtactggtaaagggttgcgtcataaagtaatttcatcaatttttgatacgaaacatgtcaatctagacgaactctcaaataaggcaacggctgcaatggcttgggctggatttgatggcggagaaatgttactggtgactgaatcaggagaaatcggaaaaagcttagaacgttatttgaaaatactggctactgaaagtacatatcgtggtcgaggtatcggtcaaaactatgcggatattaatcttactggtgtgctgtctattgattcaaatgaaaaagttctgttttcttctgagatgaatagcagggctgtgaacattgcttttaagaatcgtcctaaaggggaaactgatagcgaacgtgaatcaatctttgcgccctactgggaagcatttactgaacagcgtgtatctgagaccagtcgagaagcaacggcgcttgcaggagtgctgctttatactcttcatttgtttattggagacaaaataaatttaagttcaattttaagcaagtggagatggataacttcagcagtgatcactttgattttgatgacgtgcaaatttatattattgaggagcatatcaaaggtaacaagacaataa

SEQ ID NO: 608 - DNA, 270 bp, Lactococcus lactis
atgagtatcttatcatttgaagcagaacaagagctaacacaatcagtattaaatcgtgttgataaattagttgaggcaagagttgaacaaagtcgtgagttcccatatgtgcaacaagctgaattattgaaagaactgaacatttcaactacatatttagctaaacttcgggcacacggattaaagcaggtgattctagaagatggagatcgtactgtttggtataaaaaaagtcaattggaatccttgatggattcattagctgaatag

SEQ ID NO: 609 - DNA, 207 bp, Lactococcus lactis
atgaatactaaaaacaagattaaaggttaccgtaatatgctcggaaaaactcaatctgaaatggcaaaggagctaaatataagctctcaaagttattacaacaaggaaaatggatatgtttcttttaaagatgaagaaaaaataattataaaaaaaatgcttatcccacattttccaaagataactattgaagatatatttttttaa

SEQ ID NO: 610 - DNA, 351 bp, Lactococcus lactis
atgactgataaatacgagaatccaacaagtgatgactacatgggtgttgtaatgggcattatcatgagtggaggaaatgccaaaggtttagccttccaagccattcaacaagccaaagctggtgaatttgccgaagctgaaagttcattaaacgaagcgagtgaacaacttcgtgaagcacatgatgttcagactgaccttttgacacgtttagctcaaggcgaaaaaattggttggaatctttacatggttcatgctcaagaccacttaatgaatgcgattacctttaaagaccttgctgtagaagttgtcggtcaagaacaacgcctgcaagcacttgaaaacaaataa

SEQ ID NO: 611 - DNA, 1050 bp, Lactococcus lactis
atgatggcaattgctgctcaatacatgggacataaagtcattacacttgacccaaatccaaactgttctgcggcaaaagtatctgatgaactgattgttgcaccttatgatgacgttgaaaatttattaagactggcctatgcttgtgacgtcattacttatgagtttgaaaatgtatcagcaaaagctttgcacgaaattgaaggctgtgtaaggattcctcaaggaatacgtctgttagagattacgcaaaaccgtcgctttgaaaaagaatttttgaccaacgaagctaaagttaatgttgcaccttggcaactcgtagattcagcggaaaaactcccagaaacagtaactagaaaacaagttttaaaaacaacaactggaggctatgacggtcatggacaagtggttttaaatactgatgaaaaattgtcagctgcaaaatcactgacagaactttcagaatgtgttttagaagattttatttcttttgaacgtgaaatttctgttattattagtggaaatggtcacgaatatgtggtttttcctctagctgaaaacgaacatagagaaaacatcttacatcaaacgatttctccggctcgtatatctgctgaaattacagagaatgcttataaaattgcgacctcaattgcggaaaaattagagctatctggcgtgctttgtgtggaaatgttcttaacagcagatggtcaaatctatgtcaatgaactagcaccaagaccacataatagtggccactttaccattgaagcttgtgatttcaaccaatttgatttgcatattaaaggaattttaggagaagacctaccagaacctaaacttttgaaacctgccattatgctgaacgttttagggcaacacgttgaggcagttaagaaacttaatcatgagcatgccgattggcatcaacatgattatggaaaagcagatgctaaacataaccgaaaaatgggacatgttacgatcttaacaaatgattttgaccaaacgattaatgaaattaaagcaactaaaatttgggattaa

SEQ ID NO: 612 - DNA, 522 bp, Lactococcus lactis
atggctagaaaagaaattattgacgaaatcacaatgaaacgtgcaattacacgtatcacttacgagattattgaacgtaataaagagctggacaaattggttttgattgggattaaaacacgtggtgtttatttagcaaaaagaatccaagaacgtttgcaacaattagaaggtttggaaattccttttggtgagttggatacacgtccattccgtgatgacaaacaagctcaagaagacacgacagaaattgacatcgatattacaggaaaagatgtcattcttgtcgatgatgtgctctacacaggtcggacaatccgtgcggcaattgatggaattgtaaaactcggtcgtccagctcgtgttcaattggctgtattagttgaccgtggacatcgtgaattgccaattcgtgcagactacgttgggaaaaatattccaacgggtcgtgatgaagaaatcattgttcaaatgtctgaacacgatggcaatgacagtattttaattaaacgtgaagattaa

SEQ ID NO: 613 - DNA, 975 bp, Lactococcus lactis
atgaaattagtaaaaaaattaacttttgcttttgtagctactttagcagtctcaactttgaccgcatgtagtctttataccggtattccaggccgtgatggaaaggaaaaagtagaagaggtaacgcataagaaaccaaatgaattaaatattggtgtttctatttcgacaacaaacaatccttattttgtttcaatgaacaatgcgattaaatcaatggccaaagaaaaaaatacaaaattaacggtttctgatgcccaaaatgattctgcaacacaattaaataatgttcaaaatttcatcagccaaaatgtggatgcgattttaattaatcctgtagattctgatgccattgttccagccattaaagcagccaataatgcccatatcccagtgattgcaatggatagaggatcaaatggtggaacagttttaacaaccgttgcctccgataatgtggcagctgggaaaatggcggctcaagcagttgaaaaattggttgggaaaaacgtaaaagttctggaactttctggaacgccaggggcttcggcaacaatagaccgtggtaaagggtttaatagtgaagctaagaccttaggtttaaatatattatccagtcaatcagctaattttgacagaacaactggtttaaatacgactcaaaatatgctccaatctcataaagacgtccaagcaatctttgcgcaaaatgatgaaatggcactgggagcagctaaagctgtgcaagccactggacaaaaaatagctatttttggaattgatggtgagtctgaaacacatgatgccataaaagcagggacaatgaccgcaacgattgctcaacaaccagctaaaattggtgaaatggctttgcaagctacctatgattattatcaaggtaaaaaaattgctcatatgataaattcgccaatctatcttgtggataaagataatgttgaccaacatcaaaggtag

SEQ ID NO: 614 - DNA, 822 bp, Lactococcus lactis
atgaatacacatcaacttgaaattttttatcatgtcgcaaaatttcagtcaatatcaagggcagcagaggcactttatatcagtcagccagctgtcagtagccaaatcaaaaaacttgagtctgcttatggtgttcacctaatcgaaaaaaatggtcagggaatccagctgacagctcctggaattcagctttatgaaattattcgctccttttttgagaacgctattgtttccgcagaatcactcttaaaaaattcttctgttctccggatttcaggaaattttttaatgacaaattttgtaattcctcaaattttcgatcatgaaactaatcaggctaacttaattatcaaaagcacttcttcttttaatgcgctgacagaattgaaaaatggttactgtgatttggcacttattagtgcttctagtcagcccgttctgtcagcagatatttcggtcaaaaaaatttttgatgatgaaattatttctgtcagtaaaaaaccactagaaagagaagtcacttctcttattgtcagtaaaagtaaaattgatgtttacaaaatattggaaaaaaataatccattattttcacacttaccttatactgcagttgagtcgactcaagatgccctctcaaatattaatattaataaaaatagtgcaactttcatttctgctcgttttctaaaatattttgaaaaagattataactatcactatactggagttaaaaatggtttttatgccctctataaatcaaacaattttcatactgatgaaattttaaagcttatcgaaatgataaagtcttctactaaataa

SEQ ID NO: 615 - DNA, 492 bp, Lactococcus lactis
atgacctcagcagacctaaaccaacaaatctcaaaagaattgcatgagttacgacatgcaactgacaatcgttctcaggaaagaagctggattttagctcaattagataatgataaattggaaaaagaagttttgactttgtcagttgttgcccttcacattttgtcagctttgaccaaagaagatttaaccggtattgaattagccacaaaattatccgtcactcgtggcggagtgactcgtgctgtccaaaatttaatcaaatatcagtttttaactacttatcaatctgaaagtgataaaaagaaaattttctatcacctgacagtcaaaggtcgaaaagtagcgaccattcacgataaaatgcataaaatcatggatattagacttggacaaattttcgataaatataatgaacaagaaaaatcaattattttgagctttctgtctgatttcaatctgacagaagcaggactttttgattcagaataa

SEQ ID NO: 616 - DNA, 624 bp, Lactococcus lactis
atgtcaaaaggaatcttagggaaaaaagtgggaatgactcaaatcttcacagaaaacggtgaattaattcctgttactgtgatcgaagcgactcctaacacagttcttcaagttaaatctgttgaaacagatggttacgaagcaactcaagttggtttcgatacacttcgtgaagttttgaccaacaaacctgccaaaggtcatgctgctaaagctaatacgactcctaagcgcttcgttcgtgaattcaaaggactcgaaggcgctgaagtaggagcagaaatcactgttgatacatttgcagccggagatgttgttgatgttaccggaacttctaaaggtaaaggtttccaaggcccaatcaaacgtcatggtcaatcacgtggtcctatggcccacggttcacgttaccaccgtcgtcctggttcaatgggtcctgttgcagctaacaaagttccaaaaggtaaaaaacttgctggacgtatgggtaacaaacgcgttactgtacaaaaccttgttatcgcacaagtgcttcctgaaaagaacgttatccttgtaaaaggtaatgtcccaggtgctaagaaatcattgattgttgttaaatcagcaatcaaagctaaataa

SEQ ID NO: 617 - DNA, 537 bp, Lactococcus lactis
atgtcacgtattggtaacaaagtcatcgttatccctgcaggcgtatctgtagaagtaaacggtgcaactgtcactgtcaaaggacctaaaggtgaactcgttcgttcattcaacgaaaacatcacacttgatatcgctgaaaacgaaatcactgtaaaacgtccaaacgacactaaagaaatgaaaatgctccacggaactactcgtgcccttcttgctaacatggtagaaggtgtttcaactggtttctctaaagcacttgaaatgatcggggttgggtaccgtgcacaattacaaggaactaaacttgtattgtcagttggtaaatctcaccaagacgaagttgaagcaccagaaaacatcaaatttgttgttgcaactccaacttctatcgttgttgaaggtatcagcaaagaagccgttggtcaaacagcagcttacatccgtagccgtcgttctccagaaccttataaaggtaaagggatccgttacgttggtgaatacgttcgtcgtaaagaaggtaaaactggtaaataa

SEQ ID NO: 618 - DNA, 516 bp, Lactococcus lactis
atgagcgattacaaagtaaatgaagcaacaattgctaagaaagcagaattggttgatgtttacgcacaaaaaatgactgaagcagcatctatcgttgttgcagattcacgtggtttgtcagttgatcaagatactcaacttcgtaaacaacttcgtgaagcaggcgttgaattcaaagtcgttaaaaactcagttttgcgtcgtgcagctgaaaaagctggtcttgaaggtttgtcagaagcattctctggcccatcagcagtagcattttctaacgaagatgttgtagcaccagcaaaagttttggctgactttgcaaaagatgctgaaaatcttgaaatcaaagctggtgttatcgaaggtaaagtttcttctaaagaagaaatccaagctattgcgtctcttccaagccgcgatggacttctttctatgcttctttcagtgcttcaagcacctgtccgcaacgtggctcttgcagtcaaagctgttgcagaaaaagaagaatcagctgcttaa

SEQ ID NO: 619 - DNA, 426 bp, Lactococcus lactis
atggctaaacaagtagaaaaactcgttaaattacaaatccctgccggtaaagcaacaccagctccaccagttggaccagctttgggtcaagcaggtgttaacatcatgggattcacaaaagaattcaacgctcgtacagctgaccaagctggtatgatcatcccagttgttatctcagtttatgatgacaaatcatttacattcatcacaaaaactcctccagcagcagttcttttgaaaaaagcagcaggtgttcaaaaaggttctggtgaacctaacaaaacaaaagttgcttcagttacaaaagcacaaatcaaagaaattgcagaacttaaaatgcctgaccttaacgcgtcatcagttgaaactgcaatgtcaatgattgaaggtactgcaaaatctatgggattcactgttactgactaa

SEQ ID NO: 620 - DNA, 366 bp, Lactococcus lactis
atggcattgaacattgaaaacatcgttgctgaacttgaaaacgcaacaatccttgaactttctgaacttgtaaaagcaatcgaagaaaaatttgacgtaacagcagcagctccagttgcagcagcagcaggtgctggtgatgcagcagcagctaaagattcattcgacgttgaattgacatcagctggcgacaaaaaagttgcagtaatcaaagaagtacgtggaatcactggtcttggacttaaagaagctaaagaactcgttgatggtgcaccaacaatgatcaaagaaggtctttctgaatcagaagctaacgaagttaaagaaaaacttgaagcagctggtgcttcaatcacacttaaataa

SEQ ID NO: 621 - DNA, 147 bp, Lactococcus lactis
atgagagtaaaaattacattaatttgtagttcttgtgggaacaaaaattatattagtagcaaaaataaagcaacccatccggaaaaagttgaaacaatgaagttttgtcccaaagaacgaattgttacacttcatcgtgaaggttag

SEQ ID NO: 622 - DNA, 150 bp, Lactococcus lactis
atgttaagaaaagctggattagcgtgcaccatatgtggttcacgaaattataccctcaatctttcgtcagttgcgaaagaaaaacgagttgaagttaaaaagttttgtcgtacttgtggcaaacacacattacacaaagaaacgcgttaa

SEQ ID NO: 623 - DNA, 495 bp, Lactococcus lactis
atggtgaatttaaaagaatatgaaaatgacgtcaatgattatgcgatagaaatcactaaataccttatctctcggggaagtcagttggtcgatgccgaagaggccgtacaggatactctggttaaaattttaagtctggatattttcattgaacctgacaaattacgggcttttatgtatcgaacatctatccgaacttatattaatagttataatcggagtaaacattatcaaaaaattattaaaaatttggaaaaagaattggaaacagcagcttttttagttgagtctagcccacttccaaaaatcattgaacaacttccaccttattataaagagcttttaaatgcatactattatgaaaattgttcaactaaacagcttgcagaatattttgaatgtagtttaagcaaaatcaaaatcgacctttatcgagctcgaaaaaagcttaaaaaacaacttgaaaaagctggttatgaccagtggctcctctaa

SEQ ID NO: 624 - DNA, 390 bp, Lactococcus lactis
atgaataaaaccatgttaattggacgcttaaccagtgcgccagaaatttcaaaaacaacaaatgataaatcatatgtccgtgtgaccttggcagtcaatcgccgtttcaaaaatgaaaaaggagaacgagaggcagattttatttcaattattatttggggaaaatctgcagaaactttagtttcttacgcaaaaaaaggaagtcttatttcaattgaaggagaaattagaactagaaattatacggataagcaaaatcaaaaacattatgtcacagaaatcttaggactgagttatgatttacttgaaagtagggcaacaatcgctttacgagaaagcgctataaagactgaagaaaccttacttgatgcggaagaactccctttctaa

SEQ ID NO: 625 - DNA, 354 bp, Lactococcus lactis
atggtcgttctttttttagctgaggaggcaaaaatgacttggatttatttacttatagcgggaacatttgaagtggcttgggcaacaacaatgaagttgagccacggcttttcaaatttgaagtttacactactgacaatcatcggaatgattgctagctttggttttcttgcgctagctctaaaaaaattacctttagggattgcttacccaatttggacggggatcggagccgttggctcaatcttaatcggacttattctattcaaagataaaatcccaccattaacttggcttttcattgcctgtttagtcgtgggtattattggaataaaagtaacaagcggtcactaa

SEQ ID NO: 626 - DNA, 1116 bp, Lactococcus lactis
atgaaaactaaatcaattattttgacaataattcttggaatcttttatcctttttccctcattttgagggtgaagaagaatcggattacttttatttctctggaacatgataatttatcaaaagattttaagttgatttatgatcgtttgaagaaaaaagatcaatatgaattgcggacagttttgttcaaatttgaatcatcactttggggaaatataaaatatggttatgcttgtattcgccaattatttttgattgaaagttcacgtttagtcattattgattacaataattttgttgtttccaagttcccacaccgtaagaatgttaaagttttacagttgtggcatgcgacaggcgctttgataaaatttggaaatgatgtggagcgagactatatcgttaatcattatgactatacgattgttaactctgattttttaaaaccaatttttgcgcgtgcatttaatgtcatagaggatcaggtttttgttactggaattccaaataatgataagattttcgaccaaaattttgttgacctgacttgtcagagattggtaggaaaatatcctcttttaaaaggaaagaaaattatcacatatgctccaacatttagaggacggattagtacgcattttaaggaagcactgattgatttagaaaagattcatcaggcaattggaaatgattatatagtcatttataaaagtcacccacttattcagcattcaaattatgaaaaaaatgaacatgttttatatattcaagatgagttgatttcctcactcttttgtgtgacagatattttagtgacagattattcggcaattgcaattgattggatggtctttaataaaccaattattgcttatagtcctgatttaatgacatattcacataagcctggatttacgattgattatgaaaatgaatttccagggcaagtcactaaaaatgaagatgagttaattaaagcaataatagctgttaatgatgaaacagagagtgatgatttgaaacggcaattatttactgataaaatgtataaatttagagatggaaaatcaacggaccgagtcttagatttgattgagtcaattatgagaggttaa

SEQ ID NO: 627 - DNA, 1188 bp, Lactococcus lactis
atgctaaatttattagtcaaaatgcgattattaatacttagaaaaatgttatctcttttccttttgattttagggaaatttgtaaaaacagattataaattggttattttcgcttcttttaatggaaaggcttattcagataatccaagatatctttttgaatatttaagagatcatgaggaatttgctagttatcattttgtctgggcttttaaagtaaaacggtccgttaatagggctaaggtagttaaatttaactcatttagttattattatttactttccaaagcaaagtattgggtatttaattcaaaaatggctccttattatcataaaaaaggggagcaggtttatttacaaacttggcatggaacgcctttgaaacgtttgggacatgatattttagataatggtattacttattatcgaagtcgtttatcttatcagcagatgcttaggagttatgacgaggatagtaggcattgggattatttgatttcgcctaatcctttttcaagtcaagcttttactagcgcttttaatctagatagagggaaactattggaagttgggtatccgagggttgattttttggtaaatgctgattctaataaatgcatggaactgaaacgccgatatggtctaccacttgataaaaaagttgttctctatgctccaacttggcgtgatgattcgtttggaataagaggatatagatttgaattggctgttgatttttataagtggaagaatcagttaggtgatgatacggttattttatttaaacctcattatttgatttctaatgtctatcagattccgaatgatttgagtaattttgtgtatcttatggcagcaagtgcggatattaatgatgcttatttaatgagtgatgttctaattacggattactctagtgtattttttgattatgcgaatttaaaccgtccaatttatttttatatgtatgactttgaacaatatgagcaagaattaaggggattctacttaaatgttcctgatgagttgcctaatgatgttattagaacagaaaaagaattgttgagaaggattaaagaagatatctttgactatgaccgtttgcaggtatttaatcaagtctttaattcatggaatgatggtaaagttagttctaaagttgctaagaggattttttatgaaaactaa

SEQ ID NO: 628 - DNA, 336 bp, Lactococcus lactis
atgattaaagtggtagaaagtattttttataatcaattaattagtttagcgcaaaagcattgtaaatctatcaatagggtagaaaaagatttaggttatccaagaaatgctttacataactataaaaaaggaggatctattccttcagggataagattaatggaacttgctaattattttgatgttactcccgaatttttaatcggtaaagattcactattaaagaaaaaacaggatcttacgagtagagagatatttgataacatgtcgttatcacagcggcatgaaatagccgagctttgtcaagaatggttattatcacttccttataattaa

SEQ ID NO: 629 - DNA, 555 bp, Lactococcus lactis
atgaaacttgctatggggctaccaattgggaagaaaatagttgcttatacacctacttggcgcgataaagatgaaacttcgataaataactttttaaacgttcaagagttttattcaaaaataccagagaatacagtgattgctattaagaatcatcattatcaatcgtggaaaaagattgataaacgatatgcagataaaatcatactgttggattcaaatacagaaattgaacaactttatcatatttcagatgcattgattacagattattcgtccgtgatgtttgattatagtttacttaataagccaatgattttttgggtgtttgattatgaaacttatgttaaaaatcgaggactaaactttgattttatcgctgaagctcctggtccagtaattttccaacaatctgaattatcgaaatggatagaaaactttaatagcataccaaatgaattttcaaataaaatccaaagttttagaaataagtttggtcaatatgatagcggtgatgcatgtgaaattattttgaagaaggtgttaaatgattaa

SEQ ID NO: 630 - DNA, 1371 bp, Lactococcus lactis
atgagaaaaattaaagaaatttcagcagacaccatgaccccgatttcggtttatcttcgcctgaaagggaaaaataaagtgattttagaatccattcccagagaaaatgaccaatcacgtttttcaattattgcgttgaatcctgtgaagcacatcaaatttactgacggaattttaagcgtaaatgacgaaatcattagcgatgaaaatccaatggaatttctggaaaaattagtttgtcagccagaaagtactgacgaaaatttagacttgccttttacaagtggagcgattggatatgctggatttgatacctatggtatttttgaaggcattcaacctgaactgaaagattcgattggaacaccagatatgtattttatgttatacgaatcagctctaatttttgaccacaaacgagaaaaactgatttttattgaagacaatacttacagtcagcgttcagaaaaagagttacaaaacgcgctgtcagcaaatattgagtcattatctttactgacagaagcagaaaatgaactgacagaattaagtaaactgaatttcgtcagcaatatgtctcaagaactttttgaagaaaaagttgctaaagcaaaggaacttatcagaaatggtgacatgttccaagttgttttatcacaacgtttaacagccgattttactgacaacccttttaattattacagaaagcttcgggttgaaaatccgtcatcgtatatgtactttatggaattcgataattttcatgtcattggcagctcaccagagcgtttggttgcagttcatggaaatcaagtttcaaccaatccaattgccggaacaagaaaacgcgggcaaactgaatttgaagaccaagctcttattgaagatttagaaagtgatcccaaagaagtcgctgaacacaaaatgcttgttgatttaggacgaaatgatattggtaaaatttccaaatatggttcaatcgaagttcctgttttcatgaaagttgagaaatatcgctacgtcatgcatattacaagtgaagtgaccggcgagcttcgtcctgaatttacagctatggatgccttacgcgccacattgccagcggggacgctatcaggagcaccgaagcatcgagcctaccaaagaatttatgaatttgaaacgcaaaaacgaggaatttatggtggagctatcggttatctaacgaaaaatggaaattgcgattttgcaattgccattcggacaatggtcttgaaagacaagaaagcacatgttcaagcaggagccggaattgtttacgattcagtacccgaacatgaatatcaagaaaccttaaacaaagcccaaggcttattgaaagttggtcaataa

SEQ ID NO: 631 - DNA, 966 bp, Lactococcus lactis
atgcaagaattagatttaattattgttggagcaggtcctgttggtctatatgcggctttttacgcaggaatgcgcggtttatcagttgcaataattgaatcagcgcaagttccaggtggtcaaccccaaaatctttaccctgaaaaattaatctacgatattgctggcctaccagcagtgacaggggcagatttgacaaaaaatcttttagaacaactagcacaaatctctcatcgattatttcttggggagagcgttcaaaaaattgaaaaagaagagggaattttttctgtaactactgataaatcaaccagaagagccaaaggcgttttgttgacgactggtgccggccttttgaaacctcgaaagttaggaattgataacgaagaaactttagccaatgaaggaaaaatatcttactttatcacttctctaaaagagtttgagggaaaaaatgttgcggtttttggtggaggagattcggctttagattggtcattaatgcttgaaaaagtagctaaaaatgttcatttggttcatagaagaactgcttttcgtggtcatgaaattacagttgaccgagtgatgaattctaatgttcaagttcatacgccttatactttttcaaatttgattgaaaatgaattagaattaaaaaaaataaaatcagaagaaagcttgaacttttcgattgataaaattttggttaattatggttttttaacaaatcaagtgactttagctgaaaacttagaagtcagtcgtaatggtcgcgttaaggccgattcaatgatgcaatccaatattgagggactttatgtcgcaggagacgcaagtgattatccgggaaaaatgcccttgatgtccgttggttttggtgaagcagtccatgcgattaatgccatgacgaaaaaacttgaatttgaccacccacttagagggggacattcttcatctattttttaa

SEQ ID NO: 632 - DNA, 621 bp, Lactococcus lactis
atgaagaaaacgttgattattggtgtcactggtgggtcagcaagtggaaagacaagtgtttcacatgctattttagaaactttttcaaatgaacgaattgcaatgattgaacatgatagttactataaagatcaatcgcatttgacttttgaagaacggacaaaaacgaactacgaccatccattagcctttgatacagattatttaattgctcaattaaaagagcttcagtatggacgagcggttgatattccgatttatgattatgcaaaacatacgcgttcacaagaaacttaccgtcaagaacctgttgatgttttaatcgttgagggaattttggttttagaagatgaacgtttgcgtgatttaatggatatcaaaatatttgttgatacagatgacgatgtgcggattatccgtcgaattcgcagagatattgaagaaagaggaagaactcttgattcagtaattacacagtatttagatgctgttaagccaatgtatcatcaatttattgaaccaacaaagagatatgcagatgtgattattcctgaaggggtctcaaatactgttggggttgatattattacgacgaaaatcgctagcattttaaacgactaa

SEQ ID NO: 633 - DNA, 1077 bp, Lactococcus lactis
atggaaatgacaatgcgttggtttggttcaaatgcagataagataaaactttctgaaattgcccaagttccaggtgttaaaggagtcgttggaatgattatggacattccagcgggagaaatttggccaaaggagagaatcaaagcacttaaagaggaaatcgaagccgcaggtttaactttaaaagtaattgaatctgtcaatattcatgatgatatcaaaattggcttgccaactcgtgataaatatattgagaattataaagaaacgattcgaaatcttgctgagtttgggattgaagtgatttgctataattttatgcctgtatttgactggttgaaatcagatttggattatcgtttagctgataattcacaaactatggcttttgttgctagagatattccagcaaaccctcaggagataattgaccgcgttcaagcagcggatggttgcttttcactcccaggttgggaacctgaaagattatcagaagtcagaggactctttgaggcatacaaaaatgtcgatgagcataaattgcgtgaaaattttgcttattttttaaaagcaatcattcctacatgtgaagaagttgggattaaaatggcggttcaccctgatgaccctccttatcctatgtttgggcttcctcgggtggtgaaaaatcgggaagatttagattggatatgtaatgttgtagatagtccgtcaaacgcgattacgctttgtacggggtcgattgctgaagatccagctaataatgtctatgaaattatggctgaatttgtcaaaagagaccgaattccttttgcacatgtgcggaatattaaatttttgccaagtggtaaaaaagatttttacgaagctcctcatatgtcgaagtatggttcgcttgatatgtataaaataatgaaagccatgtatgataatggttttgatggctatattcgtccagaccatggtcgaatgatttggggagaaacaggacgcccaggctacggtttatatgaccgagcacttggagcaagttatcttaatgggctttgggaggcgcttgagaaaacgaatcagtaa

SEQ ID NO: 634 - DNA, 1635 bp, Lactococcus lactis
atggtgaaattgcttgatgattatttgataaagggtgaggaatttaaaaaagcaaaaattaaaattcctaactttaatcaagacaaagttatagagtcaacagctgataatccagtctgggtccactttggtggaggaaatctttttagatgtttccatgcggttgtcgcccaagacttactcaatcaaggagaactcaactcaggtcttattgtggctgaaacttatgatgatgaggtaattgataaaatctatcgggcatataataatcgttttctgtcagtgacaatgaaatcagatggaacttttgacaaagaattgattgcgagtgttgctgaaagtttttattttaatgcagaaaataccgagggttgggctcatttaacaaaagtctttgaaaatccgtctttgcaattgacaactttttcgattacagaaaaaggttattcactacgggattcaaaagaccaattgacgcctttggcacttgaagatatgcaaggaagaagcaagcccaaaaccaatatgggggccgttacttatctcctttatgcaagatttaaagctggtaaatttccgattgccatggtcagcacagataatttttcagagaatggtttgaagttacaagaagcgattttgaccattgctaaagcttgggtggaaaatgaaatcgtagaacaagatttttatgattaccttatcaatcctaaaaaagttagtttcccctggtcaatgattgaccgaattacacccaatccgtctgaaaaagttgcaaaattactgacagctgatggttttgaggatacagaaattttacatagtcaaaaacatacaaatattgctccttttggtaatacggaagaagttcattatttggtgattgaagatgctttcccaaatggccggccggcattagaaaaatctggagttatcttgactgatcgtgaaacagtcaatgatgctgatcagatgaaagttacagcttgtttgaaccccttgcatactgccttagctatttttggaagtttattagattatcattcaatttgggaagaagttgccaatccagatttgttagcactcattaagaatttggggtatggcgaggctttacctgtggttaagaatccgaaaattatcaatccgaaagattttattgaccagttattgactaaacgtttaccaaataaaaatattccagatacaccacagagaattgcggcagatacgtcacaaaaaattcctgttcgctatggcgtaacaattggacactatattgccaatccaagattttctgttaaagaattggaatttattccattagtcattgctgcttggtgccgttatttaatcggaattaatgatgagttagaaagtttctctccaagtcctgaccctcttcttgaagagttgcaagcttttgttgccgatgtaaaattagatggtagtcagcaagaaattcatgaaatcctaaaacctatcttatctaatcaccaaatttttccaaatgagatgtaccaaacaggactagctcaaaagattgaaaattactttgagcaaatgcttcaaggcaaaggagcagtgcttaatacgctacaaaatgtcctaaaggaacacggaaaaaattactga

SEQ ID NO: 635 - DNA, 594 bp, Lactococcus lactis
atgaagttattagaagaccgcattcatacagacggtcaagtattaggacaagacattcttaaagttgaccgctttttgacacaccaagtggattatcaattgatgaaggaaatcgggaaacgttttgcacaggtttatgcaaatgcaggagttacaaaagtcgtaaccattgaagcaagtgggattgcccctgctttatatgctgctgaatcactcaacgttccaatgatttttgctaaaaaagcaaaaaatgtaactatgaatgatgatttattgattacagaagtttattctttcactaaaaaattaacttcaactgtccaaatttcaagcaaactcattgaagaaggcgataaagtcttgattattgatgactttttagctaatggtcaagcagcacttggtttggttcatttaatggaacaagctaaagcagaagttgtcggtttaggaatggtaattgaaaaatctttccaagatggccgtcaaaaacttcttgaccaaggaatgaaacttaccagtcttgcccggattgaaaaatttgaagatggtaaagtcatcttcgccccagccgatgataaagatttcgactaa

SEQ ID NO: 636 - DNA, 1506 bp, Lactococcus lactis
atgacttacgtgttaggaattgacttaggaacatcaagtcttaaaggaattttgatggatgaagttggtaatttaattacaacaaaatctgctgaataccaaattgatacgcccaaacaaggctattctgaacaacgtccagaatattggattgtggcacttgaatcagtactgaccggtttgtcagtagaaatttcagattttggtcagcaacttgcaggcattagtttttcggggcaaatgcattcattagtcgttttagatgacaataataaaccagtttatccagcaattctttggaatgatgtgagaacaagcaaacaatgtcaagaaattactgacagacttggtcagcgacttttagagattacaaaaaatattgctcttgaaggatttaccttaccaaaaattctttggctccaagaaaatgaaccagaggtttggtcaagagttaaaaaaataatgttgccaaaagattacttgagcctttggctgacaggaaatatttataccgaattttctgacgcagcaggaactttacttttagatattgagaaaaaacaatggtcagaggaaattactgacgcattcaatattgataggagaattctacctgaattgattgaatccactgaccgaacaggatttgtcaaagcagaaatagctgaacgctataaactgacaaatgaagtaaaagtatttgctggtggagccgataatgctgccgccgctctgggtgttggtttaatcaatgaagaagtgggcttgatttcaatgggaacctccggagtcgtttccgcttatgaacctaaaattgcagattataaaggaaaacttcatttctttaatcacacggttccgggtgcttgttactcaatgggagtaaccttggctgccggaaattctttaaactggtataaggaaacttttggaaaaggcttgagtttcaatgaacttttgtcagaagtttacacagtttctcctggttcagaaggattgctctttacgccatatattgtaggtgaaagaacaccacattttgattcaaaaattcgcggaagttttataggaatttctgctcatcatgaacaaaaacatttttcaagagcagtgcttgaaggaattaccttttcattgcgtgattctaaagatatcatggaaaaaacgaaaaacaagaagtttaaacgtttgatttccgtaggtgggggtgcgcaaaatcccgacattatgcaaatgcaagcagatatttttaattctgaaatgattcgcttaacggttgagcagggaccgggacttggtgcttgtatgattgctgcttttggttgcggactttttgatagcttagaagcggtcactaaagcttttgttcattacaaggaagccagtttcataccaaatccaaaaaatgtagcacgttatgagcaaatttatcaaatttggaaacaagtttataaaaatacctctgaaatttctcatcaattagtagaattcaatgacgaaggttaa

SEQ ID NO: 637 - DNA, 186 bp, Lactococcus lactis
atgccatatgtccatgttgaactttttgaaggtcgtacagttgagcaaaaagctataattgctaaagaaattactgaatcaatttctaaacatgctggagcacctacttcagcaattcatgtcatctttaatgaccttccagaaggaatgctctatcaaggcggagaaatgaaaaagaagaaataa

SEQ ID NO: 638 - DNA, 1680 bp, Lactococcus lactis
atgtcacttattcaaaacccaattcttcccgggtttaatgcagacccaagcattattcgcgtagaagatacttattacatcgcgaactccacttttgaatggttccccggtgttcgtttacatgaatcaaaagatttagaacattggagcctacttccaagtccattgtcgacaaccactttgttggatatgagaggaaactcagcttcaggtggaatctgggctcctgacttatcttatgcggatggtaaattttggcttgtttatacagatgttaaggttgtcaatggtgctttcaaagatatgaccaattatttaacaacagccacagatatcaaaggaccatggacagacccaatcaagctcaatggtcttggctttgacgcttcacttttccatgataaagacggacggaaatacttagttcaacaaacatgggatcatcgtgaatacaagcatccatttgacggaatcacattgactgagtttgatatgacaacaatgaaattacaacctaaaaaagctaaaacgatttacaatggtacaaatgtcaaattagttgaaggcccacatctctaccaaattaatgattattattatctttttgcggctcaaggtggaacagtctttacgcaccaagaagtcgtggcccgctctaaaacattggatactttatcttttgaaactgaacccggcgatccatttattacaaacttcgatactcctgataattatattcaaaaacaaggacacggaggtcttgtatctacacccaaaggtgagtggtattatgcttccttatgcgctcgaccatggaatcataaaaatgaatcaagcacagaccctcgtggttggagctctttaggtcgtgaaacttctatccaaaaagtggaatgggacgaagaaggttggccacgtattgttggtggtcatggtgggacaacttttgttgaaggaccaaaagatgcaattcaaactaatgcacctgctgaacacagtcaaaaagacgattttgcaagttctactttggatattaactggaatacattgcgtgtcccatttactgagaaaatgggttcagttgggaatggcaagttgacattaattggtcagggctctttggcaaataattttgatttatctttgattgctagacgttggcaagctttctattttgacgcagaagtcaaagtaaaatttgacccattttcttaccaacaaatggctggattaaccaactattacaatgaccgccattggtctttcgtctttatcacatggaatgaagtcaatggagctgttattgaagtggctgaaaataacagaggaaactatacttcttatttaaaagataatgccattaaaattcctgacggaactgaatatgtttggttccgcactaaagtccgtaaagaatcatattcttatgaatatagttttgacggcaaaaaattcatagaaattcctgtagtcttagatgcggctgtcctttcagatgattatgttttacaaacttatggcggattcttcactggagcatttgtcgggcttgctgccgttgattattctggatatgatagagttgcagaattttataactttgactataaagaattaggagacaaggtcttaccagacggttcttatacttggaaagcaagtgaatcaagatttgattag

SEQ ID NO: 639 - DNA, 558 bp, Lactococcus lactis
atgctcggagaaaatttacaaaaagctcgtcttgcccagaagctcacacaagaagaagttgcaaaagaactttattttagtagacaagccatttcacgttgggaatccaataaaactgaaccaaattttgaaacattgattgccctagccgaattatatgaatcagatttatcagcttttgctcaaggaattgaaccacaaaaaagaaagaaacatatcaacctctttgctggttttggcttagtcttttttaacttcgttcttggtttctggttgataattactactgctttgattcttttggctctctatgctattatattagctttattccttgctccatttattatgattttcgctgttgctactcataacccacatattacttttgggaatgcgaatggagcaacaggttttgactggtggtactggttagttgcgattatcgcttgttcgctgatggttcttgttagccctttgatttggcgatttacaaagttactttacttttggcttattaaatacctcaaatttaatctcaaatcggtttataattaa

SEQ ID NO: 640 - DNA, 282 bp, Lactococcus lactis
atgaaatattttgtgacatctctgtctccatccaaaaatatgggcacaatgaattggcaaacgatgatattagataaacatcgtgtagaggattcctactgggaaaatgcaaaattagaattatcgaaagaagttgaatgggttacgcaaagcgaactttataaaaaagccaaacgtaacgatggttcaggagatgatattatattatcattacctgtaagcataactttagaaacaataaaatctgattttcctaatgcaaatgtttgggtatataaataa

SEQ ID NO: 641 - DNA, 369 bp, Lactococcus lactis
atgctactggaaaagtatatttcatatttaattttgtggaaaaactacgacaaagccaatgaactattgaaagttggtttattattatatccgaataatatggcattcatatttttcaagggaatgattcaaattgagagtgttaaaaatttaagtaaaacttatctaattagagatttaaaaaaatatatagaatctgataagcagactctatgtgattcaagctatagagatacctcaagtttagaattaattattgcagaacttaatgagcttgctggtaaaaagaaagtggctaaaaaaattataacagaaattaacgatgataatttgaaatatttttgggatcaatggaatgataatctttag

SEQ ID NO: 642 - DNA, 315 bp, Lactococcus lactis
atgtgttattttaatgttaaaggcgctacaaggatgataagtggagaggaaggttacagtctcattttgatattgattttacctagccaaattaatattaatttctggcttattttgacgagtaagcaaactagcggttcagtttttaatattattgccctaccaattttgatggccttgcctaatctaattcaacgggtgatgacctcaaattctatttattggactaaacaaaaatatattattctgatattgaattatattttacttttagtgacaactttttggttgctaacattaccttttggacagtaa

SEQ ID NO: 643 - DNA, 321 bp, Lactococcus lactis
atggatttttctaaatatttcaagaaaaagaatgacagtaaggtaaaaaatttttcaaagttagaaatttttgagaaagtcaatgacgaagaattgatagaggtttctggaggaaatttttctagtaatcttcgacaaaaaagggctatagcggggctgacacaaaaagaacttgggaaactgctttattcgagtaaacaagctgtctgtaattgggagcacgggcgacgtgaaccgagtttagaagttgttcaagagatggcaaatgtgtttaaatgttcaatagatgatttgttaaaagatagtgaaaatataaactaa

SEQ ID NO: 644 - DNA, 1053 bp, Lactococcus lactis
atgaatgcgaatacaaaaaataataaagaatttttagatttagcaacttatgcctttcataagcctaaaacaaaggaacgggcaaaagcttttgacaaattacttgaattttcaactccttatggccactacgaaaatcaaaaactgacgtcaatggtgattgactcacactttaatgtttattggaaaaatcaagaagtcaaaacttctggaattggttatgttgccagttatcctcagtttcgaggcaatggagccattcgacaattaatgaccaaaagtttgcgagataattatgaaaaaggagtgattttttcatatttagcaccattttcatatgctttttatgaaaaatttggttatcattatgcttttaatcaaaaacattatcgactagcagctcaagattttcctaaaggtaagagaagtgcgggcgaaattagtcgagaaaagtttgagtttgatgatgaaaatgctagtgaattttctatcagtaaaaatacagccctttttaaagtactgacagaagttcatcaaaaggctgataatcaaggctcacttattcgctctccagaactttggtcttactttttcagttttaaatcacaacctcactgtgcgatttatcgcgaaaatggtaaggctttgggctatcttctctatgaattttcagaaatgacatttgttatcaaagaactgataactttgactgacgaggcaaaacaagcattttatcgttttatttcaagccatgctggttcattttcggaaattagttggcaagcaccctcagatattctccttgaagaagaactgacagagccacagcgagcagaaattaaacttgttccttatatgcaggcacgaattgttaacttacaggaatttttaaaagtacacggtcagcccgatttttcagttgaaattactgacgaaattattcctgaaaacaatattagtctcggagaaggaaaaagagaaaaaatgaccattggccaatttacggcaaaaattttaaaagagaatcaggcgattcttcgtgaatatttttaa

SEQ ID NO: 645 - DNA, 180 bp, Lactococcus lactis
atgtttttggcaggtttagttcttgcaataggaaaacatgcccccgcttcgtatatttttctagccattggagctactttattaattggttttgctgaagaactctcttttagaggtttgatttttggtattttagttaaaaattctaaagataagattattgttcctttatttatttaa

SEQ ID NO: 646 - DNA, 546 bp, Lactococcus lactis
atgaaaaaaacaagtcaagaaaaattatatgaagcagccttggaattgattacagcgcaaggttatgagaatacaactgttctacaaattgccaccaaagctggtttaacagagcgaacattttttcgtaaatttaaaaataaagcagatattttctttgctggcggtgagcaatacagccaaatgttactgacaaaaatgaaagaatcaaaagcgaataatcctttggctattgttcttgaaagttatttttacgctgcagacttctttgatgaacatcgagaaagaacagtcaaaagacaaaaaataattgccagtcacccagatttggaagaacgcgaacttttaaaacaaagcaaaatcgaagaactattagttgaatatttactgacagcttatggtgaaagaagtgcaagattagctgttcgcctagctcgagcagtttatagtgtggcttgggaagaatggttagaaaatgatgctgacagtttacatcatttattagaaaaagcaattgcagactttaatgaactcaaaaattactga

SEQ ID NO: 647 - DNA, 564 bp, Lactococcus lactis
atgtccgctttctttttaaatatgaaaaaatcaatcattacacaaaaaattattgcaaaagcttttaaagacctgatgcaaagtaatgcttatcaccagatctctgtcagtgatatcatgcaaactgcaaaaattagacgacaaactttttataattattttcagaaccaagaagagcttttatcttggatttttgagaatgattttgccgaattaattaatgataattcggattattatggctggcaaaatgaactcttactcttattacgctacttagatgaaaatcaaattttttatcaaaaaatatttgttatagataaaaattttgaacactttttccttattcaatgggaaaacttacttgataaggttatttttgaccaagaaaaaaagtctgactatcattggtcagacttagaaaaatcttttatatgtcgttataatgctgcagcaatttgtgcaataactagagaatcaatcattagaggaaattctttagaaaagctttattctcagattgtaaatcttttacttgctcaaattaaaatttttgaaagctga

SEQ ID NO: 648 - DNA, 372 bp, Lactococcus lactis
atgacttatggaattgtaatcgtttctcattcccctgagattgcctcaggactaaaaaaattaattcgtgaagtcgctaaaaatatttcgctaaccgctataggtggtttagaaaatggcgaaataggcacctcatttgaccgagttatgaatgctattgaagaaaatgaggcagacaatctcttaacattttttgatttaggaagtgctcgaatgaatttggatttggtttctgaaatgacagacaaagaattaaccatttttaatgtcccgctcattgagggagcttatacagcgagtgccctcttagaagcaggagcaacttttgaagcaataaaagagcagttagaaaaaatgctgatagaaaaataa

SEQ ID NO: 649 - DNA, 1836 bp, Lactococcus lactis
atgctaacgattggaaggcgatatttaaatttttggcctgtattttgggcactttttttgttagttattcaagttgtgactaatctttggcttccaacgattacagcggatattatcaataaaggcattggtcaatctgatatgaaatatatctggtttatgggtctaattatgcttttcgtttctctggccagttggctttcggcaattggaaatgtttattttgcttccaaacaatctcaaggattgggactgaaattacgccatgatttatttaagaaagttttattcatggacgagcgcaattttcaggaatttggtgatgcaactttaattacacgtacaacaaatgatgtgactcaattgcaaaatgtctttcaaacgatgttacgaatgatgctcatggcgccaatgatgctcattggttctattttcatggcttggaaattatcacatgatttactgctggtttttttgattgccctgcctattttaactttggctgtcgtcattaatattgctatttccatgccacggtttcggtcaatgcaaacaaaagttgataaaattaatctgatttttcaacaaggtttaactggtgttcgggtgattcgtgcttttagacgagaccaatatgaaattgataaatttgatgaggctaaccgtgatttgacacataccagtcaagtggttttgacgacgattgcgatgttaatgccaattatgacagttattctcagttttacaaatattggaattgtttggtttggcgctcatcttatcagtaaaaatatgatggaaatgggttcattagttgcctttttgacctatgccacacagattttgatgtcatttatgcaattatcagcagttgctgtcatggtgccacgagctcaggtttcagctgttcgagttcgagaaattttagaatctaaagataaaattactgatgaaaattcgagcatatccgtagaggcgctaaagcgccaacggctatcctctgacggaaatgacaagttgtctgaaagcaattctgtccgcaattctctagctcttaatcatgtgtctttcaaatttgatgaagcaaaaagacaagcgctaagtgacttgtcagtaaatgtagcagctggtcagaccttagcaattattggggggactggttctggtaaatcaacgattttgaatttgattgccagattaattgacccgacaaatggaagtgtcacaattgatggtactgatattcgccaaatttcacagtatgacttgcatgaaaaagtttcttttacgcaacaaaaagctcaacttttttcgggaactgtccgctcgaatcttcaatttgggaaaagtgatgcaacagatgaagaaatgtggcaagctttggaaattgcacaagctgctgatttcgttcgtgaacaaggtggacttgagctggcggtcgaacaaaatggcgcaaatttctctggtggtcaaaaacaaagaatttcgattgctagaaccttgattaaagaggcagaaatttatctatttgacgattcattttcggccttggactttgctactgacagacaattacgaacagctattaatcactcggaaaaacataaaaataaaatcaaggtgattgtggctcaaagaatcgcaaccgttatgtcagctgaccaaatcttagttttagaaaatggaattgccgtaggacttggtactcatgaaagtttagcaaaatcctgtccgcaatatcaagaaacaatgcaatctcaactctcggatgatgatttggtcaagatgggtgtttcaattgcacatttgaccgccagaggaggtgatgaccaatga

SEQ ID NO: 650 - DNA, 1185 bp, Lactococcus lactis
atgaatgaccaaattgaagaaaattatgcaggacatgcggtcattaaaacattcaatcatgaagcctcagctgaaaaagaattcgcaaaaagaaatgataatttttataaatcagcttggaaagctcaatttgtatcgactttgatttatccaaccatgcgatttgtcaataatttagattacttagccatggccgtaattggtggtcttaaagttatttcagggacggttaatctcggagatgttcaagccatgttgcaatataccaatcaatttgcacagccaatcacaaatatctcgaatatgctcaataccattcaggctacagttgcgtcagccgaacgaatttttgaagtattagatgaaaaagaaatgactgacggaattcctgtcagtgaaaaagttgctgacgaaagttcaaaaaaagctgtcagtaatttaggagcgactgacaagactgatttcatcaattttgaccaagtcgcattttcttataatgaaaatcaatccttaatgacagatgttaatttttccgttgaagttgggcaaatgattgccattgtgggaccaactggagcaggtaaaacaacaatgattaacttgctcgaacgattttacgatgtcacttcgggaaaaattttacttgaaggaaaagacattcgcgaaattgaccgtgaacaattacgtggacgaatggcaatggttttacaagaaacctggttgttctcagggacaattatggataatttacagtatggtcgtcttgaagcaacacaagaagaagtgattcaagcagctaaaatggcacatgctgatgaatttatcaccactttacctcaaggttatcaaacccttttgaatgaagccgcaagcaatatttctcaggggcaaaggcagttattaaccatcgcccgtgcctttttagcaaatccagaaatattgattttggatgaagccacatccagtgtagatacaagaacggagcgcctgattcaatcagcgatgaatcgtctattaaaaggacggacaagctttgtcgttgctcaccgtttatcaactattcgtgatgccaatcagattttggttatggaaaatggaaatattgtggaaatggggaaccatgaaagtctccttaaagaaaatggattatatgccagcctttataattcacaatttgcaaaataa

SEQ ID NO: 651 - DNA, 219 bp, Lactococcus lactis
atggctggaaccactattgttacctatagttctaatcataatgggtcaatcaatttttataaagatccaaatcattaccaagatgaaagatatcttaaagattctgcttgggtaaaagaagaatctcgaaaactattggacagtagccaaacgcttgccattccaacttcatttgatgaacaagctgctcaaatcatttctaagatagaaattaaataa

SEQ ID NO: 652 - DNA, 138 bp, Lactococcus lactis
atgactactgcttatctgctacttggcaatgacaaatcgctagaaacacccgcaggattaccaattggaaaaatatttgcttacaaagaaatggaaaaactttggttaaaaaaaagctcaagtgatagttggcaatga

SEQ ID NO: 653 - DNA, 351 bp, Lactococcus lactis
atggcagaaataccaaaggaaatgttacgcgcccaaaccaatgtcattttgctcaatgtcttaaaacaaggggataattatgtttatggcattatcaagcaagtcaaagaagcctcaaatggagaaatggagcttaatgaagccacgctctatacaatctttaaaagacttgaaaaggatgggattatcagttcttattggggagacgaaagccaaggtggccgtcgtaaatactaccgcttgacagaaattggtcatgaaaatatgcgacttgcttttgaatcttggtctagagtcgatgaaattattgaaaatttagaagcaaataaaaaagatgaatctaataaataa

SEQ ID NO: 654 - DNA, 471 bp, Lactococcus lactis
atgatagataaaaaatttgaagataagttaaataaattgcgtgagatgtacatcaataaacgtcctgaagaatctgaaaaacttgatgatagtaagaaatttgaagctttcatggccctttcggatgaagaaaaagaagaaaagctcaacgctaaacttgaactacttactgataagctcgttacccttgatgaaaaattaggggatttgttggctaaaaatgcaagtgccgatgatatttctgagcttaaatattatattgatgcagttaaaaataaaaaattaattcttgaacaaaaacttgaattaattaaaaatggtgagtttgatgctgctcgtaaagaacgtgtaaaacgtcaactcactgatttggaactcaaacgttgtaaagcgcttttaggtaaaaaagactgctcaaaaatcaatgaaaaaattgctttgaagaaaaaagcaattaatcgtttgaaataa

SEQ ID NO: 655 - DNA, 636 bp, Lactococcus lactis
atgaatggaattctaatttcccttgagggacccgatggagcaggaaaaacaacggttttaaaagaaattttacctgaaatccaaaaaatgaagcgcgaaattgtcccaactcgtgaaccaggcggtgttcgagtggcggaagaaattcgccaaattattcttgatccaaagaatacagatattgattctaaaaccgagttaatgctttttgcggcggcgcgtcgtttacatatgcaagaaaaaatgttgccagctttacaagcgggtaaagttgtcattgttgaccgatttattgattcatctgtcgcctatcaggggtatggccgtgatttgggtgtcgaagttgttgattggcttaactattttgcaacagatgggttgaagcctgatttgacgctttattttgatgttgatacggatgttgcccttgagcgaattatgaaaaatcgagctgatgaggtaaatcgtttagatttggaaagagctgagatgcatcgtaaagttcgtgaaggttatttggagattgttgtaaaagaacctgagcgttttgtaaaaatagatgcaagtcaacctttagaaaaagtggtagctgatacactttccgtcctcaaaaaaagatttgtcagtgaattttaa

SEQ ID NO: 656 - DNA, 990 bp, Lactococcus lactis
atgaatatctctgagaaaaaaatgtcaatcaaagtgccaggaaaacttttttttgcgggagaatattcggtcacaaaagaaggaaacctcgcccttatcacaacaattgaaacaaattttgaagtaagaatttcagctactacagggaaatcaattttcaaaacaaatgttggactatctgattttgaattttctttgtctaaaattgaatttactaaagaaaatccgtggaattttgcactgacagctttaaaaaatactttgtcagctgctgacagctttgaaaaaaaatctgtcagtaaaattttatcatcatctccagaaatttctcttgagattgtcagtgatttaggctttggtgaaaataaaaaaggctacggctcaagtgcttcagtcgtttgtggtctagttaatgcagtcaatcagttttttgatttccagttgtcacttgaaaaacgttttgaaattgccgcaaaaacacattttgaagttcaaggctcaggttcaatgggcgatattgctgctattatgtatggtggttctgttttttatcaaaatcataagcgagtcatacctctcgaaattccttgggcaacttatgtggttcaaacaggaaaagcggcaaaaacgagtgaaaaaataaaaataaagctttctgatgaattttatcaagcttcaaatgagctggtcattgaattggcaacggcgattgacattcaagattttgctttattcaaagaaaagttatcagaaaatcaacttttgcttttggagaatattccagaaggttatatgactaaagaattagctattgctttaaacttactcaatagctatcctgaatttgctgctaaaatctctggggccggttttggggagaatattattttatttgctcaaaatacccaagctattgctgaagtccaaaataaattatcggaatatggaatcaatcttgaaaaatttaaggttgctcaaaaaaataactga

SEQ ID NO: 657 - DNA, 201 bp, Lactococcus lactis
atgaattgctcaaaaatcataaaaaacaacaaaaagaatatcgtcgcagaagaagataaaaagccatttaaggttttttattttgcccaaatttttgaaaaactgtcagtaaaatttactgacagcttttattttaaagactgtgataatgaaggagataaactttttgaagtggcaacactgaaattttctaaagtttga

SEQ ID NO: 658 - DNA, 1386 bp, Lactococcus lactis
atgaagctttggataaaaacacttctcatgcttggaagtattattttagtaacggcaattgctgcaggcggatatacattaaccgttctgaacagtacaacaaaagcctttaaaatgacttacactaatgctgggaataaaaagacagaacaagtcattcaggcaactgaacctctaacaatcctacttatgggggttgacacaggaggcgaagggcgtggaacttccgattcatggaatgggaattctgactcacaaattctgatgacgcttaatcctaaaacgcacacgacaacaatggtttcaattgaacgtgatacgatgactaacattttagatgctgacggaaacattgtttctaagcaaaaaatgaatgcagcatatcccttaggttataactcagggtcatcttctgacggtttaaaaaatgccgtaagttatgctatgaaaactattagtgctcagactggtattaatattgacagttttgtaacagtcaattttgatgggctagtcaatatggttgataatgttggtgggattgatattaacaataccacaggccaaactctctatatttcagatacagagccgcaatatactgcgaaagttccacctggaaaacaacatattaatggtgaccaagccttagtttatacccgtgaccgacatcatttatcaaatggtgactatggtcgggcagctcaccaacgtgaagtcattgcagcactcatgaagaaaattttagccttagataatatcacacgctatgaacaatttttgaatgaagcctcaaaagattttagaactaatatcccaattaatgcttcaacaattacttcattactaggttataaagattgctttaacaaagtagtttctattcaatatgaaggcgttggtgaaatggttgatggtgcttcttatcaatttatgccaacagatatttatctcgcgatgcaaaatatcatgaagaaatcgcttgatgaatcaacagtgaccactttgccaagcagtttgattacttatgaatcagtttttggctcaggaacagcacctttttattatcttccgtcagctactgtaactgaaaaaggaaaatcaacggtgacttatggtgttgatacgcaaggaaatcttgtttctttgaattctaaaaattcagggaattatgtttcgacaagtggtggctcagttcaatcagattcaagttcgggctcctctagctcatcaagtgattccacggcaacctcaagttctgattctacttatcaacaagataatacttacaatgatggctataataatagtaatgacagtacaacatctagctatggaacagatgatacaaacacagggaactatggctacggtacaagtcaataa

SEQ ID NO: 659 - DNA, 543 bp, Lactococcus lactis
atggatttagaaaagcttaaaaaagacacacaagtcattatcgatgatgtcataaaacaaacagaaattaaagctggtcaagtctttgttcttggtttatcttcatcagaagtaaatggtggtttaattggccatgccagttctagtgaaatcggtcaggtcattgtttctgtcatacacaagacattgtcagacaaaggaatctatctggcggtccaagcatgtgaacatcttaatcgtgccttactcattgaagaggaattagccgaaaaaaaagactgggaaatcgtttctgtgattccgcaactccacgctggtggaagtggtcaagttgccgcctaccaactctttaaatctccagttgaggtagaacatattgttgccaacgccggtttagatattggtgatactagtattggaatgcacgtaaaacacgtccaaattcccgttcgcccaattttaagagaacttggtggcgctcatgtaacagctcttaaatcacgtcctaaactcattggtggagaacgtgcgaggtacaaataa

SEQ ID NO: 660 - DNA, 873 bp, Lactococcus lactis
atggctccaactccaattaataaaaataaagtcgtctgtcttgttaacggtcgtgttcatcgccggtcaggaggagatttccttgagaatcttgaccctagccttcaaaccgttatcatgcgcgattacccagaagcaaccagtcatgatttcatctgtaatgaacatcaggttaaattccgtttggaggtcttagataccctttttcatcttgacttgcaaaaaaactttaccgttaatgatttacttaatgaagaattaactaaggcaaattttgagattcatgacgtggaagaacaacttcaaacccaagaaactatcggtgaacgtgtggctgataaagttactgaatttgtcggttcgtgggctttcattctaacttatcttggaattttagtcgtttggatgtttgttaatgtctctggtattttcggagttgagtgggataaatatccattcattctcctcaacctttttctatcgattacggccgcaatgcaagcccctttgattatgatgagtcaaaatcgtgctgcacaccatgaccgcttgtctgctaaaaatgacttccaagtcaatgttaaatcagaaaaaggggtagctgccctccatgaaaaacttgaccatttgatgatggatgatcaagcttcaaatatgcaaattcaaaaaattcaaaccgaaatgcttggagatatccaaattcttcttaacgaagtttatcaacaaaaccaagatattcgtgagcgtttggatgatgtcgaagatcaacttgatgattttgaagaaacttttgatagttttgaagaaactcttgacagtattgaagaaaatactgacgatgaggaagaagaaggcatggctaatgctgattaa

SEQ ID NO: 661 - DNA, 186 bp, Lactococcus lactis
atggcgaaagataaaataaaaaacttagaaatcccagtcgctgaaaacgagaggaataaagcagttgaaaatcttctctcattaaaagaatactttgataatcaacttcaatcagaccaagaaactcatcaagcaatcgcgacattaggtgataagttgggcgttctgtggaatgccgacaagtaa

SEQ ID NO: 662 - DNA, 489 bp, Lactococcus lactis
atgagtaaaaaatattattttgaaaatgttgacgaacttgttcaacatttaatatttaaatataaagaactgagcccgctgaaattacaaaaaagtttgtattttttgtttgcattttatgcaggtaattatcaaatctctgaagaacagggcgttgctgaaagtgattatgattacccaaaatatttattcaaagctgattttgaagcatggacttatggcccagtaattcgtcatgtatatgataaaaataaaaaggacgaatatatggcaaaagaattcaactttgaaggcaatgaaaatagcgaaatttcaaagtttatagatgatgtttctgaaatgattatggctaaatcggactttgctttggttgatagaagtcatgatgataaggcttggaaggatgcaattgctattgggaattcatcaccaatgagtgaagaggtaattgcaaatgagtacaaagaattattcaaaaatatgggataa

SEQ ID NO: 663 - DNA, 183 bp, Lactococcus lactis
atgttgacaactagagaacaatatcgtataatgaaactgcttacaaaacattataaatcttcaaaaattactttgaagattttgcttgggcgagttacggttggctcgtcctgcctgccacaagtcattcttcggagtggctttttttatatcaaaaaagcactagcattaagccagtgctga

SEQ ID NO: 664 - DNA, 810 bp, Lactococcus lactis
atgaaaataaaaaatataaaaaaatcctatggtaacaatcaagtgctaaatgatatcagttttgaattaaaagctggcgataaggttgctttattaggtaataacggtgcgggaaaatcaacattaatgaatattattaatggaaatgtcaaggcttcttcaggaaaaattgaatatggcaaaatgaaaccgacttccaataatactggttatatcatgcaaaatatgaccttacctcctgatgctttagtcagtgaagttttagctttgttttcaaatgatgaacaatctaaagaatatggcttaaaactggtcaaagaatttaaaatggaatcctatttaaggcaaagattttcaaatttatctggtggtcaaaaacaaaaactctttttagtatctgcactacaaaatagtcctgaatatttctttttggatgaaattacaacgggtcttgacagtgagagcagaggagagctttttaaatttttatcttcaaatttgaaagtaaaaaattcaactttacttttggtaacccattatttagaagaagcattgcaattatgcgaccgatttatcattcttaaagatggaaaaattattgcagatttacaaaaatcagatttaattcaagaagaattttcttttgttgaatttttagtagaagttccagaatttgaagcctataaactaaaagaaaaacagtacaaattaccaaaggaattggctgaacaagccatcattaaattcaataaagaacttgttttatatcaaaagacttaccgtatcaacttggaggaactattatcatga

SEQ ID NO: 665 - DNA, 378 bp, Lactococcus lactis
atgaaatatgtaatttcgggactcaaaggtgccttcattgctatagtatgtggagtcttgcttactttgtattttggtggaaaaattgattttgaatcaatgactctaattcttgtttatggttttgttcagggggccatgtctaaagtgatagatgaatatgtcacaattgccttgcttgaatttgttagtcaagctttagcaagttatttgctggcttggggttacttattagttaatacttggctttttgatagctcgtggcaacatcatatttggagttttactattacttggttgctcatttttattttggtatatctttattcaatcgtcagaaatcggaaaattgtcaaaagatttaatagacagaaatag

SEQ ID NO: 666 - DNA, 387 bp, Lactococcus lactis
atgattgatttatatttgtcgccatcatgtaccagttgccgtaaagcgcgcgcttggttgcaaagccataaggttccctttgtagagcacaacattttgacacaaccgatgacaacaaacgatttgcgtcatatcttgacgaaaacggaaaatggaacagaagatattatttcgacacggtcaaaagtttttcaaaaattggctgtggatgttgataatttgactattaatgaattattagacttggtaacagaatttccaaatctattaagacgtccaattattactgactcaaaacacctacaaattggctttaacgaggatgaaattcgtgcatttttgccacgtgaatatcgtcgagcagaaatgttaagtacaatagattaa

SEQ ID NO: 667 - DNA, 408 bp, Lactococcus lactis
atgaaactcatgaagaaaactcttgtaactctcgcagtcaccctgggaatatcaggtgctctaagtccggctgtaaatgcggcaactaaaacaactaatgcttctatttctgttttaaatattatcacaatggcggatcgtgtctattttcagtataatggaaaagcgattagtacagctacagcttttcagagtgctcatagctttactccgacaaactgggtcactcaaaatggaatttcacttattaataaaaatggttcttggggacgaatttatcaaggaaaatatactgtgggctcaggtataaatgctggaaaatttggacatgtgggagttagttttaataagtatatacggacaactattcttggaaatggtcaatggacctattctacatttaattga

SEQ ID NO: 668 - DNA, 2328 bp, Lactococcus lactis
atgtctttaaaaggattaacaagttttgaggttgaagaacggattcgccaagggaagataaataaaaatatagatgagacggatcgtcctgtttgggaaattgtaaaacgaaatacttttacatttttcaacttaatatttgcagtcattgcgattctaatcagtttagttcaagcatggaatcagcttattttccttccaataattgtcattaatacaattgtcggaatttatcaagaaatcaaagccaaacgatatttggaccaaatgactctcctgcacgctccgcaatccacagtgataaggaatggtcaacaagaaaaaattgcttcagatgatttggttgaagaagatattattattcttaaaacaggaaatcaaattgtcgctgacgctcgcattgtcgaaggaagtatttttgtcaatgaatcacttttgacaggtgaagctgacgaaattgaaaaaaatgttgataacaaacttctgtcaggaagttttgttgtgtcaggagaagccaaagtcattttggaaaaagtcggaaaagattcctacatttccaaattaacagaacaagccaaattagttgaccatggtgaagactctgagatgttacgtgccctcaataaattattaaagtgggtcagctttattattcttccgatagcagtcattttatttacccaaaattactttgtcaatcataatacacttcaaaccagtgttgtagcaatggtggcagcggttattggaatgattccagaggggttgtatcttttaacaaccattgccttaaccctcagtagtgtaaaattggctcgtaatcaagtgctattgcacaatatgaaaagtattgagtccttagcgcgtgtagacgttctatgtgttgataaaacaggaacaatcacagaacccagaatgtcagttgagcaagtatttgttagcccaagtagtaacataagcgaagcgaaatttatgtctcttttatctgactacatctcagcaaatactgatgacaatgataccatgaaggcaattcgagagtttatgcttgcaaaaggtgaccttcaaaataaaatgaccggcgttaaaaaaattattccattttcatcaaaagtaaaatatagtgctgtttgttttgaaaatgaaagttatcttttaggagcaccagaaattgttttagggaaaacttatgaaaaagttagctctgaaatcaatcatctcttagaagaaggctttcgtgtcctagttttagcgggaacaaaagaaaaaatttatgaccaacttaatttgggggcttacgcacttggctacgttgtgttagccaatcccatcagagaaaatgctaaatcgacctttaactactttgcagagcaaggagtcaatatcaaagttatttcaggtgataaccctcaaaccgtgtcggcagttgcaaaaagagcaggaattactggagctgaacgtttcattgatgcaaatttattgaaaacgaaagaagatttagaccaagcggttgaatcatataccgtttttggacgtgtgacacctgaccaaaaacgccgtctcgttcaagcccttaaacgtaaagatcatactgtcgcaatgaccggagatggtgttaatgatattttagccatgaaaagtgctgattgtagcattgccatggcttccggaagtgatgccgcgacccaagttgcacaagttgtcttattagattcagattttggacatatgacacaagtagtcacagaaggacgtcgagtcgtcaataacgtccaacgttcagccattcttttccttgtaaaaaatctcttttcaatcatcttggcaattatctcagcaatctttgtcttcacctatcccttacaagcttcacaactttcacttatcagtttattcaccattgggattccgggattcttactctctttagaagaaaatgacaaacgaattgaaaaagattttattaaaaatgttatcttaaaagcattaccagccagcttgactgaaattacggccgttttaggagtcgttattgctggagctgccttcaaattgacggcatcagaaatttcaacttcagcagttatcttactagctgttgttggatttatgattttaactaaaatcagtgcaccactcaaccgttttaaaatgggaattatcatttttaatattgttgggataattatctcaggtttcatgttcaattccctcttctctatcagcaaaatttctttggatagttttgttctggtcgccttactctcactattttcagaatcactatttagaaattttgattcactattaaaaaagtttttcaaataa

SEQ ID NO: 669 - DNA, 594 bp, Lactococcus lactis
atgaagaaaatactaatagcgctaattatcatagtaccaattgccattaccggatttctcggttatgactttttcaaaaaaaattttgctcatgttcacggtataatcatgtatagtgataataaggatgaagcagacactatattagaaaataataaaaaatatattgataaaagtttaactgtagaaggtaaatacagttcaaaatcagatgtcttagtcttgaatactcaagctgctaataaattaataaatgaaaaagtttttaataacgtaaccaaaaaaggagacaagtttaaatttaagacagtagaaaacttatcagccgagccagctttgtggacaggaaaggaagataaaacaataactgatgataaaggccagtcagtgaaacctaaaagtacaaaatatattgttctaggagaatacagtgctacttctaagctattgattcttaatgatgaagattatcaaaaatttgatgcaaaagctaaatttgtaagtgtaataaaagaaaaacgagatgctgataaagtccttaaaagctacattacgagtggttcaattccctcacagatattcccttacaaataa

SEQ ID NO: 670 - DNA, 402 bp, Lactococcus lactis
atgaattttattaaaccctttattataagtggagtaatttttttaattttagatatttgctggctcttttttgcaaataaaaaaatctatcagccaaatattggtaacttgatgggagattttaaagttattccggccattatcttctatattatttatctaggagcactaacattttttgtattaatgcccggacttgaaaaaaatagtataacttacgtcttactgagtggtgctctactaggattagtatgttattctacatacgatttaacaaatttggcatcaattaaagactggtcactaatggtaacaataattgatattatttgggggacttttgtaagctctttgagtgcaagtctttcatttcttgtgattacaaagtttatggaaggataa

SEQ ID NO: 671 - DNA, 699 bp, Lactococcus lactis
atggaatatcaactaagttcaacatcaatggcaccactagtggagattagtcttgacaataatgaagagattcaaattgagtctggagcgatggtctatcataacgctgctgttaaacttgaaggaaaaatgaacagcaatggaaaaggaggacttagaggtgctttaaaagctcttggtcgttcaattacaagtggagaaagtttctttattactaaggcaagcgcaataggtgcaaatggtaaaatttcgcttgctcctgctagccttggttcgatcaaggaaattcttgtcggtaaagagcagtggaatcttaacacaggggcattcctcgttagtgagggtggtgtccattacataatggaacgtcaaaaattagatggagcattatttggaggaactggtggtctttttgtgatgaaaacacagggcagcggaaagatgttaatcagcggttacggggatattgtagaaatagctcttgatggaacagaagattttgtagttgataatcaacatgttttagcatggactgaatctttgagttattcaattgaagttgcttccggaacatttggttttaagacaggagaagggttagttaataaatttcgaggtaagggaaaaatcctgattcaaagtagaaatgttgaagccctcgcacagtcaatcattccattcataccaagtaaaggataa

SEQ ID NO: 672 - DNA, 381 bp, Lactococcus lactis
atgcagcaagtcaaaataaggaggataaagatgtcagttgaccgttcttatagttcctatgaagtcattcgagcatatcaggatagaggaatgatgaaatggggatcatttgcgaccggagagttaaccgaggcccaaaatgcatttgttaaagagcaaaatagtgataaaatcttacaacctttatcacatcacattatacttcatcttctcaaccagtcatttactaatcaagtacaagtcaaaattaaatatcaatctaaggttaaaataactgaagtttttggttttgtatcagaatttatcaataatcaagttagaataaaatccacagataaaattcacctcatatctatcgaaaaaattataaatatttcataa

SEQ ID NO: 673 - DNA, 510 bp, Lactococcus lactis
atgaaaataaaaaaaattatcatagcagccaccacttttgcaatagtttttagtacgtgtattggtattaaatcattagcggataattattggactggacatggagaaattcagacaattaacaacaatattgatacactatcaaatcgggttaaaagtaaaaatcaagtaatttctgatttaaatcagaccatagcaaacttaaaaagttcagttgattcacaaagttcacaagtcaattctttgcaaactcaattaacgcaagctaatgttgacaaacaaaatgaaattaatgcaaagataaatgaaatcaatacaaaaattgcagaagggaatcaaaaagtagctgataaacaaaaagaggttgatacagcaaaccaaacaatttctcaattaaaccaacaacttaatgatttaaggcaaaagtctggacaggacaatgatcaagcattgcgagaagttcaagatactcgagcaaaatctgatcaggctgtaaaagatgcacaataa

SEQ ID NO: 674 - DNA, 570 bp, Lactococcus lactis
atggcgcaattatatttcaaatatgggacgatgaattcagggaaatcaattgagattttgaaagtggctcataattatgaggaacagggtaagcctgttttattaatgacttctagtctagatacacgcgcaggggttgggacagttgctagtcgaatcgggatgaaagctgaagctgtcgcaattgatgaggaaatgtctgtttttgattatgtgaacagcctgccagctaaacctttttgtgtgctgattgatgaggcacaatttttaaataaaaaacatgtctatgattttgcgcgtgttgtggatgaactaaatgttccagtcatggcttttggtttgaaaaatgattttcgtaatgagctttttgaaggctcaaaatatttacttttgcttgcggacaaaatcgaagaaattaaaacaatttgttggtattgtagtaaaaaggcaacaatggtgattcggacaattgatggaaaaccagtttatgaaggtgaacagttgcagattggtggaaacgaaacctatattcctgtttgtcgtaaacattattttaagccagaaatttaa

SEQ ID NO: 675 - DNA, 414 bp, Lactococcus lactis
atgacaggaaatactgaagcttgtgccgatattgtcgctgataaacttgaagaattaggttttgaagtagaacttgacgaatgttcttctgttgatgccgatgagatggctgatgctgatctttgtatcgttggaacttacacttacggtgacggtgaattacctgacgaaattgtcgatttttatgaagaattagctgaggttgatttatctggtaaaatttacggttgtttcgggtcaggtgatactttctatgatgacttctgtatctgtgtcgatatgtttgaagcgcaatttgaaaaaactggcgcaacaaaaggagctgaacttgttcgtgttgacttgtctcctgaagatgaagacgaagctcatctcgaagcctttgcggaaactttggcggctcactttaactga

SEQ ID NO: 676 - DNA, 303 bp, Lactococcus lactis
atgtttgaagaaaaagaaaaaaaatcacctaatcattctcgaagaagaggggatgaacttaagaaagcaatttataaagcggcagttcatattttagaaaatgaaggctatgaaaaagtaacctttcaaaatgtcgcaaaagaagccaaaaccacacgaagcgtactttatcgttattgggatgatgtttttgacttaatttttgaagctgtccgtttcaatatttcacaaaatcctgagtggcgaggaaatgtgatagaccaagaaattaacagtgggagcttgcggacaagatttaattga

SEQ ID NO: 677 - DNA, 354 bp, Lactococcus lactis
atgggagcttgcggacaagatttaattgaacttttaacctttatgagagagaattttaaactctatcccaaaggatttctggccttcgtttcatttatgcagtcacaaggaaaaaatgttcttgaatcgaccgttggcaatgtccttccaagtaatctgattattatggaacgcttgcttgcaagggctcaggaaagaggggaagcgcgtgaaaaaattgggcaaacagctaagcttttacctttccagatgacccgttatcatatgctccttgaaggtcaatccatgaatgataagcaaattaatgaattggtagatgaagttttactgccaatttatataaaaaacacctag

SEQ ID NO: 678 - DNA, 141 bp, Lactococcus lactis
atgacttggtcaaaagaaagtagagaaaaacaaagcaatagatttataaatccatttaaagtaattgactaccgtggagaagtgattgctgtttacaagaactcagttgaagagtttcttgcattcgttggtgaggaataa

SEQ ID NO: 679 - DNA, 183 bp, Lactococcus lactis
atgaataacaatttaaaagaaaaattatttttctgttacaacaaaaaattaaaacaatatctttattttgaatgtggtattgattcagaatttagtgcattacatccaaagacaatgaaagaattttgggtctatgttaaaacagaagagttagacaaagctcttacaaattataaaaaatag

SEQ ID NO: 680 - DNA, 570 bp, Lactococcus lactis
atgcctaaatcaacctatttcagtctatctgacgaaaaacgcaatcgcgtatatgatgcctgtttaaatgaatttcagactcattcttttcacgaggcaaaaattatgcacatcgtaaaagctcttgatattccgagagggagtttttatcagtattttgaagatttaaaagatgcttatttctatgtcctctcgcaagaaacccttgaaatccatgatttattttttaatttattaaaagataattccattgaagagtctctagataaatacaaatatctccttcttgaaaatttaattgattctccccaatacaaactttataaatatcgctttttagattggacttatgaacttgaaagagattggaaaccccaaagttcagcaaccgtcccagctagtgaaaatgataatccaatttcacaagtattaaaatcagttgttcataatctcgtttatagattattcagtgaaaattggactgagaaaacttttattgaaaattatgataaagaaatcaaattagtcaccgaaggtttacttaattatattactgacagaaaaaactga

SEQ ID NO: 681 - DNA, 864 bp, Lactococcus lactis
atgaagaatttcacctatgttctcaatccaacacgtgaagaaattgggaatatttctgaatactatgacttcccttttgactatttatcaggaattttggatgactatgaaaatgcccgttttgaaacagatgataatgataataatctgattctcttacaatatcctgcactttctaattatggagaagtggcgacttttccatattctttggtttggactaaaaatgaatcggttattttagcacttaatcatgagattgataatggcttaattttcgagcgtgaatatgattataaacgctacaaacatcaagttatttttcaagtgatgtatcaaatgacacacactttccatgattatttgagagatttccgaacaaggcgtcgcagacttgaacagggaatcaaaaattcaacaaagaacgaccaaattgttgatttgattgccattcaagcaagtttaatttattttgaagatgccttgcacaataatatgcaagtacttcaggattttattgattacttgagagaagatgatgaagacggttttgctgaaaagatttatgatatttttgtcgaaacagaccaagcttatacagaaaccaagattcagctcaagttactagaaaatctccgagatttgttctcaaacattgtctctaataacttgaacattgtcatgaaaatcatgacatcagctactttcgttctagggattcctgcagtaattgttggtttttacggaatgaatgttccaattcctggtcaaaattttaattggatggtttggcttattttagttctaggaattttattatgtgtttgggtcacttggtggttacataaaaaagatatgttataa

SEQ ID NO: 682 - DNA, 489 bp, Lactococcus lactis
atgagaacactcatcgcttacgctggtaagacaggaaatactgccaagtgcgctagaaagctagcgatacatttaaatcaggtcacacttgtggatttaaatgctgaagtagtaaatcctaaagattttgatgctgtgattgttgccagccctgtttatagtcataaatttgaacgttcagtaggcagtttcttaaaaaaatatcaagaaattttgcaaacgaaaccttttgcggcattcgttacaatggttgaatatgatagttttacgaaagtgattaaaaaagaaatcgccgaacctttgcgcaaaaaagctgtagctatagcaaactttggaggtgaggtaaataatttgaccccttttaactggcacgataaaattattgcaaaatcaataataaagctagagtctaaaaaacacccgattgagtttttaccagaagctgagaaacagtttgtggctcaattaaacaaagtagagtggatttaa

SEQ ID NO: 683 - DNA, 417 bp, Lactococcus lactis
atgaacatgattgaccaactcaatatcacagattttcaagtttttactgacgagaattctgacaagtctgtcagtaaaatttataagttctcaagtaaaatgatactcagcgattttcatgctcaaccgcacggctttttaaatggaggtgcaagtcttgccctcgctgaaatcacagctggtatggcaagtaatgcaatcggctccagtcaatattttgcccttggtcaaagcattagcgccaaccacctcaattcaaaaaaatgcgaaggtttcgtaaatgcctgcggtcttctcctcaaaaatggcaaacgcaaccatgtctgggaaatcaaaatcactgacgaaaatgaaacgctcatttctcaaatcacagtggtcaatgctttggtaccacaaaaaaactctgacaaatag

SEQ ID NO: 684 - DNA, 582 bp, Lactococcus lactis
atgaatatttatgtcaaattagctgagtttagcattattgaaacaaagcgattgcttttgcgtccctttgatttaaaagatgctgaggacatgtttgactattcaggtaatcctgaaaatctaaaatttgtttttgccccgcatctgtcactttcagaaacacgtttttcaattgctaacgattatatgaaaagtcctttagggaaatgggcaattgagttgaaatctgaacatcggctgattggagatattcattttgtgaaaatttctgataaaaatcagtctgcggaaattggttatgttttaaatcaaaattattggaatcaagggttactgacagaagcattaaaagtactgacagaattttcttttgaacaatttggacttaaaaagttgattttattgattgataaagaaaatgttccgtctaaaaaagttgcccttaaatcaggttatcacttagttaaaaaatttaaagggacgaatcaatacagcaaaaaaattagagattttgaacaatatgaacttggaaaaagtgacgatgaaatttatcaaaaaaattcagagattggggaaatttga

SEQ ID NO: 685 - DNA, 378 bp, Lactococcus lactis
atggaaataataaacttgacttatatacccttgggggtatataattattataaatcaaataatcaagaggtgaaaatgcaaacaattgacataagtgaattagaattactgacagaaagtgaaaatccagtaattgtagatgtaagagaagattttgagtataacagtggtcatgttcctaatgccaaaaatattccattgagtcaactagaagaaagatatgcagaaattactgacggaacttatcttatctgtcagtcaggtgctcgttcagctagggcctgtcagtatctttcgacaaaaggaattgatactataaatatttcaggcggtaccattgcttggaatggccccttagaatttactgacagactttag

SEQ ID NO: 686 - DNA, 564 bp, Lactococcus lactis
atgtttatggttaatataaatttagttttagcagagcatcagaccttacaaactgaacgcttgattcttagaaaattacaacttgaggatgccccagaaatgtttaactatgcttctaatcctgaagttgctcgttttactagctttgaaccacatgattctctagaaacaactagagccacaattgccaagttttttctgccgaacagcctctatcattgggggattgttgaaaaaacttcaggtcagctcattggtgaaatttttcttaatcctatcaatgaaaaaacagtcgaactgggttggattttaaatcaagaccattggggaaaagggattatgccagaagctactgaatgtcttttggcgctttctttcgataaattagaagttaaagttattcaagctaaacattttacagaaaatgcaaagtctggacgggtcatggagaagttaggaatgaaacacttaggaaaggtttattcttactttcctaagtttaaaaatcctcttcttacagattattgggcaattactaaagatgagtatgacttacttcattga

SEQ ID NO: 687 - DNA, 201 bp, Lactococcus lactis
atgaaagaaactttaaaaattgagggaatgacttgtgaccactgtgtaatgcatgtgacaaatgctttggaagctattgatggtgttgaaaaagcgaaagtctctttgaaaaagaatgaagcactagttaaattttctgccccagcagatatggataaaatggctgttgccgttgcagaggctggttataaagtaatttaa

SEQ ID NO: 688 - DNA, 429 bp, Lactococcus lactis
atgataaaaatatacacagtagcatcttgtagctcttgtaaaaaagcaaaagaatggttggagaaacaaaatcttgcttaccaagaaataaatttggttacgagtcgaatttgtaaggaagatatattagagattttagcattgactgaggaaggaactggagatatcatttctagaagaagtcaagcttatcaacgattaaatattgattttgaaacgattaaattaaatgatttgattcaaataattgaagaaaatccaacgctcttacgtcgacctttaattgtcgatcataagcgactacaagttggttacaatgatgatgagattagaaaatttttaccaagaaaaaagagagagattcaaattaaagtggcaacagaagcttcttataatttggatattgaagaacaatttcatgaaggataa

SEQ ID NO: 689 - DNA, 453 bp, Lactococcus lactis
atgaaagaagagattgacgaaaataaagaaaaagaagtgattcaaaaagcttataaatacaatggtttgttaggaatctggattatcgctgtattcatcagttttttactacaagttgcaaaaataataacagactcatatctagtttggggatttggtttacttatcctgatttatgctatcgctcttcatgttcagaatcataaattaagaataaaaagtattgcttcaattttagtatatagtctcaatgttttgagcgtgattggtgctgtcttgatcattttagccaatcaggcacataatcttttagagttagagataggattattagtaggattcgtgacagttattttgcaagttctagcccttgtatctgcactattggcaacaagaaaattacgaaagctctatcctgatgttgttggcaatagaagaaagaatataaaataa

SEQ ID NO: 690 - DNA, 3192 bp, Lactococcus lactis
atgaaaaaaatacggccagaagtgactactgttacctccaagtctcattttcgaacttggaaatcagggaaaagttggttatttgctacttcagcattagctataattatcgtttccggaacgattactgaccaaaatgtaaaagcggacacagcaattgatagtagtcagcaaattagtggtattactgaggtaacaagttattcagcactagcttcatcgacaaatagtgatgtagctgctagtcaaaatcaagttgcttacgaacaagctagtgaccaaagttctaataaatcactggctaacacagtagaaactgatactgagggaataacttcaaatgtgtcagatagtagcaactcaattaatgaaagccaaaatacgacaagtacggtggttattcaaactcctacaaacaatatcgtatcgcttgcagattcaagctcatcaaatgataatggcagcaattctatattaagttcttctaatgctgcagacagtgttgattcggcagttgggtctcaaagttcaacaagttcatcaggagttttgagtgaaagttcagcaattgatagtggtattgcatcagtttctcaaagttcggaaatgaatcttgtgggaaatagtagtgctagtgcttcgagtgctgctgtcgcttcttttacagctattctagcgactaatccgtccatggtgccaatgcttactcaggcactagctgcagcagcgcctgctacaacaagtggttcagctattcttaacacaacacttggagatcttgtaaatcaagcaatttcgacagtgggaattagtggtttagcaaatatttttagcactcttggaacttttaatattccaggaatgactacagccgcggcagctcttaatggtgttgaacaaatcgtcaatattgttggaaatattcaggaagcagctgctaatcctggagcctttctattaaatgaaataaaatctgcaggtttagatgttagccaaattccattagttggagggcaaattgcggcggcatttaatgctatcccatcaatgagccctgctgctatgcttacttttcttgaaaatccaacaattccaggactttcaagtattccgggggcaagtctagtactaagcccagtacttagcgcaataagtactgtaacaagtgggattgttaatcaacttaatacgacaacttccaatgccttgggtggtgttaattttgatttagacacacttgtctctcttcaaggaaatgatcttgtcaactacttggctggtttagtagttaattcagcgattaatcgagtaggtcaaattgcttggagtcaattatctccaactattagtaatattccacttgtaggtactacagttaataatgttttaagcccaacattaaataatcttactggagcatctttgggagaagttgcgaatttaacgggagtttccagccttcttgaccaagtaaataatagtttgggtaatcttataagccttggttcaacagccttagccacgattgagaacacgctccaaaatagtctaaactcatttggtaatcttcctgctggtgcttcggatattcttaaccaagtgctcaatcaattgcaaaatgcgatcaataatattgttgaaagtgcgacggggattgtaaataatttaccaggtcttggagctatcgaaaatggtctttcgaacactattagtcaaataccaaataatattaataatttcgttaataatgcacttaatggaataacgacaattatcaattctttaactccaagtgttggtgcttcaacagttaatccaaattctagtgctaatagtagccaatcaagcagtagtgccagttcttcatcaagtgcagctagtagttcaacttcatcttcaaatgtatcaagcaacacgagttctaattctagtgaagcaaatacttcaagttcgacttctaatgcttcaagttcaagctcaagctcagagggttcaagtgcttcaagttcaaattccagtgaaagtagtgttgccagttcatcttcggtagactcgagtcagtcaagttcagctggggtaaatagctcaagttcaagcgcagaaggttcaagtgcttcaagttcaaattccagtgaaagtagtgttgccagttcatcttcggtagactcgagtcagtcaagttcagctggagtaaatggctcaagttcaagctcagagagttcaagtgcttcaagttcaaattccagtgaaggtagtgttgccagttcatcttcggtggactcgagtcagtcaagttcagctggggtaaatagctcaagttcaagcgcagaaggttcaagtgcttcaagttcaaattccagcgaaagtagtattgccagttcatcttctgtgggctcaagtcagtcaagttctactggggtaagtagctcaagttcaagcgcagaaggttcaagtgcttcaagttcaaattccagtgaaagtagtgttgccagttcatcttcggtagactcgagtcagtcaagttcagctggggtaaatagctcaagttcaagctcagaaggttcaagtgcttcaagttcaaatttcagtgaaagtagtattggcagttcatcttcggtagactcaagtcaatcaagttcaagcacagaaggttcaagtgcttcaagcttaagttcaagtgaaagtagtatgacaagttctggtgggacaagtgattcaaattcaaacactggtcaaactagtactacaagttcatcttctaaaaattcaagtcattcgagtctgagttcaaatgaatcaagtagtgcaagtttgacttcatctgagtcaagtggttcaacaacatcttcaagtatgttgactaatccaaatttacaatctaatgataaaaatggctcaagtctaacttcaaatagttcgtatacttcagaagtgaaactaaataacttgagtcactcaaatttatcttcaaatgaagcaaaagtttcgactttaatttctaaggtatcaagtagtccaagtctttcaagttcattaagcgcaatgagcttgcaacttgtaccaactgtaacgaaagaagagcttcccaaaacaggtgctgatgatgatttaagtttagtattagcagaattgagattgggattagtggcaacgttaactattggaaaagttaaatataaaaaaaggttttga

SEQ ID NO: 691 - DNA, 231 bp, Lactococcus lactis
atgttaaaattaaattgtagttacactattaaaaatattggagtatatgtgaaagtaaataaaatttgggttttaatcattttggtctgtttgtttttttcaatttatgggcattataatcaaaattattttttcttgttcgtaggtattgttggtgcctgtgcgggaataatctgtatgttatgcgaaatgctgatccaaattcttagaaatcaaaagataaaaaaataa

SEQ ID NO: 692 - DNA, 510 bp, Lactococcus lactis
atgaaaaaaaatatcagtcgagaagaagcaaagaaatctttagtctatgacccttattttgaaaaaggccattatgggagtaaaatttttcaaactataattgctcttttaggatggtgtggtgttatcataccatttttatggattatctttccttttgtttttccaaatcgagcacgttttgatcatatcataatttatagagaagaaaaatctacacttttatttcttttcatttttctttctatatcttttattttcctatctattttgtatattatcctaacttttttgaataattatcgttttaaacattttctacaaaaagaaaagcagtacgatgctgaacgtgtcgatgtaagacgaaagttaataaatcaagcttacgatgaacgatttggcacaaaagattttcgccataatgtttgtttttattcggtcaaagaagagcaaaatttggaaacagattttgtgaaaaaactttatcagaagggagaaaacaatgattag

SEQ ID NO: 693 - DNA, 285 bp, Lactococcus lactis
atgattaaaatagacaccagtaaagaaagtcgttggagaaaagtttatggcgtttttctgatagctgcaacaattatgattcttctacttattggaggagaactttttgcttttatagatatagataagcctccttatgattggattatcaatacaatgattttcttcttcacagtggactatttatggcgcctaaagagagcaaaaaaaaaatggaagttcattaaaaataatatttatgatttaattgcaattttaccatttagtttttattttctatcgtag

SEQ ID NO: 694 - DNA, 432 bp, Lactococcus lactis
atgagcgatttaagtctgattttttctaaattttcttttttaggaaatccaactaaactaatcaaaatatttttgcaacttgaaaatttgataaaaaaacaaaaatcaaattatcctaagccagatgtcagtgatgtgttatacgttaaagtcgaagatgatatctatcgattgcataagaaaaagtttattaaagaagtgattttaccaaatggagcaaacgtgattattctttcaaaattagcgcttgccaattctttaaaaattgtaggtaaaccgggagatggtgatcttaatcaaattttaaaagctttgcgtaaagaaaaggatttgaaaaagtgtcaagaaattattaatgaaatttcagattcgtttttaacaaatttatcaattaaagagttgataaaaattattcgaaaacaaatgggctaa

SEQ ID NO: 695 - DNA, 207 bp, Lactococcus lactis
atgcaaaaatcagctttaattattattgatttgcaagcattcattaaaaaattagcgaaagatgctgttccttatggctgggataaaattattgaaaataatcgagctttaatttctgcatttgaccaaaaaaatcagccagtttatattgtgactgttgaaccaaaatactttggcaatcagctaaaaaagctttttctcggatga

SEQ ID NO: 696 - DNA, 678 bp, Lactococcus lactis
atgagtatggtgaaaaaaagaagaggtaagtttagaaaagtatttttgcctatcctaatatttattgtttctgtattaatcattattggatacgggcaccataattttagggtctattcaatttattatgcgcagaatattcctcataaatcagggacagcccctgttatgtgcgccgtaatagataatctgaatagtatttatattcctaatcttaatgaaaaaagtcgttatgataattggagagatgtagtgaacactgtaagtgataggacaggtgtgattgaatatgattttgtgaacaatagtattctgataggaaaaacttttgaggatttagaggggatatctcctttgaatcaggataaatttatctcaggtataaatatgtatacaagaaagaaaattggatacgttttaaatttcaatatcacaaaaaataaattaataaaagaatataaggtctattatagtaatcaagggagatttgaaaaaatattcattattgaaaataacaccgaaaaaggatttagtgtcacggagtataaaaataatttagcaacgatatccaaacttcaacaaaaattatatggttcaattattcaaaaaagccaagttccgttgataaatcttcaaatgctttataactggctgaattataagagatttaattcatga

SEQ ID NO: 697 - DNA, 393 bp, Lactococcus lactis
atgattaaaatttatcttagtggttcatgttcatcttgtagaaaagctaaaaaatggttacgtaaacatcacattgaatttgaagaaattaatttatcaaaagattttatggaaaaagatgatttaatcaaaattttatccttgactgaaaacggatttgaggatataattgcgactcgagggaaaacatacgcatctttaaattataatttcgatgaattaggactagaaaaagcttttggattaattcaggaaaatccacgtcttctaaaacgaccattaatttttgacgaggactgtctattgattggttttaacgaggatggaatcagagcgtttattccaccagaagttaggagaattgaattgcgtgaaagattaattttagtctaa

SEQ ID NO: 698 - DNA, 327 bp, Lactococcus lactis
atgattgtttcgctttatttaaatataggatttttagattacaaaataaaaaaaacgcaaagctttcaagcttcgtgttttagcatatttacactaaattctcttcacaacacttacaaattttccaattcttccatcgcttccaaaagagtcatttctatctcatctttttcatcattaaagaggtcaatttcagcttgtaattctcctgatttaacaaaatcagcggtattttcttgcatttccaataatagagctgcaatttttgattccaaatcggataaaaacaaaattgtcacaaaacgaagttgccctgtcgaaaagtaa

SEQ ID NO: 699 - DNA, 732 bp, Lactococcus lactis
atgtcacatttaaaaaataatctagtattttcaagtctaacaattttactcgtaacgggtggaagtcttgggcttgcccaatctgcacacaataaggtctcatcacaaaaactcgaagctaaaaatgtaaatcaagtttcaaactattctggtgatattgacttgttgacagtaagccaaccaactacgccaacgacgaataatggtcaaattaatcaatactttatcaatcgttttgataatgctatatctcttttaaatgggaaatatgttgtaaatcataatgtgttacctcaaaatacaagtggtgaagaaataaatatattaaatgaatcagttaaaattgcaaatcaacaacttatcgttggagctcaaaaaatcgaaaaatctgatattgatgttaaggttgttcaaaaaggaaattccattattttagctgaaaacccaacgactttgaagaattctgctacttctatggctactaaacatgtaggagtaacaaaagttgaatttcactggtatggtgtgcgtttgtttttaagtaaaaatgatgtaaataaaattttgaagtatggtcctacatctgtttcaattgcgacgatttggatgccaacgacttgggtggttaaattggcagcatcagccgctgtagcttgtggttggatgtcaagtgttaatggaggaatctggattgactggggacttattccaactaagtggggatggcaatga

SEQ ID NO: 700 - DNA, 231 bp, Lactococcus lactis
atgggtgattttaaaaataatttcattattaaatgtttgggctggttttcagttattgctttgacctatcttaatttgattggtttgccagatcaaattgccaactttatacctcataatcttggactatctcatcttatttctggttttcttattttgggagttctctttttattaatttggacaatcgtagaactttatcgaggaaataaaaaaatgatggcttgctaa

SEQ ID NO: 701 - DNA, 414 bp, Lactococcus lactis
atgaaggctaaactaggcaatgaaattgttgaatattggcaaatcagcctgactaaacccgcaaacgaatcgtgggtcttagaggcttttaagaaaggacagctctcgtggtctggtcaatttgcaatgaataaggagaccaaagaaaaattacttgctgacggaatgtctacaaaaaatccagctgagcatgataccctttctaaagaaataaaacatttggactggctagggctttatatttcgccaaataagctgagtaatgcttatccggataatgtttatcttgtagtcaatcaagtacgtattccagcctttggacgacttggagagtacctcctagtagcacctgatggttcttttgaaatttactctgaaaagaaatttcagcgagatttagaaaaaattcaataa

SEQ ID NO: 702 - DNA, 864 bp, Lactococcus lactis
atgtctaaaattgaatatttgtttatttctcgctgcttatctgagtttgcaggagcaatattacccgtagtattcccgttattcattttgaaaacaacccattctttaagtctttcgggtttattttttacgattacaatgttaccgagtgttttgcttactccagctatggtagtgtggattgaaaaatatgaaaagaagaaagtaacattcttttcagttttgactcttgcaatcttatgtagtattgagtctatgctcttaaagtttgggcgttatgactttatttatcttgtttgttttgcaatcttagttgcaattttttctatgatgcttgatttatcttcaaaagttctatttactgaacttgttgatgaatcagaattagaaaaatataatggtattagaagtatcttagataacctttctgttttcggtgcaccgatgcttggaaccttggtgtatggagtgttcggtttctcaagtgttattttaattttagctatactttatgttttggcagctgtggtcattgcgtttattccattggaaagtaagaacggaggaaatgatcaaattgttgaagaaagttttgtccagaaatttaggataggtcttcattttattcggacagaaaaagcgatattaaaatattttttgctcattatggcacttaacttttttgttgcttcatcagaagaagtgacgaacccagggattgccattcaaaaatatcatcttccaacttctatttttggactggtgtcaattgccttttcaataggtgtaatattatcagggttttcattgctaaaaactcaaaaattgagttcagaaagcatatttccaaactcttcgtgctaa

SEQ ID NO: 703 - DNA, 564 bp, Lactococcus lactis
atggtgaaaaaatcagattttatttggaaaaatactaaattgacagttcgtaagcttacgctaattgcgatgacaatagcactgtgctccgtaattcgttttccattttcatatctgccaaatattactcctttaacaacaatctacttactcatttgtttaaacattggattgagcgaagcaattattattgctgacatgacgattatagcaacatccgtttatctaggaatgggctactgggtagtcggtcagttactagcatattctctaataatttttttatattggctgtttataaaaattgatattatgaagtttttaattatgcaagcaatattatgccttatactggggttaatttatggaattgtaatctcaatgtttgaggtttttgttttacaaatttcatcatttgaaatttattatattgctggtctcccctttgacttgatgcatggattagggaattttctatttatgatattggtatttagaccagctcgaattctcaagcggcaattcaatagcttaacaaggttttacaacgatgattctgtttga

SEQ ID NO: 704 - DNA, 822 bp, Lactococcus lactis
atgaaaatcgaacaagtcattgaagaaaaatataaaactcttaccaaatctgagaaaaaaattgctaactatgtattagagtcacctaatcatattatttatggaacgatgaatgatattaaaagtgagattcatgtaggggatgcgacaattatcagattctgtcaaaaattaggtttttcaggattctcagatttaaaaattgagatagcaaaagaagactattctcaaaaagaatctcaggctaaagatagtgagctattctttgacgaaaaagagagaaaaattgtcaacagtctagaaacaacaaaaagaaaattgtctatagaactattggagaggagttctgcattactctcaaatgcctcagcaatttatatttttggtgttggcttaagcggaaatacggcaaaagatttggaggcaatgttcttacggattggtattcaagctaaagcaattagtgatactcactttcaggcgcaaacggccgctattctaaaaaacactgatttggttattggaatttctttatcaggaaggactttagatttatatgaatcgcttaaaatcgctaaaggacatacagctaaaatcctttcaataaccagtaatttagtgtctccaattgctcagctttcagacattgtgctacaaacaacagctgaagaattttttgatggtggttctttatctggtaaaatatcacagttatatatttgtgaactcctagtaagacatcacgaaaagatttttgaaaatgaggctttaaaaagtcgtgaagaaattatcagagcggttattagtaaatcaatagattaa

SEQ ID NO: 705 - DNA, 246 bp, Lactococcus lactis
atggcgaaatcaaaaaaagaaattgaaaaaataattttagaacaaactaattttgttccacgtaatgaaaaaggacaagaaatttatatttcactgaaatctaaaaaaaatggcaaaaaaaatatgaaacataatgaaaaatttgctaaaagtgcagaatttgataaattagtaaaactttttggagaaaataaagtgaaactcattcatgcaagtgctcaacgtagaatagagattttgcgttaa

SEQ ID NO: 706 - DNA, 207 bp, Lactococcus lactis
atggaaaaagaacaacaccgaggtttcaaagcctcttggtttttcaagtggtttattaataataaagtagttgcagctttagcaatcgtccttctcttattactaaatattctcttactcaataaagttggatttatttttaaacctgtaggagaatttataacggttatctcgctgcccgttattttggcagctgtattttattaa

SEQ ID NO: 707 - DNA, 174 bp, Lactococcus lactis
atgttaagagcacaaccattgtataacctgatgatttataatttgatttgcaattgctgccttctacttattatattttatattcaattctctcaacctatcataaaaaagttttatcgttctatactcatcctcttttgttgtttttacgcatcctctaaaacgggtatttag

SEQ ID NO: 708 - DNA, 177 bp, Lactococcus lactis
atgttttttcataatctttttcatttagagcgcgctatgaggtatcgttttatgacaagcataaacaagctagttttaggtcactctttaaccatactcttcgaaaatatccctttgtttattctttttccctggtgttacctactaggtgagacaatttttggtagaattatctaa

SEQ ID NO: 709 - DNA, 1071 bp, Lactococcus lactis
atgaaacgtgaacaattaatacaaaatattgaaaaactaaaacacatcatgccttcttatgttttagaatattatcaatctaaacttactattccttatagtttgaatacactttatgaatatcttaaagaatatgaacgtttctttagttggttggtcgattctggagttgctgatgttgataagataactgatgtttccctctctgttttagaaaacttaactaaacgagatttggagtcatttatcctctatcttagggagagaccccgtttaaatacgcgctctactcgttatggggtaagtcaaacaacaattaatcgtactctatctgctctttctagtctttataaataccttactgaagaggttgaaaatgaagatggtgagccttacttctatcgtaatgttatgaagaaggtacagactaagaaaaaatccgaaactttagcttctcgtgctgagaatattaaagggaagctttttttgggagatgaaactcaaggttttcttgactatattgataatgaatatgaaaaaacattatcaaatagagctcgttctagttttttcaaaaataaagaacgtgatttagcaattattgcacttattttagcctctggtattcgtctttctgaggcagttaatgtagatttaagagatttaaatcttattactatggttgttgaggtaactcgtaaaggaggaaaaagggatgctgttccttatgctccttttgccaaaacttattttgaaagatacttggaagtacgaagtcaacgttataagactacagcgaaagatacggcattttttgtgacactttatagagacgttcctagccgaatagatccttctagtgttgaaaaattagttgctaaatattctcaagcttttaaagtgcgagtgacccctcacaagcttagacatacacttgcgactcgactttatgctcaaacaaattctcaggtattggtgagcaatcagttagggcatgcttcaactcaagttacagacctttatactcatattatcaatgaagaacaaaaaaatgctctagataatctataa

SEQ ID NO: 710 - DNA, 975 bp, Lactococcus lactis
atgaaaataagtattgaccaacagtttcaaaactttctcgaattacatcatttagatttgaaccttcttttagaagaagcccaaattccaaatttgctttggaaagaggaaattgttttaacgaatcaacaattttataaatttcaagaggtcctatcaaaaaaattgactgatgaacaacttcttttgataagtgatgtccaaaattttggattatttatgcccatctttttcgtcgctctttcttctgcaaatggcttacaagctataaaacgtttggcaaaatataaaaatgtcattgctccagttgaaattaaagtcagtattcaagaaaaacatgttcaagttgaattaaatgatatttctgaaatacaaaatctttcacgtttttctttatttaatgagcaacttattattttaagtattctaagaactggaacaggccaaaatattattcctgaaaaagtaatcagtccttatccattcagttcttcaattttggaagtttttgggatttctcctgagctttcaaaaaatgataatcttttgagttttaatctccaagatttagaactaccttttttgaccagaaataatagtatgtggcggatgatagaacccgaactgaatcgtcagctggaagaaatcaaaactccttctgacttcatcaatagccttcataaagaagtccaactcttgattccttctggagactgttccattcaaaatgtagcaagaaaactaggaattagtagcagaacccttcaaagaaatcttgcacaagctggtactacttttaaagtcgagttacaatccgttcagaaaaaaatggctctccatttttcaaaggatttaaatctcacaactgatgaaatttcttatctcttaggatattctgaggtcagttctttcactcgagcttttcgtaaatggacgggaatgactctgaatcaatatcggaaaaaactgatttaa

SEQ ID NO: 711 - DNA, 1140 bp, Lactococcus lactis
atgagcgaaagccaagttcttacacataaatgtcccaattgtggaggtccactgctttttgaacccaaaaatcaaaaatttcactgtgaatattgtggttcaacatttacggaacaagaagtttctgatttcgaggccaagcaagaggcagcaaaagttactgacagtcctatcagctctgtcagtaacgctgaaacgactgacgaaaaggaaaaaattactgacagcgaccaaaaaagagctgacgaaaacactgacgaagaaattggactatttctctgtccatcttgtggtgcagaaatcgtcactgatgcgacaactgcttcaacttggtgctattattgtcataatccggttgttctgaccgagcgattgtctggtaaatttctccccgaaaaaattctcccttttcaaattgagagaaaagcggctgaagaacaatttttagactgggtcggtaagaaaaaatttgttcccaaggccttttttgacaaaaaacaaattcaaaatctgtcaggcgtttatttcccctattgggctgttgatgctgaattatctggcggtatttcggcgcaagccaccaatttacgcgtttggatagttggagacactgaatacactgagcattctcaatatgagattcagcggggcggagagacaaaatttaaggatttaatcaaaaatgccttgaaaaaaaatctgtcagacaagatggttggcgccgttcagccttttgatatgactgctgctattccttttaaaaatcaatatctttctggctttttaactgaaaaacgagatattgaattccctgatatgaaagaaaatgttgaacgggaatttcgtcaatatgctgacggattaatggaatcaacaattatcggttatacttctgtcagtaatttacaaagtaatcagcagattaaaaatatcgatgaagattacgttttactcccaatctggctggttacttataaagaagctggcaatgaccgtctcttttattacgcaatgaatggtcaaactggtaaagtagccggtcttctacccattgataagaaaaaactttggacagttgccattggaatctttattctagtgcttcttcttggaattattgtggggtatttgctatcatga

SEQ ID NO: 712 - DNA, 813 bp, Lactococcus lactis
atgaaaaaaacaatactcagccttagtggagtcgcagtaattacagcaacacttttgtcaacaagtgttttagaagtcagtgccgcatcagtgggaagcacgacgagtggagctaatgtggcttttcaacctaagaaaacgccaaccaatccggtatcacctggcgatggtaaaacgccaattagtccaactacgccaggagttcctaatacttcaaatcctgttgcttcagatgatggattgactttggattatgtaccagccattaactttggtactcactatgtagatgcttcaacagctcatacttggtcagcttgggctgcaaatgatggaagtggtaaagctattccgcaattcttgcaagtaacagataaccgaggaacagcgactggtccaacaggatggtcagtttctttgacgcaaacagctcaatttaaaggaacgaaagctggtgatttagtcaatgctgttatgacttttaacaatgataaaactaatacggttgttagtacatcaatgaataaagcaagttcaaccgtgaatacggcaacgaatgctcttgttccaggaacggcagtaaatattttccaagcagatgcagggacagggacaggaacaaacttgcttagttttggtgcgggagatggttctactttggtaaccgacccagaaactttggattctgcaacgaatacaacaggtaaggtagatccaaatattactcttaatgtaccagcaggatctgccaaagtggatacctatactacaactttaaactggaatctttatagtgcaccaggtaatgcataa

SEQ ID NO: 713 - DNA, 1005 bp, Lactococcus lactis
atgaaaaaagtttataaattaatctttctatccatccttagtatattattgatagttcaatctaaagttgcttattcagaaagtccaaccagtgattttagcgtagaagctatacttgaaggacaccaaaaagataaaagcattacttattggtggttgcaagtagaaaaaacgcagtcaataaatctaaagttaaaaattagtaatggtaatgaagaaaataattttgaaattacatctaatcaagcggttaataataataattttactctcgattatagcttatcagcagaggaagtcagtcaatatttacatcataaaaattcaaattttaatttctatcaagatatctattttgatgaaacgcaagaagcaggtaagttaaaaattactttggctcctaatgaagttagagaaattacgattaatctaaaaattcctaaagaaggaatcaaaggtcaactaattggcgggataaatgtcacaaaagtgccaaaagagagcgaccgtcaagaaggaatcttaaatgtttacagtaacgttgttgctcttgtgatggaagataaagattactcagaatcacataaacagaatttagaatttgctttggaaaaatctaatgagaaagaacaagtcataaaaatcaaaaattccaattcctttcttctaagtaatatgaatataaaagcggtgataaaagaccaaaaaggggaagttgtttcagaatttagtaatccaaagacagcagtagtccctaatgcgtcggtaagtattaaactgaataatcaaaaagaactagtaaagggagcaaaatattatttaacagttgactcctctaatcagacttttaagcggaatctaatcgtttctgactcagggaacttaaagattctagagaagaaaaaagaagagattcagcccttaaataaaaaatcagtaggcctatcattaattctaatggtcgtcatatcttctggcggaatttatgcctatttcaaaaaatag

SEQ ID NO: 714 - DNA, 1626 bp, Lactococcus lactis
atgttattttttattaactcaacatttaatcaaaaaaattcagggatagagcatgcgcaactgaaacgtgcatctttatttcgggagcataaagaagcttttaagctagtatttcgtgaatggaatcctagtattcatcgttttttagctgaagcaggtgtttctgaatcagaaactctctctatgtttgattattttcaaaaaacagaacatgttgaggagaagatacttcatgtcgaagatttggattttggtgtcgagtctttgacttacaataaggaacccgaacaatctagatatcttgtttttcagggacaacagcttattgcgcgtgtccgatattttggagaagacccacttgaacgagtaagtgctgtcgaatattttgatggatttggaaatctttatcgagttgatttttatgattttcgtggttttttaagtttatgccagtggtacacacctgataataagattggtacggaggtttggctggatattaatggtaaaccagtactagaaacatttaataaatatgatggaaatatgaaatatgacaaaactggttggcggttgcttagttctgaaggcgcaatctataattttgctaacattgatgagttaacgcttcattttcttgatttattaaatgaggaatactggcaaggtgataaagcaaatattttcattatggacagaactcatttggcagattgggcactattgaatttagaaagacctgcctatacggtacttcatttgcataattcacatgctggaaatgcccaagagcccatgcatttggtcatgaataacttttatgagtttggattgatgaattcaaatggttacgatgctattgtttcagcaacagaaaaacaaacacttgatgtttcaaaacgatttaatcctcaaagcaaattatttactattcctgttggagttgttccaaatgaagttttttcagaaaagcgaattgatatgaaggagcgtaaagtgcatagcgttttggtgactgcacgtgttgcacctgaaaaacgaattgatcatatcattagggcgatagggattgcaagacaaactgttccagatattacgctagatttttatggttatgttgatcatcgaaatgatgattcagcacaaaaggccattaatgctgcgataaaagaataccatatggaagaagcagtgcatcaatttaagtatgctaataatgttggggagctgcaaaaagagttccaagtctatgccctagcttcaatcatggaaggttttaatctatctctcatggaggcaataagtcatgggatggttggggtaacttatgatgtaaactatggaccaaatgagttgatagtggatggagaaaatggttttgttgttccttatgagggaattcaagaaatggctgaccgtttagttgaactgtttactcaggaagataaactacaaaaaatgtctactcagtcttatgaattatctagacgttattctgaagaaaatgtgtggaaagcttggcaagctctcattaacgatgcaaacaaaaagaatattgcttatcgttcaccgattacagagggaataggggatcaaaggatttactctacaaaaaaatctaagtag

SEQ ID NO: 715 - DNA, 4326 bp, Lactococcus lactis
atgaataaaaaaaacctaaaaatccctgaaaatgtccatgttcatgaaaatttcagaacatggaaatcaggaaaacaatggctttacgcctcgtcagttttagccttgattgtagctggaggagcgattgctgcaccaagcgtaaaagctgaccaagttttaccaggccaacaaactggagctgataacactgcaacaggggctcttggctcaaatgcaggatcttctggcgcaggaagcaataatgtaagccttgctaactctgctaacaacgtaaattatagctcagctcagtctgcagcacaatcttcagttgtggtctctagttcagctcagtcttcagctgtagcttctagttctaatcctttatctgcgaatccaagttcttacactgatggttcagtagtaaattccaactcttctcaactcaaaacagatagtggtgtagctgaaaattctgttgcaacaaacacaaacgggtcttatgccgttcaagatttaaattcttctggtgttgctggtactgcaacaggctctagtgctcaagcaagtttggcaacacctggttcatctgatgccatcttgaaaacatcagataccaacttgaactcaaatggagctgtaacagcaggttctggtgcctcatcatcagtaagctttgacattaaagatactcaacaagttcctggtgcattaaatattgtaaatggtgcaacaggttcatatacttggacggtttcagcaccatcagatttaacgaatgcagggctttctgttgctaatgtaaacgttgcttatgatgcttcaaaaggtgatggtgcgctcaatgtcaatggtaatgaagcttactatcaaacagctggtggtgattatgtcattgggactgaaaatgtacctggctatcctacaggttctagtgctgcatctatgttcacgccaacagaatcagctgcctctattatggcctcagcttcttcagtagctgcttcatactctgatgctaatatagcattggctagccagtatgccgatgctcaatcactttataattcttattacgctgccaatggttttgatggtaccgcagcttcttacgccaataatttagtagcaattcaagcatcaattgcgagcaacaataatgcaattgctgctttagatatcggttcaacacctggttatctgcgctcaagcgttgcatcacaagcagtggttaatatcacttatacgacagactctaatgttgcatcacaacttaatacagccttcactgcagcttggggaacagttgttgctggtccaattccaggaattactcaggggatttctaatgtcattcaagagattgccaataaccttggaaatgccttgaacggaaacatcgtgtcatcattgattacaactattgcaaacggtgttttgcaaactgttacggcggtaacaaatggtttaatccctactgatgtcatccaaaactttatcacaaatactgtaaactcagcttttggtagtacaaatatttcattaaatggtttgttatctggcggaacgtcagtgattacaaatgctttgaattcaatctttggtgctcaacttcctattattaaccaatcaattggtcaattggtaggagtgaacgtttcaggaattacacaaggtattcaaactggtatgggacaagtttctagcttgattaacacactcgcaactgctctcaatggctatgcagcaaatgttcaagcttcacaagaccaaatgactgctcttgctaaagaagtacctaaagtaataaatgctaatggtacatttaatgaatctttcctcgcaaatgtaacccaaaatgcagatggtacttatactgtttcggatacgggttctcacagccctttgactgctttgaccaataaagtggcacttgttgtcaatggctatattcaagccacttcagtagggttgaaaactattgtaacgattcctcaaaacctgattgatgcgattgctggattgtcaaactttaaccttggacttaacacgggttcattcttagatggtgtcttcaatactgtaattaatggagtagttaacggcgtaggttcttttgcttcatcagctatgcaaggcttaaactctgttacagctggcgcttctgaccttgtcaataatacatctaactgggtcactcaatcaacatctaatattgtttcacaagtagtaaatagtattgcaaacgcttcggcaacgggggttgcaacggttactgtaggattcacagcagcagacccatcttcacaaatcgcaacaaatcttgcaacggctaaccattattaccaaggacaatctgctgcaacaactcaacgtcaacttgataacgttttcgttcctgaaacatttaaagtgacaccaactgcgcttgcaggtcaaacaaatacgacaacagactatacttcagttgtttaccaatacaacacaaatacaatcaaaggaagcattgttccagttgattcaacaggaaaagcaattgctaatgcaaaagcaactgcctatgaaaaatacagcgatgaaacagttaacgctccaacagcaccagcaggttatgttcttaacgatgtaaataacaaagcagtatctgttgccgatgcaaacggtgtgattaacttcgtttatgatgctattcaaccaacattgacaacaaaagattctacgattgacgaaggttcaacgtggactgcagcagataacttcacaggtggaacaagttctactggaactgtattgacaattaatgatgtgactgttactggtactgttgatacttcaacaccaggtgtatctagcgtaacatacacttatactgacccaacaacgggtgcaagtatttctagcgtggctaatattactgttaatgattcaagtaatacaactaacccaaccgacggcacaggtggcggaaatacaactaacccaaccgatggcaacaccattgtgcttccaggacaagatggaaagttaggaacagcagatgatgttactgtaactggagatcaaccattgtcaccaggttcagacggaagtgttacacttccaagtgatggtggaaaagttgaccgtcctgatggctcatacaatgtccctggaggaacagtagtagacccagatggaaccattcatctcccaggaggtactgttatcaaccctggaggttctgttactgttccaggaccagatggtaaaacaggaacagatgatgatacaactctcaaccctaatagtccagttgtcccaggagacaacggaagtgttacattacctggaggaggaacagcttcaacaccaaatggtaatataacccttcctggaggaacggtagtagacccagacggaaccatccatctcccaggcggcgatatcgttaatccagatggtacgattacattaccaggtcaagacggtaaaactggcacaggtgacgacggtaaaatcaaaccaaacggcccaattattccaggagataatggaagtgtcaccctcccaggcggaggtacagttacaacaccaggaggaacaattaatgttccaggtggaagtgtcgtagacccagatggcacagttcatctcccaggcggcgatatcgttaatccagatggtacgattacattaccaggacaagatggtaagacaggtacaggcgatgacggtaaggttaaaccaaatggtccatctatttcaaatccagatggaagtattactctcccaggtggtggtacagttacaacaccaggaggaacgattaatgttccaggcggaagtgtcgtagatcctgacggtacagttcatctcccaggcggtggcgtcgttaacccagatggcacgattacattaccaggccaagacggtaaaactggtacaggggatgatgttaatatcaaaccaaatggtccatctgtttcaaacccagacggaagtattacacttccaggtggaggtacagttacaaaccctggtgggacttataatgttccaggaggaacagtagtagacccagatggtacaattcatcttccaaatggcgaagtaattaatccagatggtacggtttcaggcaagaattcaaatacaccgacgccaaataattctggaagtacatctggatcaacagccaaaacactttcaagtaatagtggctttagtacacttaattcaaataatacaacattacctaaaacaggtgatgacagtatgaatagtgctgaagcaattgcacttggaatcagtgcattacttggagttatgactcttactgaagtgaaacgccgcaaagaaaattaa

SEQ ID NO: 716 - DNA, 348 bp, Lactococcus lactis
atgaaaaaaatattaattggacttgtggccttagtttttattattggaggttccgctttcgcttggtacaagataaattatggagggacaaattattatgtccaaatccataatgacggaaaaaaacttgaggaaaaaacacaaagcggttctgtttggcatggctatggttataaagaaaaagcctacaacaatgcaggacaagaaaaaacactagactttactgccacgcataacttacgccatgaagcctatttgaaattaacttataataagcaaaaaggagtgacaaactgggaagaagttaaaaaaactgcaatccccaaaaaggctctagataaattataa

SEQ ID NO: 717 - DNA, 906 bp, Lactococcus lactis
atgtctgaaaatttaacaagagaatggattaatttctcagaccaaaaactgtttgataaaagttatctctcaaaaacatatcacattccggaagagttcttatcttatgcaacagataaagacgagagtgctcgaatagagattgacgatgaaactaaaagtctactcattatttttgatatgccatttgaagatcaaacagatgtggcttattattcatcgggacctatgagttttattgtaacaaaagaggtcatcatcacaaatgtagcggataaaaagatggcaacaatcttgaaaaattcaaaactgcttcatcagttaaatccaaaacataagacttcttttgtccttcatttcatgctagctattgccaaaatttatgtcgataaaattagaattctcaatcgtaaaagaatattaatcgaacaaactttgggtaaggcaccgaaaaatgaagacttgattaatttgatgaaaattgagcgaagtttaatttatttcattatgtccttgaaatcaaattctttagtcatttctaaaattaaaagtggtaaatatttaaaactttatgatgatgaaaaggaacttcttgatgatttaatgattgaagttgaccaagcttttgatatgtctaatatttcaaataggattttgaatgagatgactgattcttatgattcaatcattaataataatacaaatagtgtcatgaaatttttgacctcttattcaattattctgactattcctaccatcatttttagtttttatggtatgaatgttcctctgcccttgactaatctcccaaaaatatcttgggaaatcatttgtttactagcccttttcttgtcagttttactgactctcttcttcgtcaaaaaagattatttttctaaacgatag

SEQ ID NO: 718 - DNA, 369 bp, Lactococcus lactis
atgaaaattgatgtcaaaaagttttctaagatacaagatatttatattagcccagacccgcaagaacatcgtcctgcttggatttggtttgcttatattgatgatgatttagcggtagcagcaggtcgcggaagggcatcaagttggtggaattcggcaatgatttcacgtaagggtcaaattcacattgacgggaaagtctatcaagtggaatttgaacctgtgacagataaagaaaatattgataaatttattgattcttatcgacaacgttcaggttatagctgggaccctgcttgggagaaaaattttagaccgacagtgatgcgcctaaaatttttgaaggaacttggaaaaagcataagataa

SEQ ID NO: 719 - DNA, 453 bp, Lactococcus lactis
atgaaagaagagattgacgaaaataaagaaaaagaagtgattcaaaaagcatataaatataatatctttcttggaatctggattatcgctgtattcatcatttttttgctacaaataacaaaaattattacagaccaatatttaactttaggttttggtttaattattttaatttatacgattgctcttcatacccaaaatcataaattaaaaataaaaagtattgcttcgattttagtatatggtcttaatatcttgagtgttattggtgttgttttgattattttagcaaatcaggcgcataatcttttggagttagcggtaggggtcttattgggattggtgacgcttatcttacaagtttcagctgctatttttgcactattgtcagcgagaaaattgcgaaaactctatcctgatattcttgataatagaagaaagaatacaaattag

SEQ ID NO: 720 - DNA, 573 bp, Lactococcus lactis
atggtaatggaaaattcagaaaaaatatttctactgacaaatgagggtgttgattattttattgatactgaaacctaccgattatttaccgattcagaacaaaaaacaattaatgttcctcagttggtgggtgtatctggggcgatagccactgttttgggaataatttttaaaggaaatattcttatgattaaccctgaaaataaatttatagttgtactattaatgtggcttatcatcattatttcctccatttttctgccaatttatcaaattaaaagaaacaaaaggataatctctagtggtagactaattgtcaaaaagattgataaatcatatgatgcttatctgttcaataggatttatagggcatcaatattttacgtagttgcttggattgcgcctctggtaatggtagttatgtcaatttattttattgattatactaatgtcatgtttttagttgcccttgtcgtaatgatgattttaagttcaatttcaacaacattcatcataacaattcctaagcgttacaaactacttaggaagatgaaaaaagaaggaatcttttga

SEQ ID NO: 721 - DNA, 648 bp, Lactococcus lactis
atggtaaatatagaaaagaaaagttctatctttgattctcataaacaatttttatatgaagaagttgggaagagatattacattgatacacagacctttcagcttttttatataaaaactgagattaataattcttcttcaaatcagaggaaaaattttgctcaattttcagggattctagcaactgttcttggagtgttagcacaatcgattatttcttcaccaacttatctggtaaaaatatctttagttttaggaatggttattttaacagttcttatcacttctcttttatattttgttgagagaatgtttgattatccaagatttaaagacttggatagaggattaaaagcttggaaatacaaagctattgtgttggtgcccgaaaaaaagttgaggatacttagagaagtgaaaaagcatattaggatagttatattaatctgtttgtttttcttaatcttaactccaatatttggaggactatatgttacaacttcagaacctagactgtttattctatatggtattgtattttttctgttcactttactctttccatatttaattttggcaattaaaaaagaaaggattgttgataaatgggagaaaaaaacaagagaaaatggtaatggaaaaaactaa

SEQ ID NO: 722 - DNA, 312 bp, Lactococcus lactis
atggccgagaatcagctattctatccacggttagaagaattaataagaatatcaaaaaaatcttttaatcaagttgaaagagatctaggatatcctagaaatgcgcttcataattataaaaacggtgtggaaccttcgggaattcgattgattgaattggcacattatttcggagtaacacctgagtatttgctaggaataaacaatgaccccaaaaataatggaaccagaattatttttgaaagtcttaatgattatcagaaaaaagatttatgcattatttgtcaagaatggttgttgtcttcaaaatag

SEQ ID NO: 723 - DNA, 780 bp, Lactococcus lactis
atgccaaaggaaaattttaatggtgtaattgctggtggaattacttttaaagagaaggactcagagaaaacaaattctaattctaagggattaagtattcaaaataaatatgcttacgttgttgctttactgatgcaacaaaataaaaatactgttgcgcctgacttgaaattaaatagtgtagagcctagtcaggttaattatagaaatgtaattaatgccaatttacaaaatccaatggctggatatctaaatcaaatgtatgttcaagcagaggtcaaaggtttaagtaattctaaattatcttataaggcaaacaaagagatgctgcaaatggcaccaaatagtaattttgattatcctgtttctattggtgatggaaataagcttgaagcgggtaagtatcgtctatcgatgacagtatatgggcaaaaaaataatgacggaaagttcacttatgttgattcaaaaggaaaagaacaaaaatttgattatcaatggaaatttacaaaagactttacaatattaggtaaaacagcaagtaaattaaattcaaaagatgtaactgttaaaaagactccgtggtatgaaaattggcttatctggttaggtttattattaattcttttagctcttttcttcttgttctttattttatggaagagacgtaaaaaagaagaagaggagcaagatttagaaaaagaaaaattaaaagctcaacttgaagaaatgagagagcaaataagtaaagaagataattctgatgagacagacgtttag

SEQ ID NO: 724 - DNA, 375 bp, Lactococcus lactis
atgaaaatttatcaaaaagttttactgttcattgccactatctttactttagggactgtcagtaaagaagttcatgcaaatgaatttaatttttctgtgaacccggttcttccagaaaaccaaattggcgagagcggatactttaatttacaaatgagtccagggcaatcgcaaactttgacgattactctaaaaaatactactgacaaaacagtagtggttgaagaagaaatagctagtgcgacaacaaatattaacggtgtggttgaatactcaccaaataaaattaaagcagattcaacactaaagtataatctagtagactatgcctcaattccaaaagaagtatcactacaaccaaactcttcacagtaa

SEQ ID NO: 725 - DNA, 759 bp, Lactococcus lactis
atgaaaaaaataagatggttaagtatacctctcatcttaatgacattaggattggaatttcgagttaatgcagcagaagtccaaagctataattcgcaaggaatagttggttttggtccaggtagcggagttcaaccccctgttaatcctaacaaacctgatccaactttacctgtatttccacaaaatccagatggttcaaagcctaatccagggggaaatggctcactgacaattgattttgcttcaagttttgactttgggaatcataaaatttctaataaagatcaaacatatttagctaaagcccaaaagtattttgattctgaagttttaacaccgaattatgttcaagtaaccgatcgtcgaggaacatttgccggttggaacttaaaagtagtcgaaaagacacaagttactcaaattgactcaggccctcagaagtacaaagtacttaaaggagcaacgattaatttaaaaagttcagaaacagcttcttttactaatgaaaaatctcccaaaacacaaacaatttcgggacttattcccggtgttgaaactcaagtagctcttgcctcaactggcgaaggagctggaacttgggtaattcgctggggaaacgattcaatggtcactgaagatggcttaacaacagcagtttcattatttgttcctggagatacccccaaggatgcaactgcttacactacaactttaaattggatattgtctggtttaccgacaaacgtgccaaattaa

SEQ ID NO: 726 - DNA, 846 bp, Lactococcus lactis
atggataaactaattttaaaatcaacaacacttcttgccggcatattgatttctgcccctatgataatcacaaccgctagtgcggcgactacaggtggggattacacttcaagtgcaaatttgactttacaagcaggaactggtccagtcgaccctcttgatccaacagacccaactaatcctgtaacaccagtagacccaggtactccaggtgcttctggaaatcttactgtcgattatggttcaaccctttacttcggaacccaatcaatttccactcaatctaaaacttattatgcacatcctgatatggtaaaagatcaatctaacgctgtaaaagtagtgcctaactatgctcaagtaacagaccaatcaggtgagctatcaggttggacattaagtttaacacaagcttcagatcttcatatgactactggaacatcaacagatcctggatatgcacttagtggtgcacaaattagctttaccggaggcactctccttggaggaaatggtattaccgctgggaagccaagtgatgttgtcgcttcaggaacgctcacaccaggagtagcaacaaaactagtttcagctgcaaaaaatgaaggagcaggaacttggttatataattttggtgatgtagatgcctatgatgcaagttcagttgatacagccaataccacagatcatactaaagtggcaacaaaatcagcaattagtttggctgttcctgcaggtttgattgagaaagcggcaccatatactacagatttgtattggagcttacaagccgttccaggaaatgattgggatggaaatacatctgcggttacaccagcaccataa

SEQ ID NO: 727 - DNA, 327 bp, Lactococcus lactis
atgtcttcttttgaatttatatcattaacaattattggatgcgctattgtaacttggatttcaagagttctaccttttattttattaaaaaaaatgagtttgcctcaaatagttgtggaatatttaagttttgtgccggtagttattatgtcagccttatggatttcaaatctttttattcaacatttaggtcatttaccatcggttaactggaataatttacttgcttcaattccaacggttttagcagctattttgacaaaaaacttattagttattgtgcttgtgggagtattttcactagccttcattcaaattattttttaa

SEQ ID NO: 728 - DNA, 3219 bp, Lactococcus lactis
atgtctcaaaaatcaataaagaaaataacgatgactgttggagtaggattactgacagccactcttaatcccacatttttgaatcatcagttgctgacagaattaccggtggaggccacgacaagtaaaattacatatactgatgagcaaaaaattacttacaaccttgataaagtttcactgaccgctgaagttgcctcctatgctggcttagcgggagctgatattgtaattccagatatcattgtaaataacggtcaaacctatgcaataacatcaattggaacttatgcattttcaaatagtggaattcgttcggttattatcggaaataatgttgtagatattaatactagtgcctttcaaacaacaacagcttttcctgactattataagaaatcactgacaaaagtagttttaggagcaaaagtccaaaatataaaaacagatgcttttgctggaaacgccataagtagtatagaatttccaaattctgtcctaaagattgcgacaagagcttttgcaaataataatttaacagaactttcattgggttcaaatatcacagaaattatggccaaagcctttcaaagtaaccaaatcactacaatagaatttgctgatgaatcattgacaatagtagattcagcggccttttctgggagttccgttcaaagcttgactttgggaattggagtgactttggctgatgacgtattcaataaaacgagtcctttatttggtcagttatcagatttaccgacagatgaaattcggacaatttctgtcaattctagtggtctttttgataaaagttggataaattctgacagttcacaatcgacttctgtgagtacagaaaatgcagatacaacccctgtctcttcttccaattcagtagagcaagttgatgttgccagttcagaatcgacacaagatgcaaattcggcttcactctatccaatatctgaagcgagtagtgttacagataatactttaaattcaatctcttctttagatagtagtatttctagctcacaaacagagaatagtcagtcaggagcttccagtacagcagaaatcagttatgattcagaaaactcaaatagtttgtcttcttcaaaccaaatcaattccaattcaaatagtgaaaaggattcaaaccaatcctcattaggttcgagtatgtcctctaacgaagaaagtgagcattctaattcttccaatatcaacgaaacgaataatagttcagaaataaccaatattttaccaccatcaaatccgacagaaagtaattcagtatcagatcaaacaagttctgaagcttcaaccaattcaaatagtagtatcagtttatccccctcaaacataagttcaacttctgattcagaatcagcaactaattcgtcagatttttctaatgtagcagaagtagctaataattccttagcttccgtaaacaatagttcaagttcagttttatccagtacaagcacagcagataatttaggaataaatcaatctggttctgataatcttacaaaggatagctcggaaatatctacttcaggagcctttttgtcttcaaatcaaacaagttctgaagcttcaaccaattcaaatagtagtatcagtttatctccctcaaacataagttcgacttctgttttggaatcaacaactagttcgtcaaatttctctaatgtagcagaagtagctaataattccttagcttccgtaaacaatagttcaagttcagttttatccagtacaagcacagcagataatttagaaatcaatcaatttggttctgataatcttacaaaggatagctcggaaatatctacttcaggagcctttttgtcttcaaatcaaacaagttctgaagcttcaagcaattcaatgagcagtataaattcaccatcattaagtctgagtttaacttccaactcagaatcagcaactaatcagtctaattcttccgaagcaacaaaagtagataataattcatcaactcattcttcaaatattttaaatagtggttcaaatgatagttcagattcagattcagattcagattcagattcttcaaaccttagtagtagccctaatttggaaacgaatcaaactatttcgtccaaaccaagtgaagtaaataatatatcagaaaaccctaagaaagtttcttcttcaaattcagttcaagaaaactcaacagaccatgagatgtctactaacccaaaaagtagcataagttcacctatcagcacaacttctagctcacaacaaaaagagagtcaatcgaatctacttaatacaacagaaggaatcaacaatccaataacttttaataattcatcatcagaaaattccgctgcctctatcctaactagttattcaaataataactcagaatcatcagaaacaggatgtttatatatatctaatgaggcacaaagagacaatggttcagagatttctcatagtttgccatcttcaaattcaaatgaaaacaacgtgtcttcaatacaatcacaagcaattttagaaagctctaaaagctcaacaaataagagaagttcatcattatcaattataaactcaacttctcacccacaaaatgaagataatcagtcaaattcttctgatgaagtaaaatcaaataataatgtagagtcaattttaggtcaattaaattccataagtaacaaaactcatatgaattctttgactagccaaaaactatcagtaatttacaccttaccaagcaaatcaaaagtgacgaatgaaaaaaatgaaaattcaaatacagtaagcgaagaaaaactgatcaaaactcctcaaaaaaatgatgaaagtcaaaatttaggacaaataactgctcttgacttatcttttaacaaagaagtagagactatggaagattctaaaacagttccagataaagttctagataatgaaaatggtgatcggagtcaaaataataaaacgagtactattgctaaagataaaaataaagtttttttcaaaaggtctgaatttaattctaaaatacttgatagcgacaataatattttaaagaaaactgttcttttaaaaaaacatggtcttataagtgacaatcttctcattggactaataacaattttaggagcttgttttattttcatatttatattatttaaaaagaaaaaaagagtgaaaaaagatatcgactag

SEQ ID NO: 729 - DNA, 894 bp, Lactococcus lactis
atggaaaatcaattgttaacactaaaaaataatgagcttactgttcaaattaatccaaaaggggctgaattaactcatgtaattgagaataaaaataaatttgattttatttggaatggttctgagtggccaaaacatgccccaattttatttccggctattggacgttcaactgatgatgaatatttgctgaaccagaagatttatccgatgcaacaacatggttttgcttcagattatttctttgaaattattgaccagaaagaagaccagataagtttgtcattaaaagataacgaggaaacttatcaatcctacccttttcaatttgaattaaaagtcacttatcaactggtcagtaaaaaattgaagattcaatttgaaataaaaaatctgtcagtaaaaaaattgacatttgccttaggatttcatccagcttttaacctatcagcaaattttgaagattaccagatttcctttgaaactaaggataagactttaaaacaatttgaaattgtcaaaaatccatttccttatcgttcgggaaaaatcatagaaattaataaagctgtcagtaattttccacttgaaagagaattctttgaaaaagggctcgtcatttttgacaataaaatcgaggaggtgaaacttttttcacaagagacagattatcaaatgaccatgaaaatggcggattttccttatctttgcttgtggacaaaagaagacgaaaatctttcttacctctgtattgaacccttccaaggactgcctgatattctcaatcaaaaacaagaactcttgcaaaaagaaggaaatatcagcttaaaatcaaatgaatcaaaaacttatgaagttgaattaacttttaatagtaataaaggagaatcatga

SEQ ID NO: 730 - DNA, 204 bp, Lactococcus lactis
atgtcaaagaaaaaagatactgaacttgaaattattgatacagctgacggagctgtcattaaaagtggaaaaaaaacaatcgccgaaattaaagaaaaatcaggaaattttgtcattgttttttcaggtaaagaaattgctacagtgacttcttttgaagcagctcttgaagaagcaattatggcttataatctttcgatttaa

SEQ ID NO: 731 - DNA, 1155 bp, Lactococcus lactis
atgcaaaagaaattcaagttattagcaacttcttcaagtggtttagagagtttagttgctcgcgaacttcgtaatctggaaattgaaaatgtttcaattgacgaccgttcacgtgtcttctttgagggaaatttggcaacaattgctaaggcgaatctttggttaagaacggctgaccgtgtaaaaattgtagttggggaatttaaagctagaacatttgatgaattgtttgaaaatgtttatgcgcttccctgggcagagcttattccttttggaagccaatttcctgtcagcaaagctaaagcggtgaaatcaactttacataatgagccgtcaattcaaagtatcactaaaaaagcgattgtcaaaaaattacagacgacatatcatcgtcctgaaggtgttccaattcctgaaaatggagctaaattttcaattgagattgctttacataaagatatggcaactgtattgattgatacgactggcgattctttatttaaacgaggctatcgttcagaaaaaggagaagctcctttgaaagaaaatatggcagcttcgattattttattaaccaattggttagcaaatcctcgtcgtacttttgttgatcctacttgtggttctggaacatttacaattgaagcagcaatgctggctttaaatatggcaccaggaatgaatcgtccttttgcttttactgcatggccttggtttgatgaagaaattttgaaacaagaaaaagctttggccaaaaaacaaattcgtacagatttagaattggatattcaaggttttgacattgatggaaaaatgattgaaattgcaaaacataatgcacttgcggcaggcctttcagatgtgataaaatataagcaaatgcgacttcaagattttagaactgataagcttgacggtgtcttagtttctaacccgccttatggggtgcgtttggaagttgaagaagctgtagcagctctttatggtgaaatgggtaaaacttttgcgccactagaaacttggagtaaatacattttgacgagtgatgtcgcttttgaaaagcattatggggcaaaagcaactaaaaaacgcaaactatataacggaacacttagaacagatttgtatatgtatttcggaaaacgtatgaaataa

SEQ ID NO: 732 - DNA, 234 bp, Lactococcus lactis
atgtttttagttttatgttcggtgatgattttcattggatttcttttacaaatctatgtttggccacgaattccaaaatcaatttttaagtatagaggtttagtcttatctatttctctcattattcttatttttgttgtaagaataccactagaaattactgcattgacacttccattttatttgatgatgtttttcgggctctttcttttttggaaagatagaaaactttaa

SEQ ID NO: 733 - DNA, 306 bp, Lactococcus lactis
atgagagagaaaattttgaatcgaattgagaaattgctacgggcaggttcaaaattaaacgaagcagaaaagaaaatactgatggactattatgaacggattgaaaaatctaaaaatatggaatttgaactcgttcatctcagaaatgccttgcttcctttggtgatttcttctcaacattctttaaatgtcttaaaattttacaaggaacttcgttcagagcgaaaggtgacttggggcgagggaagttctttactgactgggatagctcaatttccagaaaaaaatgaaaggaaacacttatga

SEQ ID NO: 734 - DNA, 384 bp, Lactococcus lactis
atggctcaatcactaaatactaaggctgattattcaacagaaggaattgcttatttaggttttgctgaatatggaaaaattctgattggtgatgttgcttttgagttttataatgaccgaaatgttgaaaaaaatatgacttttccttggacggcagtggctcgtgttgagggtgatgtttcaaaatccctcaaaggtgaggtaaaagttggtcgacaattttcaatcgttttacaaaatggctctaaggttcgattctcatcgaaaaactcaggaactgttttaaaatggattcgtcattatttaggaaacgataaagtggttaaatcccctagtttcctcggaacttttaaaaatgcttttaagagaaagaagaaaaaataa

SEQ ID NO: 735 - DNA, 570 bp, Lactococcus lactis
atgactaagaatcaaaaagtcaaaacattaacgtattcagcctttatgactgcatttattattattctaggatttttaccaggaataccaattggttttattcctgtcccaattatcttgcaaaatatgggaataatgatggctgggggacttcttggccccaaatatggtacaatttcggtaggagcatttcttaccttagctttaattggcttacctgttttaacgggtggaaatggcggagcagcgagctttttagggccttcgggaggctaccgaatggcttggctttttacaccatttttaataggttttttccttaagaaattgcaaattacagcttcaaagaattggattggagaattaatcattgttttagtgtttggagttatttttgttgatctagtcggagcaatctggctatctattcaatctaatattccattaattacttcgttgatttctaatttagtttttattcctggtgattgtatcaaagccattttgactgttcttatcgtgcgacgtcttagaaaagaaggaggctttgaaatgtattttagaaagtga

SEQ ID NO: 736 - DNA, 363 bp, Lactococcus lactis
atggtatcaaaaatgattttaatcgctcaaaaaagtcttccaagacattttaaattagagggccaaaaaaattttctctccttacttccacaattgtggcaagaattagaaggaattccctacagtcttaaaaatggagaaaattggttactatccgaagaaattattcgatatccatcttctaattattcatttgataaactgaaactttatttactaagtgaacacatcactcgtcattcaaaaaaatatataatcaatctaagtcttgaaataactagcaatacaaagttattggcacaaattaacctaagtctattatctgaggattcctggaatgaaattatacaaaaaaatcaataa

SEQ ID NO: 737 - DNA, 846 bp, Lactococcus lactis
atgacttggtatcacgaattaggaataaaatatcctctttttcaaggtggaatggcttgggcttctaatgctgaattagtagctgctgtttcaaacaatggagctttgggaattattggtagcggcggacggacagcaaatgaactgagaagaatgataagaaaaacaaaaactctcacttcacagccttttggcgttaatttaatgttactcgataaaaatatcaagcaacttttagaagtgatttgtgaagaaaaaatatcagtagtgacaactggtgcaggaagtcctaaagaaattattgatactataattgctaataatatcaaacttttccctgtggttcccaataaagaaattgctctaaaaatgttaaatcttcctatctccggaatcattgtagaaggaaatgaagcaggaggtcacgtggggagccaaaacttggcctcacttctcaaagaaattgctccaatctgtcccttaccgctcatcgctgctggtggaatttatgatcaccatactgcttctttggctaatattttaggtgcaaatggagtacaagttggcaccgcctttttattggcaaaagaatgtcaaatttcaccaatttaccaagaattaatctgcaaaggtgaagaaaatggaacaagtttaatctcagataagaatggccatctgaccagactattaaatatctcatcagaatatcctttaaataaatcattgaaagccgcagtagaaaaaggtgatttaatcaatggtgcatttatggctggtagctcttctgcttatcttgaaaaaattgagcctgttgaaaatattattcaacgaattatgaaaaaataa

SEQ ID NO: 738 - DNA, 675 bp, Lactococcus lactis
atgttctatgaccgtctaaaaactttagttattgattctcagaaatctttcaaccaggtcgaaatagagttgagatatcccagaaacgcccttgctaattatcgcttgggaaaagaaccttctgccaaaagattgacagaaattgctgattattttaatgtcacaactgaatcccttcttggtaaagatgacaagtacagttataacaaggcaaagcttttgtttgaatatcttacattagataataaacaaaacttgttaaattatattcaaaatcgaattgatgagcttgaacttcttgaaagagagcccatttctttgagtactgaacaatttgtattttgtggtgataatacttgggcgctacaagaaagccgcaaaacaatcaaactgctcacaaagcaacttcctgatgattacgatgcagtttttgaactcgttgggggtcctttagatgcggaagctcctggtaatggagatttactttttgtaaaatttactgacgcaaattttgcagagctgatccataatttcttgttgcaacatgaccattttgccaagctttcagtaaaagatgaaaagcttacttgtctaagccgtgatgctggaagccttgccgaagtccctgaactttttggcaaaattgctaaaatttatcgtttcagaactatttaa

SEQ ID NO: 739 - DNA, 1740 bp, Lactococcus lactis
atgattaaaaatcttcatgagcggcttgctttgcgcttatcttataattttcagactaattgctacttttcgataactttctgctactgtataaaatattattctgtttctaaatattttactgacaactttgttagtaaaattgagctattattcaagactttaaaaataaaattgactgattataagtcaattaatgtaaaaggaaagattatgtcacaaaacacaaaaggtaaactctcactcgtaggactctcgttgatgatatttacgacagtctttggttttgggaatatccctgtcgctttctaccaaatgggttacggcgccattccttggtatattattggagccctgctctttttcctcccttttgcctttatggtaacggaaatgggttcagcatttaaagatgaaaaaggaggaatttattcatggatgagtgaggcagttaaccctaccttcgccttcgttggaacattcatgtggtatgcttcttatgttatctggatggtaagtgttgccaataaaattttgattccaatggtcaatttgatttttggtaactcaacacacaccccttcattactttggatttcaattgcagctgtagtttggatggcattgattacctttatggtctcaaaaggtgtggaaaccattaaaaaattcacctctattgcgggggttgccgttctttcactcaatgttatattaattcttggtgctgttcttgtacttgttgttaatggtcatccagcaacaccaattaaccttgctgcttttacttcatctcctaatccaacttttgatggtagtattgttgcctttattgcctttcttgtttttgccatttttgcttatggtggggttgaatcaattgctggtttagttgaccaaactcatgagcctgagaaaaacttcccacgaggaatcatcacgtcagcacttattattgctgttggttatgctgttgccattcttagtgttggtttctttgttgattattcacaatggattccagccattaaagatggatcaatgaaccttgggactgttccttacatgcttttgcaaaaccttggtgaagcggttggtcatgcacttggactttctacttccggagcagatatgcttggtggtattttcgcccgctatattggtctttctatgcttcttgcttacatgggtgccttctttaccttgacttatagtccaatcaaacagttgattactggtacaccagaaaaactttggcctggtaaattaggaaaacttgatgaagaaggaatgccaaaatttgcaatgtggattcaatttgcaattgttaccttaattatttttttgaatttcttgacttcacaaggtggagcaagtcaattcttcctcattttgacttatatggctaatgtttctatgactttgccttatctcttcatcgttattgctttctggtacttcaagaagaataaaaatattgttaaaccaattgaattctttaaatcaaattttgttgtgaacttcttgacaattttagtcttggttgttgttggtggggctaacttcttcacaattattcaaccaattgtgaattatgttcaattaccagctgttgaccaaactggtaaagcattatctgaaatgttgacatcatttatttcaatgattggtgggccacttatctttggtgtaattgcctacttcatgatgcgcaactatagaaagaaaaataacttgtaa

SEQ ID NO: 740 - DNA, 549 bp, Lactococcus lactis
atgactccactagatttaactcatcttactgaagatatcaaaaaaacaaaaaactggtcaattcatcggaaaagaatgtatgccatgggtttaatgcatgagctttatattactgatggttcaaataacgaaaatgaacattcaattattcctgcaagtgaccgtttgttaactgcccaattagtcagtgaagttcttgaccagctgattgaatatgatgaaatttcgatttttgaggaaatggtcgaaaatcataaaacaacttgtccctctactcaattttcacatattctatcttttgatgacgaagcaggcatccaatatattttaaattctaatagttggctaaaggttttacgtggttcaaatgacatagctcttgttattactggtaatcttgttggtgattttacattttaccttgaaagttataacgaaacttttgaagaaaaaaagattacttttaacaaaaatggaatttatcggttgtctaacaagcctattgacagactttatttagctgctgactctttaaaactagtccaataa

SEQ ID NO: 741 - DNA, 1329 bp, Lactococcus lactis
atgaaaaataaaaaaacatttggtcttatcctttttattattttgttttcctatttccttattttaatggataactcaataatatttacaagtagcttaaaaatttctcaagatttaaaaatgaatgaatcaactttatcttgggtttctaatgcttatacgattacgtttggtggttttcttttattagcaggacgcctgggtgatttattagggcgaaaaataattttccttcttggacttttcatttttggattttctagtttagttgtcggtttgtcaacttcttcagaaatgatgattattgccagagcagttcaaggaattggttcggctattcttgctccaacaagtttagctttattaatggatacatataaaggggatttaagagttagagctatctcatattatggatcaactgcgggaattggttcaagttttggacttattctaggtggctggctcacttcggctctttcatggcgtgttggctttttattaaatgttccttttagtttattattgattattttaactcttgttaatgttcatcaaagcgatatcaaagctagcaaaattgactttttgggaagttttctgtcagtccttatctcagtcctatttgttttcggaattacggtaagtaatttgttcatcattatcctctcattcattttaattatcttatttatactttgggaaaaaaagttaacttacgcattaattcctttagaattatttaaaaataaagtacggacgggttcgtatgttgcacgctttgcctttatgatggcaatgttgacttactggtttattctgccgcagattatgcaaaaaatgtatcatttttcaccattgcaatccggacttgcttttcttcctttaacaatcgtaaattttatcgcggctctttttcttcctagattaactagagcattaggaaatagtaaagtaatgatcttaggacaagtgattttactgactggaatgattttgtcattagtttcgcaaccagaatggggatatttctatgcgatggtttttcaaatgatgattattggattagggcaaggttggcttcttgctccgctgacggcagcgggagtagaagaggtcagcccagaattatcaggagctgcatcaggtttgacaaatatgatgcatcaacttggaggacctgttggtttatctattgttgtgttatttagctcaaatattgttgacttaagtgcttattatcatttggtcatgggattcatcaccgcttttctatcagtaggccttcttgtcttaatttttactagaacagacaataataaaaaataa

SEQ ID NO: 742 - DNA, 594 bp, Lactococcus lactis
atgggagaaatcaaggataaaaggttagaactcttaattgaggaagttaatatttttttgaataatgaccaattgtttgagcactgtttagcagtggcaaagacggctgaggcactgacagaagaattaactgattctaatgaaagacgttcgcaagcttttatagcaggaattttacatgatattggtggaatttatccaaatgatcaaagagtagaaaaagcagaaatttttaatatcgaattgctgacagaagagcgtgaatttccattaattattcatcagaaactttctaagtatttggcgagtcaacattttaaaattactgacgaacaagttctgtcagcaattgaatgtcatactaccctaagaaaaaattttacagaattggacttgattgtttttcttgctgacaaaattagctgggatggtggagataatgcgccatttaggcagggattactgacagctctgtcagtaaatttgcaaagtgcggcactttattatattaatttcattattgctgatggattgaaagttgcccacccatggcttttagaagcaaagaaagatttagaaaatcagctttcctag

SEQ ID NO: 743 - DNA, 609 bp, Lactococcus lactis
atgtcattcattaaatcattagaaaaccgtcgcacaatctacgctcttggaagaaacgttcaagatgaagaaaaagtgattgaaacaattaaagaagctgtacgtttttcaccaacagctttcaattcacaaactggacgtcttttgattctcacaggtgatgcccaagataaactttgggatgaaattgttgccccagaacttaaagcagccatggaagcacaaggtgttcctgaatcagcttgggataacacacgtgcaaaacttgatggatttaaagctgcttttggtacaattcttttctttgaagaccaagcagttgttaaaaatcttcaagaacaatttgctctttatgcagataacttcccagtttggtcagaacaaggttcaggaattatttctgtaaatgtatggactgctcttgctgaacttggtttaggcgctaacttgcaacactacaatccattgattgacgaagctgttgctaaagaatggaatcttccagaaagctggaaacttcgtggacaacttgtatttggttcaatcgaagcacctgctggcgaaaaaactttcatggatgatgcagaccgtttcatcgttgctaaataa

SEQ ID NO: 744 - DNA, 324 bp, Lactococcus lactis
atggttttagataaaattagtgaccttcttgctgaaaaaaaagactggcaagaaatgcaaaatcgagctaaaaaattacctaaagatttttatcaggcttatcgttcaattcaaaaatatatgttcaaaatgggggcaacagattggcatatttttaatgatattattgaattatttgaactggcagtagttgatgggcgaagcccagcagaggttctgggcgatgatgttgcaacttttgctgataaattattaagtgataataaagaggattggcgaaataaatatcgtcaagctttgaatgattattttgctcaaaagtaa

SEQ ID NO: 745 - DNA, 168 bp, Lactococcus lactis
atgtccacggttaaatacatttgttttacaaaaacggctcctaataaaatgagtgatgataatatgcacgcacctattaatgatatgcaaattgctgaggatattcatcttactttcaatcacatgatgatgtcaatttttcatagaatagttgtgaacaaaaaatga

SEQ ID NO: 746 - DNA, 456 bp, Lactococcus lactis
atgaagaaatggtttatttttgatgacatggaaaagataaaaaaattgattgtcagtaaatcatggtgggatacggttgatgctttagatgaattagttggtcatcttttactgacaggtcgtaaacaagcgaccgaaaatgactcaactgcttatgaacaggtcaagactctcgtaaaagaatgggctcaagccgaaaatttttggattcgacgaattgcaattgactgtcaattaagctttaaaaaccaaacagatttagaattactttcatatactattgaaaaaaatcttttaggaagttcttttgctgatgaattttttattacgaaagcaataggttgggctttgcgagatttggcaaaaacaaattctgcttgggtcataaaatttattgaagaacatgaaaataaaatggcgaaactttcaattcgagaagcaagtaaacatctctaa

SEQ ID NO: 747 - DNA, 249 bp, Lactococcus lactis
atgacttacgaacaaaattttttaaaagattttcaagaatgggtggaccaacaagttcaaatttctgaacttgccatgaaagcagctgaaaaaattgccacagaagacggtaaaaaagaagcgaaagaagctgctattcgctatgaaagtcgtttagacgcttaccaatttttgcaaggaaaatttgaaaactacaaaaatggtaaagatttccatgacgttccagattttggaacaaaaacattttaa

SEQ ID NO: 748 - DNA, 273 bp, Lactococcus lactis
atgaataaactagaagaacttcggaacaacattgaccaagtggaccaagaaatcgttcagcttcttgagaaacgtatgacaattgttcaagaaattagccaagaaaaacaagcacaaaaaattactattttagataactctcgcgaacaagccgtattagatttggctcgccaaaatattaaaaattctgcttatcaagaaacaatcattaatacttttaaagatattatgaaaaattctcgcctttatcaaagagaaaaccgtgaaaaataa

SEQ ID NO: 749 - DNA, 204 bp, Lactococcus lactis
atgaaatttgaatttaaaggactttcttcatatgaagaaaattcaacaccaaactatgtaggcgatactaaagtacgtagtgtcattcaagacttcgttaacatggatgaagcaattgaatttgtttcaaatcaccacggttttataaaaactgaagatggaaaatttgcttttgaagtaagaaatatctcagctatcggttaa

SEQ ID NO: 750 - DNA, 1020 bp, Lactococcus lactis
atgtcaaatcaagaaccaatagcaaactacaaatttaattataaaacaacagcaaataaagttatgaaaaatattaatctttcaggaaaaacaatcatcatcactggtgggtattctggtattggtttagagatgaccaaacaactttcacgtgctggagcaaaaattattatccccgcccgaagaatggaggtagccaagaaaaatttatctaaaataaaaaatattgacattcttccccttgacctcaccaatccagaaagcattcatcaatttgccgaaagttttttgcaaaataattcaaaactagatattcttattaattccgctggattaatgtaccttcctttaaaaagagattcccgaggaatagaatatcactttgccacaaaccatctaggccactatcaattaacactggaacttttacccgctttaaaaaatgcaaaaatctcaagagttataaatttatccagtcgtgctcaacaaatgacaccattactagaagattggaattttgaaaaaatagaaaactataatccccaaataggctaccaacaatctaaaactgccaacgttttattttcaataaaactagatgaactaggaaaaaaatatggaattagaagttttgccgtccaccctggtatgattccaatgacaaatattggtcgtcaaaattcaccaattaccccttggctccgctacctagccgactattttaaattaattcatatccccgtattttttaatgcacttaaatccggctttgaccgaagtaaatatcgctatttaaaaacaatcgctcaaggtgccgcaacacctctttgggcctcaacaagccctgatttagaaggtaagggtggtctttattgtgaagaccttaatattgccagacttatgacatcagaagaagctaataatttttctggaggcttacgtccgcatgcaatagaccacaatgacgcagatagactttggcagatttcaaaaaatataacaggtctggattttgaataa

SEQ ID NO: 751 - DNA, 843 bp, Lactococcus lactis
atgaaaaagatattgatgttacttgctattccagcagttttactcttggcaggttgtcaaaaatcagccagtaagccagaagttgtcacgacttttgagccaatgtatgagtttacgaaggcaattgttggtgacaaagtcgatgtcgaaaatattgtccctgctaatcaggaagttcatgaatttgaaccaagtgcaaagcaagttgcgacaatgacaaatgctgaagctattgtttacaattctaatgaccttgaaaaatgggccaaaaaagtaaataataaagggattaaaatcgaagccagcaaggatgttgataagatatctggtgaccctcatacttggattagtccaaagcaagcaattattgaagttaataccattgcctctgagcttgggaaaaaattcccagatgataaagcaacttttgaaaaaaatgcagcgagttatgtcgctaaattgaaaaagctagacagtgaatttgatactttgaaagatgctaaacaaaaaacatttattacacaacatgaagcttttgcttatctaagtcgtgattatggtttgaaagaaattgcgattgctggattggatccagaagtagaaccttcagcatcaacgctagctaatttaaaagttgaaatgaaaaaagcaggactaaaaaatgtttattttgaaggaaatgctaacagtaaaattgctgagactttagcaaaatcagtaggggcgaaccttattggtatcaatactgttgaaggattatctgatgagcagaaaaaaaatggtgacaattatctcacactgatgcaagataatttgactgctttaaagaaaactatcaagtga

SEQ ID NO: 752 - DNA, 402 bp, Pichia pastoris
atgtccgccccaaccgttgaagttgaagaattgaactggagactcgtggaagtcggtagagttgttttgatcaacaacaagcttgctgctattgtcgacatcatcgaccagaagagagttctcgttgatggaccatctactgatgttgaaagacaagttgctcgtcttcaagacatagaactaaccttcttagtgttggattccgtttccaggggagacaactccgatgctgtcaaggaggcatgggatgcttctgatatctcttctcaatgggcctcttctgactgggctaaggatattgctcaaaagcagagaagaagtgagctgaacgactttgagagatttcaagtgcagcttttgcaaaaacaaagaagccttgctatcggtagtgctgctaaatag

SEQ ID NO: 753 - DNA, 1422 bp, Pichia pastoris
atggtggaaggaaatgttctagtcatctctaatagagttccagttacaatcaaaaaaggttctgacggcaactatcaatacaacatgtcaagtggtggattggttactgcgcttcaagggctaaagcaaaaatttcaatggtttggctggcctggtttggaagttccagctattgaccaggaaaaggtgaacagtgaccttaaagagaagttcaattgctttcctatctatctgagtgatgaaattgcagaattacactacaatggatttagcaactctattttgtggcccttgtttcattatcatccaggagaaatgaattttgatgaggctgcatgggcagcttacattgaggccaacagacagttctgcaaagttatagttggtaagatcgctgataacgatcttgtttggattcatgactaccatttaatgttactcccacaaatgcttcgacgtcaaattgatgaacaaggactcaagaatgtacgtttaggttttttcttgcacacgccattcccttcatcagagatttatcgtattcttcctgtacgtaaggagattctggaaggggtgttgagctgtgatttgattggattccacacctatgattacgctcgtcattttacgtcgtctgtggaacgaattctgggctgcagaacaactccaacaggtcttacgtatggttcccacaatgtgtccgttggagcgtatcctatcggaatagatgtggacaagttcactacagggatcaagcagcacttggtgcaggaacgaattcactcattacaaaaacgttttggtcaaggagtgaagttaatcgtcggggtggacaggcttgattatatcaagggagttccacaaaagctacatgcttttgaaatattcttgcaggagcatccagaatggattggcaaagttgtcttagttcaagttgctgtaccctcaagaggcgatgtagaggagtatcaaacacttcgtgccactgttaatgaacttgtgggacgtatcaatggccaatttggcaccatagaatttgttcctattcactttatgcacaagtctgttcccttcgaggagctgatctctttatacgctgtctcggatatctgtctcgtttcaagtacacgggatggaatgaatcttgtatcctacgagtatattgcatgccagcagcaaaagaagggatctctgatattgagtgagttcgctggagctgcccagtcattgaatggtgcaatcgtggttaatccgtggaatacagaagagttaagtgaagcaatttatgaagctctatccctacccgaagaaaagagagaatctagttttgagtctatgttcaagtatatcagcaaatacacagctgcatattggggagaaaacttcgtcaaggaactcacaagggtaggtaacaacatgtaa

SEQ ID NO: 754 - DNA, 2691 bp, Pichia pastoris
atgtccgctgaagagccaactaaggagaagattcctatcaaccattctgacgatgaagatgaggacatcgatcagttaatcgaggacctgcagtcggtccacggtttcgacgatgaagaggaggaagagcaccatgagggtgcaaccgccaagcccgttccagaagaactcttgcaaacggacccagcttacggtttaaccactgatgaggtccacaagagaagaaagagatttggtgaaaacaagatggctgaggagaaagagaaccttcttgtcaagttctgtatgttcttcgtcggcccaattcagttcgtcatggaggctgctgccattctggccgctggtctggaggactgggtcgatttcggtgtgattttggctttgctgttcctgaatgcttcagttggtttcatccaagaataccaagctggttctattgtcgacgaattgaaaaagactttggctaactctgctactgttattagagacggtcaagttgtcgatattttggctgacgaagttgttccaggtgatatcctaaagttggaagacggtgttgtcattccagccgatggtcgtctggtttctgaggaatgtttcttgcaagtcgaccaatctgctattactggtgagtctttagccgtcgacaagaagactggtgactctacctactcttcttccactgttaagagaggtgaagcttacatggttgtcaccgcaactggtgactctacctttgttggtagagctgctgctttggtcaacaaggcttccgctggtcaaggtcacttcactgaagtcttgaatggtatcggaaccattttgttggttttggttatcgctactttgctggtggtttgggttgcttgtttctacagaacctctcctattgttagaattctgcgtttcactttggctattaccattgttggtgtcccagtcggtcttccagctgtcgttaccaccaccatggctgtcggtgcttcttacttagccaagaagcaagccatcgttcaaaaattgtctgccattgagtccttagctggtgtcgagatcttgtgttccgacaagaccggtactttgactaaaaacaaattgtccttgcatgaaccatacaccgttgagggtgttgaggctgatgatctgatgttgactgcttgtttggctgcttctagaaagaagaagggtttggatgctattgacaaggcctttttgaagtctttgatcagttacccaagagccaaggctgctctgaccaaatacaaggttattgaattccagccttttgacccagtttctaagaaggttactgcttatgttgaatccccagaaggtgaaagaattatctgtgttaagggtgctcctctattcgtcctgaagactgtcgaggaagaccacccaatccctgaagatgtccatgacaactatgagaacaaagtcgctgaatttgcttccagaggtttcagatctcttggtgttgctagaaagagaggtcaaggtcactgggaaattttgggtattatgccatgtatggacccacctcgtgatgacaccgctcaaaccgttaacgaagctactcacttgggtcttagagtcaagatgttgactggtgatgccgttggtattgctaaggaaacttgtcgtcaattaggacttggtaccaacatttacaacgctgagagacttggtttgggtggagctggtgacatgccaggttccgaaattgctgacttcgttgaaaatgctgacggttttgccgaagttttccctcaacacaagtacaatgtcgtcgagattttgcaacaacgtggttacctggttgccatgactggtgacggtgttaacgatgctccttctttgaagaaagctgacactggtattgccgtcgaaggtgcttccgatgccgctcgttctgccgctgatattgttttccttgctcctggtttgtctgctatcattgatgctttgaagacttctagacaaattttccacagaatgtactcgtacgttgtttaccgtattgctttgtctttgcatttggagctgttcttgggtctgtggattgctattatgaacagatctttgaacattgacttggttgttttcattgctatttttgccgatgtcgctaccctggccattgcttacgataatgctccatactctccaaagccaactaagtggaaccttccaagactttggggaatgtccatcattttgggtatcatattggctatcggtacctggattaccttgactacaatgttgttgccaaggggtggtatcatccagaacttcggttccgttgatggtgttttattcttggagatttccttaactgagaactggttgatttttattactcgtgccgctggtccattctggtcttcttgcccatcttgggagttggccggtgccgtcattattgtcgacattatcgccactatgttcaccttgttcggatggtggtctcaaaactggaccgacatcgttactgttgtcagagtctggattttctctttcggtgttttctgtgtcatgggtggtgcttactacttgatgtccgagtctgaaggattcgatagattgatgaacggtaagccaagaaaggaaccaccacctcaaagatccatggaggacttcattgttgctatgcaaagagtctccactcagcacgagaagtctggttaa

SEQ ID NO: 755 - DNA, 6210 bp, Pichia pastoris
atgagtgctacatccggagttgtcaacaggccattggtgttaaaccatggctcaatcgagtcaaccatcttaatcccaaccacagaatatcatttctaccaaacgttactggaagggttcaggaagtcattgccacaagttaccgagggatttgctgacgacgacgagccgagctccaaggcagaacttctgatgaagtttttgggttacattgtccaatctggagtctccaatcagcaagagcaattagctgctgcaaagttggttttgaatgagttcgagtcccgtttccttcaaggattgaacttgcactcttatgctgccattttgcttaagagcgagacctttcccacaacattattgaaaatcaaagaaaacttaatcaagaactactacctgggaagagcccttgtctacctgccaggtcagcgtggccttgtataccctccctcggcattacttaatgctggaaagtccggctccgctcagatctacgccatatttggaggtcaaggtaacaccgatgactatttcgaagaacttagagatatttaccacatctaccaaggtctcgtgtcagacttcgttaccaaggcccagttgaagttacaagagctcatcagaaccacccctgaaactgacagaatatatacacagggtctagacctgatcaattggctggaaaacaaggacaagactcctgaccaacaacaattgctatccattccaatgtcatgtcctctaatttgtgttatccaactgtgtcattacattgtcacttgccgcatcttaggtattacacctggtcaactcagagattccttgaaaggtactacaggtcactcccaaggtctggtcaccgctgtggtcgtttcttctgctgattcctgggaatcctttgagaaattggcgcttcaggcagttgaattcatgttctacattggtgttagaggactacaaacctatccaaacacctctttacctccatccatcgtccaagattccgaagaaaatgccgagggaactccttctcccatgctttcagttagagacctttcctatgaccaattggtcaagtttgtcaacgaaacgaaccagcacttgcctgaggccaaacatatcgacatctctttaataaatgggcccagaaatgtcgtcttgacaggccctcctcaatcactttacggtttgaatctgaacttgagaaaagctaaagcaccttcaggcttagaccaagccagaattccattcagtgaaaggaagttgcgtttctctaacagattccttccgatcatgtctcctttccattctcatttgctttccccatctactgagaagattgtagctgacttgaagaaggctggtgttgagttttctcaatccagcatgaagcttccagtttttgatacctatgatggtaaggatctaagatcatattcaggatccattgccgctagattggtggaatgtatcaccaaattacgcgtcaactgggaactgtctacggagtttaattcaacacatgttctggactttggtcctggtggagcttccgggttgggtgttttgacccacagaaacaaggaggggacgggctctagggttatcgttgccggtgtcttagatgctgagtccgaggactctgagtttggctataaacaggaaatttttgagtctaatgaaaaggcaatcaagtacgctccaaactggttgaaagaatataaaccaaagttggtgaaaacttccgctggcaaaatattcgttgacactaagttttctagacttcttggaagagctccgttaatggttccaggtatgactcctactactgtgtctcctgactttgttgctgctactttgaatgctggttttcatactgagattgcaggtggtgggtactttgctccttctattatgaaagctgcattgcaacgggttattgaccaggtcactcccggtaccggtgttggtatcaacctgatttacgttaatccaagaatgttgcaatggggtatccccatgatcaaggagctaagagagcaagggttcccaatccaatctttgtccattggtgctggtgttccctcccttgaggttgcaactgagtacattgagacactagggttggctcatctcggtcttaagccaggttctatcgatgccgtcaatcaagtaatcactatcgctaaagctcatcctaacttcccaattgttcttcagtggactggtggtagaggtggaggtcaccattcttttgaagattttcaccaacctattcttcaaatgtactccaagatcagaaagtgcaaaaacattattcttattgccggatctggttttggttctgcggaggatacttacccttacttgactgggtcttggtcccatcagttcagttatccatcgatgccattcgatggtgtcttatttggttccagggtcatgaccgccaaggaagctaagacatcaccagccgcaaaacaggccattgccgattgtactggtgttgacaattctcaatgggagaacacttacaagaagcctacaggaggtatcatcactgttagatccgaaatgggtgagccaatccacaagattgctactcgtggtgttatgttgtggaaggagcttgatgatacaatctttaccttgccaaagaacaaaatgctagaggctattgctaaaaagaaggattacatcatcaagaagctaaatgccgactatcagaagccttggtttgctaagaatgagaagggtacttgtgacctcgaggatatgacttacaagcaaatcgcagaaagattggttgagctaatgtatgttagaaaatctcaaagatggattgatgttactcttagaaatttcactggtaaattcctcagacgaattgaagagagatttgccactaaagttggaaccatctccttaattcagaacttttctcaactagaagaacctgagaaagccattgactctgttttcaaggcttaccctgaagctgctagccaactgatcaatgaggaggattgtgactggtttttattggaagctcaatctcctacgcagaagcctgtcccatttattccagtgcttgatgagaggttcgagttcttcttcaagaaggactctctatggcaatccgaagatttggaagctgtcgttggcgaggatgtccaaagaacttgtatcttacatggtccagtcgctgctcaattctctaataaagttgatgagccaatcaaggacattttggagaacattcataagggtcacatcaagtctttggtcaaagaagtttacaacggtgatgaaagcaagattcctgttgttgaatatttctcctctgtggactcattttccgataccgctattgagggtgtgaaaattgaacgttcccgcaatacagagacatttactgtgacttctggcaatgtcgataaccagcaatggtttgatttgttagctggcaaagagttatcctggagacgtgctttcatcaccgctgctaggttggtccaaggtaccaactttgtttccaatcctgcccatagcgttcttgccccaagcaaagacttggtggttaagattgagaatggctctgatgccaaaaagactgtcttgaccgccttccagcgtgtgcgcggtaaatacgtccctgctgtgtctctgaaaagtattggtgacttgaaaatcaaattagagcttatcgagactagaactgccgacaagtctgctgttgccttggagctgttctacaattacaaacctactgatggttttgctccaatcttagaggttatggagggtcgtaacacttctatcaagaacttctattggaagctatggtttggttcttccgttccagttgatttggacttcgatgctaataaaccaattagtggtggcgaggcttctgtctcttctcaagctattgctgagtttacacacgctgttggaaactcatgcgaggactttgtgcccagagctggtagacctcaacttgctccaatggactttgctatagttttaggctggaaggccatcatgaaggccatcttccctaagactgttgatggcgatatcttgaagttggttcacctgtccaacggttataaaatgttcccaggagctgatcctttgaagaaaggggatgtcgtttccactgttgctcacatcaggagtgttgttaatggtgaaactggaaagactgttgaagttgttggtgtcatctcaagagatggaaagcctgttttggaagttaactcccagtttttctacagaggaaagtatcaagattttggaaactctttcaagaagaccactgaaactcctgttcaagtagctttcaaatctgccaaagatattgctgttttgaaatctaaggaatggttccatctggagaaggacattgacctgctgaaccaaacattgactttccgttgtgagtcatatgtgaagttcaagtctagtactgtgtttgcctctgtgaagactaccggtcaagctttattggaacttcctagtaaggagatcattcaggtagctgaaattaattatgagtctggctcctcttacggaaacccagttcttgattacttaactcgtcatggctcaactattgaacagccaattatgtttgagaatgctattccattagcacagggaacagaactaacttcaaaagctcctggtacaaatgagacatatgcagcagtttctggtgattacaaccctattcatgtcaacaaagtttttgcttcctatgctaacctaccaggtaccataactcatggaatgtactcttctgctgctgtgagggcactcgttgaacaatgggcagctcaaaatgttgccactagagttagagcgttcaaggctgattttgtgggaatggtgctgccaaatgacgagttagttactcacttagagcacgtcggtatgatcaacggtcgtaagattatcaaggtggaaactaagaaggtcgagaccgaagaggttgttctgattggtgaagctgagattgaacaaccagtctccacttttgtattcactggacaaggctctcaagagcaaggcatgggtatggacctttacaactcgtccgaggttgctaagtctgtatgggatagagctgacgtacatttcattaacaactatggattttcaattttggacattgttaaaaacaaccccaccgagcttactgtccactttggtggagccaagggtagaagtattagaaacaactatatcagtatgatgtttgagactgttgccgctgatggtcaactaaagtcagagaaaatcttcaaagaaatcaatgaagatactatttccttcactttcaaatctcctaccgggcttttgtctgctactcaatttacccaaccggctttgacattgatggaaaaggcctctttcgaggacatgaaatctaagggattggttccatctgaatcaatgtttgctggtcactcattgggtgagtattctgctctgacctctctgggtgatgttatgccaattgagtcattggtggatgtggtgttctatagaggtatgaccatgcaagttgctgtccctagagacgagcaaggtagatcaaattacggtatgattgctgtcaacccatctagagtctcatctacattcaacgattctgctttgagatttgttgtcgaacacatcgctcaacaaactggatggttgttggagattgttaactacaatgttgagaatactcagtacgttgctgccggtgacttgagaggacttgacacattgtcgaacgtcttgaatgtattcaagatccagaaaattgacattgtcaaactacaagaaactatttctctggatgaagttaaggtccatctttctgagattgtggatgaagtttccaagaaatcgtcttccaaaccacagccaattgacttggaaaggggctttgcttgcattccgttgaagggtatttctgtgcccttccactcctcatacttacgttctggtgtcaaaccattccaaaccttcttgtgtaagaagatcccaaagtctgctgttaaaccagccaacttgattggcaagtatattccaaacttgaccgccaagcctttccaattgaccaaggagtacttcgaggatgtgtatgagctcacaaagtctgaaaagatcaaacacattcttgaccattgggaagagtatgagtcttcctga

SEQ ID NO: 756 - DNA, 1755 bp, Pichia pastoris
atgagtgacaagaaaacatccgtagaggcagtgattactgaggttgatagcagtccagcctatgaggcaggcagcatcaaatctgagaacaaaagaaacttcgttcagaattggtttgatggtttcaagccatatgaaatggaggaactggatccaaatctttcggaggtggagaaggctgccattgctactgctaacgcgccattgcaaagaaaacttaagaaccgtcatttgcagatgattgccattggtggatctattggtactggtttatttgtgggttccggtaaagctcttgcagcagctggacctgctgccctactgattgcttggggtttgactggtatcatgatttactttaccgttcaagctttgggagaattatctgttaccatgcctgtttctggatcctttgccgtctattctacccgtttcattgacccttcatggggttgtgccatgggtttcaactacgctatgcagtggctgatcgttttacccttagaattagttgccgcttctattacattgagttattgggaaggttctaaaagtgttaacgctgatgtttgggttcttatattttatctgctgatcgtcgttatcaacctgtttggtgtgaaaggttatggtgaagctgaattcgtcttctccttgatcaaagtcatcacagtcattgcatttatcttcatgggtatcattctgaactgtggtggaggtccaaaaggtgaatacatcggaggacgatactggaaaaacccaggagctttcaataccgagtataatccatttaaagccgtttgttccgtctttgtcacatctgctttctcgtttgcaggtactgaattggtcggtcttgcagccgctgaagctaccaacccaaggaagtcccttccaactgccatcaagcaagtgttctggagaattatgttgttttacatcatttctttaactctgattggtttattagttcctttcaacgatccaagattgatcggttcaagttcagtagatgcatctgcatccccattcgtcattgccattgtcagtaacggtatccatggtttggactctgttatgaacgttgttatcatgatcgcagttctgtccgttggtaattctgcagtctacggttcatcccgtatcttgcaatctcttgctgcacaaggccaggctccaaagattcttggctacatcgacagagagggaagaccacttgccgctattggccttactttgttatttggatgtttggcatttgttgctgcttctcccaagcaaggtgagatgttcgactggctgttagctctctccggtttatcttctattttcacatggggatctatctgtcttagtcacatcagattccgtgcctgtttaaagtcccttgggcgtggtaccaacgagttggttttcacagctcaaggtggtatcatcggttcatggattggtttaattatcaactgtctggttctgattgtttccttttgggttgctgccttccctctaggtgataagtcctctgccgaaggattcttcaaagcttatttgactgtccctgttgttattatcgtatacgtgatccataagatcgtgaagaagaactggtgcttatacgtcaagctcaatgaaatggacgtcgacagtggacgaagagacttcgacttggagttattaaagcaggaaattgtcgaagagaaggagactctggcccgaaagccattctggtaccgaacctacaaattctggtgttga

SEQ ID NO: 757 - DNA, 1362 bp, Pichia pastoris
atgtcgtttgggaaccactattacttccccgtttcaactacatcgtttccaaagtggatagaccgtataatgacatcaaatataaatggttctctgcctcaaagcgctaatgtggtggttattggttctggatttgctggaaccgctgtttcttactatttacagaatgaaattgctggtgaccaatcgattgtgatgctagaagcaagagcagccgtctctggagccacttcccgaaattctggacttataaaacctgagtaccatagaaatcatggtgaatatgttgacaagtttgggtcgaaagttgcggggcaattggtcaattttgaggttgacaacatgaaggagctggctagaattctaactcttgattccgatcttaatgaaaaggcagacttccaagagcggatacatcttgatgcttactctaaccctcgttcgtcggagactgccatcaatgatttctatgcttttatggaaaatgaagaagtctccgtagacctgaaaagaaaagtgcaaatattatttggggatttggccaagcaactgagtaatgtgcctactaccccttttgtcattcattatcctaatggatctgttaattcgtatgatttcgtcactgctatgttaaccagagctattcaaaaaggcctagccctatataccaatactctagtggaagaagtgcagcaattggattctggtgtatggaaagtatctacttctagaggtgaattatttgcggacaaagtggtttttaccaccaacgcctacacacaaggactcctgcctgagttttcgaaatcaattatacctatacgaggcgtttcatcacaagttaacgttcgtaatacgggtaatgagcactctctgtccattggctccgacatttatgttccacaatccaagaatctgctctacagttcactgggtgagctggaaaagcagaccaatttcatggctaattacaacactgtggacgattcaactgtatcgtcccaatcgttagaatatttgcaaaaaaatttaggtaaagtgaactcacttgctactgccactgctacttcatcatcgtctggaatcatggcctacactgatgatcattttccttacgttgggcaattgagcgagctgggaaaactaaatgcatatattttggctggttgcaactgttcgggtctttccagaatgctcctttgtgctaaagaacttgccaagtccgttgcattggggtcggagttaagcgacagagtcccagctccctacaaggtaactagggaaagaatgggactcgttgacaaattgatgcaatcggtattgaatgaaagagaaattagagagactagagcaagactctag

SEQ ID NO: 758 - DNA, 1086 bp, Pichia pastoris
atgccagatcaattatcatttttaaagagaaagaccggtgtcatcgttggtgacgatgtcagaaacctgttccttcacgcacagaagaagggcttcgccattccagctatcaacgtcacctcttcctccaccgccgtggctgctttggaagctgctagggacaacaactccccaattattttgcaaacttcccaaggtggtgccgcctactttgctggtaagggtgtcaagaactctaaccaggaggcttccattggtggtgccgttgctgctgctcattacattcgttccgtagctccattgtatggaattccagttattttgcacactgaccactgtgccaagaagcttttgccttggttcgaaggtttcttagctgccgatgaggcttactacaaggagcacggtgaacctttgttctcttcccacatgttggatctgtctgaggagtctgatgacgagaacattgccacttgtgtcaagtacttcaagagaatggctaagatgaaccaatggttagagatggagattggtatcaccggtggtgaggaagatggtgtcaacaacgagaatgccgacaaggaattgctgtacaccaagccagagaccgtctttgctgttcacaaagctcttgctccaatttctccaaacttctccattgctgctgccttcggtaacgtgcacggtgtttacaagccaggtaacgtcgttcttcgtccttccttgttgggtgaccaccagaaatacgccaaggagcaattgaagtctgagagtgacaaaccattgttcttggtcttccacggtggatctggatctacccaagaagagtttgacaccggtatccgtaacggtgtcgtcaaggtcaacttggacactgactgtcagtacgcttacctcattggtatccgtgactacgtcttgaagaagaaggactacatcatgtcccaagtcggaaacccagagggtgacgacaagccaaacaagaagtacttcgacccaagagtttgggttcgtgagggtgaaaagaccatgagtgctagagtcaccgaggctttgaacattttccacactgcaaaccagttgtaa

SEQ ID NO: 759 - DNA, 1374 bp, Pichia pastoris
atggtccaaccacaagaaccagaatttgagcaagcctacaacgaacttttgtccactatccaggactcaactttgttcgagaagaagcctgagtacaagaaggttatcgacgtcgtctccattccagagagagttgtacaattccgtgtcgtttgggagaatgacaagggtgaacttgaggttaacagaggttacagagtccaattcaattccgctctgggtccatacaagggtggtctgagattccatccaaccgttaacctgtccatcctcaagttcttgggttacgagcagattttcaagaatgccttgactggtctgaacatcggtggtggtaagggtggtgccgacttcaatcctaagggaagatccgacaatgaaatccgtcgtttttgttacgctttcatgtctgagttgtccagacacattggccaattcactgatgtcccagctggagacattggtgttggtggtcgtgaagttggtttcctctttggtgcctacaagaagatcaagaactcttgggagggtgttttgactggaaaaggtttgacttggggtggttctttgatcagaccagaggccaccggttacggtctggtctactacgtcgagaagatgattgagcacgctactcaaggtaaggaatctttcaagggtaagaaggtcgccatttccggatctggtaacgttgctcaatacgctgctttgaaggttattgagttgggcggtatcgttgtatccctctccgactccaagggttctatcattgctccaaatggtattaccacccagcaaatcagtgctattgctgaggccaagcttaagttcaagtctttggaggagattaccggatcttactctgctttctccgactctccagtcaagtacatcccaggtgcccgcccatgggtccacgttggagacattgacgttgccctgccatccgctacccagaacgagatttctggtgaggaggctaaggctctggttgcagctggctgtaagtacgttgccgaaggttccaacatgggttctactttggaggctattgatgttttcgagggcgaacgtgcttcttcctccggtactgctgtctggtacgctccaggtaaggctgctaactgtggtggtgttgctgtttccggtttagagatgggtcaaaactctcaaagagtccaatggaccgaggaggaggtcgaccaaaagttgaaggacattatgatcaactgtttcgacaactgtttgaacactgccattgcctactcttctgagactaacaaagactctctaccatctttggtcaagggtgccaacattgctggtttcgtcaaggttgccgatgctatgtacgcccaaggtgatgtgttttag

SEQ ID NO: 760 - DNA, 1227 bp, Pichia pastoris
atgaccgaatctgcattcagcatctcccatttgcacgtcattactcccacttttatgcatgtgctcaagtataaatatccagagtactccacccctaagtcctcttttttgctcttttttcaatctctactatacattgaatcaatggtttctaaaacagctcaaattcttgccggtgccgccgtcgttggtactggtttaattctctaccaacagaagaagcaggaaaaacttcagacccccatctcgtctggtcggtccggaaataaccctgtaactgtgggtagtggcattgctccagcagttgacaatcacaccagatggtcgcagtctccggagtcaaagtttattagcacaaagtccttgggaggacctcctgctaagcaggacgcttacaatgatgcaagatatcagtttgagcaagctcagcagaaatttgaggacacgaaggcctcttggtggcaatggggtcagcaaaagtcggatgaagtatctcgtgagtccgagaagcaatatgaaattgctaaggccaagctggaggatgccactcaatcgttgcgtgaacaaggacaagatgccctggacacagctgattcgcaatatcagacctggaagtctcaatggcaatccaaattgaacgatgctaaagaaaagactgatgatttggtctcccaagcaaaggagcagactaagagcttttcctctgaggctcgctccaagttagacaagttcagacaggagttcaactccaagaaggaggagcttcgtaagaagtatgcccacttgtctgaggaagagctagacggaaaagcatttgaatcgctgagaggctggggtgaatcggccgaggcttttgctagagaggagtacctagaatctaagagaaatgctgctgagactagaagcaccctgcagagagggtacgatttatctcagcaaaagctgaaagaagctcaagatgagttcaaccgtactaagaaagcctggttctcatggggtaaggatcaaaacgaagaagcccacaatctggcttccagaaagttggctgaggcccagaaatcctttgatgatgcctccaaacaacttgaccagtttacaagctctgtcgccaagagcgccaaagacaacagtgatttcgtagtccagaagacaaaagagggactagatgttgctaatgacaaggctcaagatggcctttcttctgtaagcaactggattcgtaagtag

SEQ ID NO: 761 - DNA, 1131 bp, Pichia pastoris
atgtatatcccacctacaagtttcaacaggaagcagttcaagtactcgggtgacaactacaacactcccagcgagtttaaggagcaagctcgtcttgatatccaccgaaaattagcgcaagctcaaagcaacctacgacatggttcctcccccttggccaccaaatccataacagcttcgtcctcacagttcagcgggtcagacgtcgaaagtctcgctagcgtggccagtgatggctctgaaatgacgatagacgagtccaagaggaaacggaaggcttatttgggcttcttgaagaagccagaatccaaactctccagaacaaccaccaggagaagttccctgttttccaacaacctaacacagcaaccaactaatcaaacagaggccacctcattatttactaactacttttctgacaatggatttgtcactgaagttgatttgaacgaagttcttccgaaaaactttgacgacatgtacgatcccgacttaaccgtggaacggttttacaacgggcgaccagtgttcaccaaaaggaacctggtcaactgggaactgaacgatctgaggtctctgctgatagttagtgaactcaaaccagagtggggcgggtacatacctcgtataagagataatcccgacttccacatcgttctcctcccactgacgagttctgataacgaattcattgagatccttatgcgatcggacatttacaaagagtctaaattctctaaagaattcaaaatgaagacagctgcgtacatagtgcagtctgcaagatacagacacaatctagccattcaggctagatactctgacatgcccacaaaagatccaactttgcaatatttttcaaaagtggagtggagaaacataattgaaaactacttattaaacctgggggttgagacgcaatgtcgccttgatttccagcatcgatgctccatactgaaaggacacccagcacagaaaaacgatttgctatccaaagcaatcctgaacaatacacaaaaacaattcaatggaaatggcctttccaaggaggagaaggctagaatatggtcccaggctcagtctgaaatttataagcgactggggttggattggacgccagataagatataa

SEQ ID NO: 762 - DNA, 573 bp, Pichia pastoris
atgtgggtactaaactggttccaggatgtgttggcatctttagggttatggaataagcacgccaaattgctgtttctaggtttggacaatgctggtaagacaacgttgttgcacatgttgaagaacgataggttggctactttgcagcctacatggcatccaacttccgaagagctctctatcggaaacgtcagattcaccactttcgatttaggtggtcacgaacaagccagaagagtctggaaagactacttcccagaggtggacggaattgtctatcttgttgatatcgcagaccctgagagatttgaggagtccagagtcgagttggacgcgctcttgaagattgaagaactttccaaggttcctgttttggtcttgggtaacaagattgataaatctactgccgtctctgagaatgaactcagacatgcattgggtttgatgaccactactggtaaggacaaggttcaattggttgaaggtcaaagacctttggaggtatttacctgctctatctacttaagacagggttacggtgagggtatcagatggctctctcagtacatttaa

SEQ ID NO: 763 - DNA, 654 bp, Pichia pastoris
atgtccaagatttctaccacccaagtccgtgagcatgtcaaggagcttttgaccttctccaacgagaccaagaagagaaacttcttggagaccgtcgagctgcaagttggtcttaagaactacgacccacagagagacaagcgtttctctggttctttgagattgcctcaagtcccaagaccaaacatgaacctttgtattttcggtgacgcttttgacgtcgacagagccaagtctttgggaattgacgccatgtccgttgacgacttgaagaaattgaacaagaacaagaagttgatcaagaagttggctaagaagtacaactctttcattgcttctgacgtcttgatcaagcaagtcccaagacttttgggtccacaattgtcgaaggctggtaagttcccaactccagtctcccacaacgacgacttgtactctaaggtaaccgatgtcaagtccaccatcaagttccaattgaagaaggttctgtgtttggctgttgccgttggtaacgtcgagatggaggaggacgttttggtcaaccagatcatgatggccgtcaacttcttggtttctttgttgaagaagaactggcaaaacgttggatctctggtcatcaagtccagtatgggtccatcttacagattgtactag

SEQ ID NO: 764 - DNA, 1281 bp, Pichia pastoris
atgcttgcttcaggaaagagattcttctcatcatcatcactaagacaggtgtctgcttgggccaaggtcgaaaaagctcctgcagacaagatcttgggtctaactgtgctctacaaccaggacactaatccctccaagatcaacttgggtgttggagcctacagagatgagaatggtaagccatggattttaccttcggttcgtaaggctgaagaggtcttgatcaagactgaggtcaacaaggagtatgtcccaatcactggttctcccaagttcaacgagctgatcaaacagactttgtatggtaatgatccagctggtaagcaattattggaacagaacagaattgtttcttcccaatccatttcaggaactggtgccttgaaggtgttatctgagttcatcaaatatttccacgagggaccaaaggacgtcctggttccaaacccaacttgggctaaccatatcgccattttggagcgctccggactgacaacaagcaagtatagatactacgatttcaacaccaaccaattggataagaaaggtttgttggaagacttggagaatgctgctgagggacaacctgttttgttgcacgcttgttgtcacaatccaactggtgtcgacccaacgttggaggagttcgatgagatcatcgatgttttgtcacgtaagaagttgttgcctgttgtcgacatggcttaccagggattccgatctggtaacccaattgatgatctgtctttgttgttccgtttcaacaaagccgttgtcgacggtagactagacaactttgttctttctcaatctttcgctaagaacatgggtctctatggtgagcgtgttggctcactgtcattgatcaccagcgatgctgatgagtctgtgcgcgttaagtcacagctggagaaggttatccgccctatctactcatctccaccatctcacggttccaagctggttgaaattgttctctccgatgaagctatttaccagcaatggctcaaggatgtcaaggttatgagtgacagactggtttccatgagaaagttgctgtacgacactttgaaaaacaaatacaacaaccccctggactggtcccatttgttgcaacagaagggtatgttctgttacactggtctgaacccagagcaggttgccaagttgattgagcgttctgtttacttgacctctgacggacgtatctccatagctggtatctacgaacaaaacgttgactaccttgccaatgccatccacgaggttacgaccaactaa

SEQ ID NO: 765 - DNA, 732 bp, Pichia pastoris
atgtctctcccatccgctaccgctaacgctgcagttaccaaccaattgttagagcttccagacaccaacctggttgccccagctgtcactgaggtgtccgagaaggctgcccaatggccagctaacgtcagattgcaaagacaaaagaaaatcttgtaccagagacttaaggtccctccagctatcgctcaattcaccaacactttggacagaaacactgctgctcaaactttcaagttgttcaacaagtacagacctgagacttacgaacagaagcaggagagactcaccagagaggctgctgccatcgctgatggtaagaagaaggaggatgtttcttccaagccttacgttgtcaagttcggtttgaaccacgttgttgctctgattgagaacaagaagccaaagttggttttgattgctcacgatgttgatcctattgaactcgtcgttttcttgcctgctctgtgcagaaagatgggtgttccatacgctattgtgaagggtaaggccagattaggtaccttgatccacagaagcaccgctactgttgctgctctggtcgatgtcaagccagaagacgaggctgaattggcccaattggtttctgccatcaacaagaacttcaccgagaagtacgaggaatccagaaagaagtggggtggaggtatcttgagtgctgagtcccaggctaaggctgctgccaaggccaagatcttggaggagaaataa

SEQ ID NO: 766 - DNA, 1044 bp, Pichia pastoris
atgtcggaagaagaacaacaacaaacaaacgagaaggtcatcgaccttgaaaagagaatgtttgtcggaaacatcgattatgacaccaccgaagaagagctcagggagttgattacgggcttcgacatcgaaggcattgagattcccaagaggttttctaggcgagtgggaaagttgactggacgcggttttgcctttgtgacatttgcctctagcgaggaaactgcaaaggcaatcaccgagttcgaaggcaaaaatttgaaagggagagacatctactgtaaatctgccaaactcaagtcaactgaagagaagactaagaagaagaaagccaacaaaaagaagacttccgctgctaagaacaatgatggaaccaccgaaggtgttactaatactgcagtggatgggactgaggagtcccaagctgatgtcagtagcaatgccgactccgcttccgattctgttgctgattcgaaagacaaagagaacagcgctcccaatggcggcaagaagaagaagccttacagtaagaagaaacaaaatccacataaagttccccttgaacagggtacgccttcagagacttcgatcttcatccgtaatttgcaccaggaggttgtcacttccgaactgacggagttcctttctgagtatgaccctcaatgggtttcgatccccagaaggaatataccccgtcatgttgttcaaaaactgaggaaagagaacattccgatcaggtcgcgtggtatggcatttgtgagatttgccgaccacgaaacgcaacaacgcgctctcaaggaattgaacggtaaggaaattaagggcaaaccaattagcatcgatattgccattgattccttcgtgaaggaggaacctaaagaatctagcgtcaaagatggtgctgacgtttccatcgttactgatggagctcagccgcaggatgagggagaagagggcaaggtagaggaggaagtaaagtccgagccgctcaaaccattggagtcaaccaccattgctccagaagtgcaaactactacagtgtga

SEQ ID NO: 767 - DNA, 1680 bp, Pichia pastoris
atgcaattgcgtcattccgttggattggctatcttatctgccatagcagtccaaggattgctaattcctaacattgagtcattacccagccagtttggtgctaatggtgacagtgaacaaggtgtattagcccaccatggtaaacatcctaaagttgatatggctcaccatggaaagcatcctaaaatcgctaaggattccaagggacaccctaagctttgccctgaagctttgaagaagatgaaagaaggccacccttcggctccagtcattactacccattccgcttctaaaaacttaatcccttactcttatattatagtcttcaagaagggtgtcacttcagaggatatcgacttccaccgtgaccttatctccactcttcatgaagagtctgtgagcaaattaagagagtcagatccaaatcactcatttttcgtttctaatgagaatggcgaaacaggttacaccggtgacttctccgttggtgacttgctcaagggttacaccggatacttcacggatgacactttagagcttatcagtaagcatccagcagttgctttcattgaaagggattcgagagtatttgccaccgattttgaaactcaaaacggtgctccttggggtttggccagagtctctcacagaaagcctctttccctaggcagcttcaacaagtacttatatgatggagctggtggtgaaggtgttacttcctatgttatcgatacaggtatccacgtcactcacaaagaattccagggtagagcatcttggggtaagaccattccagctggagacgttgatgacgatggaaacggtcacggaactcactgtgctggtaccattgcttctgaaagctacggtgttgccaagaaggctaatgttgttgccatcaaggtcttgagatctaatggttctggttcgatgtcagatgttctgaagggtgttgagtatgccacccaatcccacttggatgctgttaaaaagggcaacaagaaatttaagggctctaccgctaacatgtcactgggtggtggtaaatctcctgctttggaccttgcagtcaatgctgctgttaagaatggtattcactttgccgttgcagcaggtaacgaaaaccaagatgcttgtaacacctcgccagcagctgctgagaatgccatcaccgtcggtgcatcaaccttatcagacgctagagcttacttttctaactacggtaaatgtgttgacattttcgctccaggtttaaacattctttctacctacactggttcggatgacgcaactgctaccttgtctggtacttcaatggcctctcctcacattgctggtctgttgacttacttcctatcattgcagcctgctgctggatctctgtactctaacggaggatctgagggtgtcacacctgctcaattgaaaaagaacctcctcaagtatgcatctgtcggagtattagaggatgttccagaagacactccaaacctcttggtttacaatggtggtggacaaaacctttcttctttctggggaaaggagacagaagacaatgttgcttcctccgacgatactggtgagtttcactcttttgtgaacaagcttgaatcagctgttgaaaacttggcccaagagtttgcacattcagtgaaggagctggcttctgaacttatttag

SEQ ID NO: 768 - DNA, 825 bp, Pichia pastoris
atgtcttcagaatctagaacctattcattcaaaatcttttcgattttgacctatgctctgtcaatttacggggaagttcgttacttcctcttcagaacccaccacagcaggtcttatttgactccgttcactggaaactccacactcgactacatctatgttattgccacacttttgcttcaattgttgttcgtcgtccagtactttagccaagatggtactgtttcagccagagaacaaaagaatgtgttggaacaggtcggataccacttctccatctacaatgttctgaactttatctgggtctatcttttcaagcacaagagatttttgtttgctgagattgttttgtttgtcaatctattcaatctgctgtctctgtacttcatccacaagacttatgccattaaggatttgggccgttggttcactatccatctttcaacggtggctttaccactttcgtggattcagtatgctattttctggaatggtgctgctttattccactcccactatgtctccttattaccacgtctgctggccaatcttttgatctgggagtttttgttggttccagccttcttcattgttgtgtttgctgattacggagtgggtttctccagttcatacctcaccctcagtatcgctgttggtcaacttttgactaaggttattggtctacaatggatctttgggttcgttatcgctggtaccatcttccttctgtcattactggtctccactggtgtgctggctggaaaagtagccaacaataacaacgtgcttggttccgacagagaacaagctccactgttgacctag

SEQ ID NO: 769 - DNA, 249 bp, Pichia pastoris
atggttttagtccaagatttattgaaccccaacccagtctccgaggccaagcaacacaaactaaagactttggtccaagctccaagatccttcttcatggatgtcaagtgcccaggttgttttgagatcaccactgtcttctctcatgctcaaaccgctgtaacctgtgattcatgcaccactgttttgtgtactccaaccggtggtaaggctagattgtcagagggatgtgccttcagaaggaagtaa

SEQ ID NO: 770 - DNA, 363 bp, Pichia pastoris
atggccggtttgaacgctaaagaattaagagccaagtcggagcaggagttggaggccgagttgatcgagcaaaagaaaaagttggctcaactcaaggttcaaaagctgactaaagcttctgtcccagaaattaaggctgttcgtaaggacattgccagagttttgaccgttatcaacttgcaaaagcgtgatgccgtcagagaatcttacgccggtaaagaacacattccaaaacagttgagagaaaagaagaccagagctctaagaagagcattgactgctgaggagaagtctcatgaaactgtcagacagagaaaccgcagagttgctttcccaagaagactgtacgctgtcaaagcttaa

SEQ ID NO: 771 - DNA, 1059 bp, Pichia pastoris
atggatatagatttggatattcaaatgaaagatgctgtcgaacctgatttggaggaccagcaatcttcgtcatcgtcggagagttttgactttcctatcaataatgtaaattactccagcaaaccagtggaattaacatcttctaatatcaaccagttggacagctggatagaacaacttaccgattgcaaacctttgagcgaagaatctgttaaaaagttgtgtagcatggccatagatgtgctgaagtttgaggagaacgtacaaccagtcaatgtcccagtgacaatttgtggtgatgttcatggacaattccacgatctaatggaattgttcaagattggaggaccatgtccagacaccaactatttgttcatgggggactatgttgatagaggttattactctgtggaaactgtatcatatcttgtcgctatgaaaatcaggtatccgaagagaatcactattttgagaggtaaccatgaatctagacagatcacacaagtttatggtttctacgacgaatgctttagaaagtacggatcagccaccgtatggaagttgtttacagacctctttgattactttccaattacagcactcgttgataataagatattctgtttgcacggtggattgtcaccaatgattgagactattgatcaagtaagagagctgaagagagtccaagaggttccacatgaaggtcctatgtgtgatctgttatggtcagatccggatgacagaggtggatggggtatatcaccaagaggtgctggttttacctttggtcaggatatcagtgagcaattcaaccatactaatgacttagaccttattgcaagagcccatcaattggtgatggaaggctattcgtggtctcaccaagatcttgtggtaacaattttcagtgcaccaaactactgttaccgatgtggtaaccaggctgccattatggaagtcgatgagagacacaatagagaattcctacagtatgatccaagcattagaccaggagagccaactgtcacgagaaagactcctgactactttttatag

SEQ ID NO: 772 - DNA, 255 bp, Pichia pastoris
atgtttcaacgtactaccgccactttagtcagacaaaacaaggccattgccagattctattctgagggatctacaggagctcctcgttctgacggatccggcgacgctttcaccaagcgtgagaaggctcaagaggacttctacattaagaagcaccaagccgagcaattagccaagctgagagagcaacttaagaatcagaaggaacatctgcagaacttggagaaagagatcaacaacatcaaagagaaataa

SEQ ID NO: 773 - DNA, 1062 bp, Pichia pastoris
atgtctacatttgatttcctttccagaaaaagcggtgtcatcgttggagatgacgttagaaagctattcgaatatgcaagagaaaggaaatttgccattccttccatcaatgtaacgtcctcttctacagcggttgctgtattggaggctgctagagacaacaaatcaccaggaaaaggcgtcaataataaagaccttagcgcttcagtgactggatctattgctgctgctctattgatcagaactattgcaccttcttatggcatacctgtcattctgcacactgaccactgtcaaaaaaaatggctcccttggtttgacggaatgttagatgcagatgaagaatatttcaagacccatggagagcctttgttctcctcccacatgttagacctgtcggaggaaacagacgatgaaaacattgctatttgtgtgaaatatttcaagagaatgacaaaaatgaaccagtggttagaaatggagattgggataactggtggggaggaagatggagtgaataacgaaaatgctgataaagactcactctataccagtcccgaaactgtttttgcagttcataaagcactggctcctatttctccaaacttcgccattgctgcagcctttggcaatgttcatggggtctacaaacctggcaatgtggagttgagaccatcaattttgggtgaacatcaagcttacgcagctcaacagttaggccttaaaaatggatcaaaaccacttttcctagttttccatggcggttcgggatcttctcaacaagagttcaacactgctattaaccatggagttgttaaggttaatttagacactgattgtcaatatgcatacaccattggttcaagagactatatcctgaaaaacaaagactatcttcaatccatggttggaaatccgcagggagctgataaacccaacaagaaatactttgatccaagagtgtggattagagagagtgagaaaaccatgagtggccgtgttaaagaggctctggaggtgttccatgctgctggtaccttcaagtctgagtcaaaactgtga

SEQ ID NO: 774 - DNA, 777 bp, Pichia pastoris
atgtctactcatcaagatatcgagtcatcagcagaaacagcccataacccccacgacgaaatacataagggtgagtttgttacaactcaacaagattacttggcccctttcactgggggcttgataagcggctaccaagtcagaccttctcgtaagtttgcaaatccagtcccagcaggcgtgttttcactgggtacttctctgttcactttgggtcttattcttgccggaaccagaaatgtatcaagtccagcagttttaacaggttcctttttgttttcttcaggtttaatccaaatcatttgtggtatctggagtattgtccttgagaacgtctttggttcagtactgctgctatgttatggtggtttctttgcctcatttggtgcaattcagaacgggatgggagtagatgcctataccgatgcggatgaattgactaacgcgttgggtctatacgttgcagcctggactgtctttgccattgtcctttggacggctacttttaaatcgaccttgccgttgttcttacttacgttcttcacagctatgtttttccttttgtatgatattgccatctttggaaatcatactggatgtgaaactgctagtggtgtattttgttttcttgctgctatgtgcgctttctatgctggatatgtcggaatgaccaaaaaccaacgtaacagttatattcctgttccaaaaacaaaatggctgctaatgccgtcatcagctaggtctcctgattataatcaagcaggtttttatgtctaa

SEQ ID NO: 775 - DNA, 534 bp, Pichia pastoris
atgggtagaagaaagtcacaagctgctgcagagagaaatcttgaaccaattaaaattagtaccgactcaattaagaaaaggcctcgtcgagattccaatgaacctccattcaaaaagtttgatgatctagaaatgtttgaaacttacttgaagggtgaatcttgggataacgattttgatttcctccacgctcgtttggattattatcctccatttattcgtaatgaaattcatgacgatccggaaaagattaaaccaacaatgaacaataagtccaagaagtttgtgagaaacttgcatcatcacgttgacaaacatctgttaaagcaaattaatgacatggttggaatcgagtacaaattcaaacgggaggaagagaagttaccagatggccgactaatctggcgctacaaagacgaatcagatcatggatttgaaggtcttgaccggaaatggacagtcgaagttgatgtcgagtgtagtcccaacgatccaactgtagttgtcgatatgaggtccattcctattgactga

SEQ ID NO: 776 - DNA, 837 bp, Pichia pastoris
atgacagacagggccactcagaattcaataaatacaaaccagaactcaaactcaagcttcaaccaagacgttgagaagggcgatgttgaagcccagggcgctccagcccagccgacattcaccaattcaacgtttcgtcacgatgatcagaatatctatatcaacgatactgccattccaaaagaagagttcatgtacgcttttgggggtaccttaaccactggtcgtcagtctgtgcatcgcagctttggcaaccctgtacccgctggacttgcaggattctccttaggaacttttgccctgggtctaattcttcttcaggccagaggcgtaacggacgttagcattctcattggaatgttcctttttgtttcaggagtagttgaaataattgctggtatttggtgtatcgtggtggaaaatacctgggccagtgtagtatttctgggctatggttctttctggcttggatatgctgcaattgtaactccggcatttggtgttgctgctgcctatgaaacagctgaagatttcaacaatgccgttggaatgtacctatgcccttgggcagtcttcagttttattctctggagttgtacttggaaatcgacctggccgctcaccgccttagtcttctgcatttttatgatatttctagtattgacaattgggtattttgttagctcggtgccaacaattaaagctggaggagtcttttgtttcgtgggtagtctcttgggattttacaacatgtatgcaggtttggctaatccaaccaacagttatgttgttgtccatcctctattcatgcctaatgcagccaagccagctagttaa

SEQ ID NO: 777 - DNA, 1197 bp, Pichia pastoris
atgtccgtaagaaatgccacttttcgtttaagccgtgctgctattgctaagagaactttggtcagaattgcttctcaagcctcattaagaccaacgacactgaattctgccactggagtcgctcgttcgcagttgacttttagtcgtggtgtgaaaaccattaattttggtggtgtcgaagaagttgtccacgagagatctgattggccaagagagaaactgctagagtatttcaagaatgacactttagctttaattggctacggatctcagggttatggtcaaggattaaatctaagagataatggtctcaatgttattattggtgtccgaaagaacggcgcttcttggaaggctgctattgaggatggctgggttcctggtgaaaacctttttgatgtcactgaagctataaaaaagggttctatcatcatgaatcttttgtctgacgccgcccaatctgagacttggtctaccgtcaaacccttattgactgaaggtaaaactttatacttttctcacggattttctccagttttctcaaaccttacccatgtagagccaccttccaacattgacgttattttagctgctcctaaaggttcaggtagaactgttcgttccctttttaaagagggacgtggaatcaactcttcctatgctgtttggaacgacgtcaccggaaaagctgaagaaaaagccattgctttggctgtagcagtcggatctggatacgtttatcagaccacatttgagcgtgaagttaactccgacttgtacggtgagagaggttgtttaatgggaggtatccatggtatgtttttggcacaatacgaggttctaagagagaatggacatacgccatcagaagctttcaacgaaaccgtcgaagaggctactcagtctttgtatcccttggttggaaagtatggtatggattacatgtatgatgcctgctccactactgctcgtagaggtgcgttagactggtatccaattttcaaggatgccctcaagccagtgttcgaagatctttacaattcagtaaagacaggtaaggaaactcaacgttctcttgacttcaattcacaacctgattatagggagaaacttgaaaaagaactggaaattatccgtaatatggagatttggaaggttggaaaggaagtccgcaaactacgtccagaaaacaactga

SEQ ID NO: 778 - DNA, 681 bp, Pichia pastoris
atgtcaattccaaaaccagaaggttctacactcagattgggttctacagctcctgatttcaaggccgaaacctctcgtggaccaatctctttccatgacttcattggagattcctgggtagtgttgttctcacatcctgatgattttacccctgtctgcacaacagaactgggagctttcgctaaactgcaaccagagtttgagaagcggggcgtgaaactgattggcttgtctgccaatactactgattctcatcaagcgtggatcaaggatattgatgaagtaactggctcacatctgacttttcccattattgccgatccagagcgcaagatcgctttggcgtatgacatgattgattttcaagatgcctctaatgtggatgataaaggagtacaattcactattcgttccgtcttcattattgatccaaaaaagaaggtcaggttgatcctgtcttatcctgcctctactggtcgtaacactgctgaagttcttagagtcattgactcattacagactggagatagaaaccgtgtaaccacccctattaattgggttcctggtgacgacgttatcgttcatccatcagtaactaatgaggaagcaaaaagtctgtttccacagtttcgtgtgattaaaccttacttgagacttactccattggatccttccaaatga

SEQ ID NO: 779 - DNA, 678 bp, Pichia pastoris
atgggtgacaccttgaaagaaccaattatatttgcacctaagacctaccaatatgataaatttcagttaaacccagaggatatggccgaggatccaattgaacaatttactaaatggtttcaagaggcccaagaggctagggaggatctcccggaggcagtgaatcttgcgactgctagattgccttctggtcgtgtgtcctcaagagttgtgcttttcaaagagttagacgatagaggattcgtaatttactcaaattgggaacagtctaagaagggccaagatgtgaaaagtaacaaatatgcagctataacttttttttggaagggattgcaacgccaggttcgtgttgaaggtgtattcgaggcagttagtcgctctactgtacaacggtactttgatacaaggccgaggggatctcgtttaggtgcatgggcttcaccacaaagtgttgaaattcctagtcgcgctgccttggaatccaatctggaggcaattgaatctcaattcagagattccgtttcagttccggtacctgaccactggggtgggcagaggcttgtaccgctggaaatagaattttggcaaggaagaccaagtagactacatgatagactagtatacagaagggaaaatttggaggacaacaaatggagcattgttcgaattgctccatag

SEQ ID NO: 780 - DNA, 1410 bp, Pichia pastoris
atgtccgctattagatcaattgcccagcgtacgttgcgtacccaggcccaaatttccagagtttccttcctgggagccagagcttactctacaaaagagcccactttgaaggagcgttttgctgagcttctgcctgagaagattgagcagatcaagcagctcaaggccgagcacggcaagactgtcatcggcgaggttctgcttgagcaggcctacggtggtatgagaggtattaagggcctcgtgtgggagggatccgttttggacccaattgagggaatccgtttcagaggaagaactattccagacattcaaaaggagctgccaaaggctccaggtggaaacgagccattgccagaggctcttttctggctgttgttgaccggtgaggtcccaactgagtcccaaaccaaggctttctctgaggagttggctgctcgttccgctcttccaaagcacgttgaggagttgatcgaccgttccccagctactttgcacccaatggctcaattttctatcgccgttactgctttagaatctgagtcacaattcgccaaggcttacgccaagggtgttaacaagaaggagtactgggtgtacacctacgaagactccattgacttgatcgccaagttgccaaacatcgctgccagaatctacaagaacgtcttcaaagacggaaaggttggatctgttgacccatccaaggactactctgccaacttggcctctttgctaggtttcggtgagaacgccgagttcgttgagctgatgagattatacctgtctatccactccgatcacgaaggtggtaacgtctctgcccacaccactcacttggttggatctgctctttcttccccattcttatccttcgccgctggtttgaacggtttagctggtcctctgcacggcagagccaaccaggaggtcttggaatggttattccaaatcaagaaggagttgggcggtgacttctccaaggaaaagattgaaaagtacttgtgggacactcttaaggctggccgtgtcgttccaggttacggacatgctgttctgagaaagactgacccacgttacactgctcaacgtgagtttgctctcaagcacttgccagactttgacttgttcaagttggtttctgctgtttatgaggttgctccagttgtcttgaccgagcacggtaagaccaagaacccatggccaaatgtggactctcattccggtgttttgttgcaatactacggtctgactgaggagtcattctacaccgttttgttcggtgtttccagagctttaggtgttctgcctcagttgatcattgaccgtggtgtcggtgctccaattgagcgccccaagtccttctctactgagaagtacattgagctggttaagggtcttggtaaataa

SEQ ID NO: 781 - DNA, 1020 bp, Pichia pastoris
atgtctactagacctcaagttactgttatctccgtcgagggaaaaccatcttctacctctttgcctttgccagctgtcttcaaggctcctatccgtggtgacattgttcaatctgttttcaccagaattaacaagaacaaacgtcaggcttacgccgtctctgagaaggccggtcaccaaacttctgctgagtcatggggtactggtagagccgttgcccgtattccaagagttggaggtggaggaacccaccgttcaggtcaaggtgccttcggtaacatgtgtcgtggaggacgtatgttcgctccaaccaagatctggagaaaatggcacgtaagagtcaacttgaacgaaaagcgttacgctaccgcttccgctattgctgccacttccgttcaatccttggttctggccagaggtcacagaattgagcaaattgctgagatcccattggttgtctctaacgatttggaggctattcagaagaccaaggacgccattgctgctttgaaggctcttggtgcttccgacgacttaatcagagttatcaagtccaagaagttgagagctggtaagggtaaatacagaaacagaagattcacccaaagaagaggtcctcttattgtcttcaacgaggacaagggtttggtcaaggctttgagaaacattccaggtgttgagacctgtaatgttagaaccttgggtcttttgcaattggccccaggtgctcacttgggtagattcgtcatctggaccgagtctgctttcgctgccctggactctgtctacggttccgagaccactgaatctgtcaagtctaactacagtttgccaaagaacatcatcaccaacactgatatctccagtgtcatcaactctgctgaggttcaagctgccatcagaccatctcttgccggtaagccaactcacttgcacgtcaagaaggtcaaccctcttaagaaccacgaggttatgctcaagcttaacccttacgccaaggttctcgctgagaagaaataa

SEQ ID NO: 782 - DNA, 1743 bp, Pichia pastoris
atggcttttggagacaaacttacacacagattccataaatcatctgatgcctcaactggtgctgcttcagtggaggagtattccaccagcattcatgaaaaatctgataaatcagctataggaaaattcctagacaaaattgccgtgcaagaggaaaaaggattgtccgtttcgcaaactttccttttcaactttgacttgagaccagtcgaaagcgctagaagagtatggagttggtttaactatgtgttcttctggattgctgactctttcaacatcaacacttggcaaattgctgctactggtgtccaagctggtatgagttggtggacttgttggttatcagtctgggttggttatttcttgtgtggtatctttgttactatcagtgctcgtgttggtatctactatcacgtttcctttcctgtgagttgtagaagttcgttcggtgtttttggatctatttggccagtttttaacagagtggtgatgtcctgtgtctggtacggtgtgcaaggctacattggtggaacaaccatggccttgatgcttcgttccattttcgggaatgacttgaatacaagaattcccgatggaatttcttcaccaaacgttacaacttttgagttcctgtctttcttcctgttttggttattttctcttccatttatttggcttgaacctcacaaggttcgtcatttgttcaccgtcaaatcttatgtcgtcccagccaatggtatcggacccatcgtgaagcaaccatccactatccacggatcggagtttgcttgggaattcattcgtatggttatgaactctcttgctaactttgctactctgatcaccaacgctccagatttctccaggttttcaaagactaagaagtcggctaagtgggcacaactgttttccatccctctgtgtttctccattacttcgttgattggtatcctggtctcttcggcttctaccgtcatttacggagaaacttactggtcgcctattgatgttttaggaagatttttggacaactacaactcgggtaacagagctggtgtctttttcatttctcttgccttcgctctggcccaacttggaactaacatttccgccaactctttgagtgctggtaccgatgccactgctttgttccccaagtacattaccattcgtcgtggtggatacatttgtgctgcagttggtttggccatctgtccgtgggaattgctgtcatcttcaaacaaatttacaacatacttgtctgcttactcagtgtttttgtccgctatttttggtgtgatttttgctgactactatattgttaagagaggatggttaattttgaccgatttgtacaatgccgaaaagacatccgcctacacatactggcatggtatcaactacagagcttttgttgcttatatctgtggtattctcccaaacattgtcggatttgttggtgctactggtgcaggttccgtaccccaaggtgctatgtatgtttacgactttaactttttcacaggatttgcgtcgtccattgtggtctatgtgcttctgtgctatatccatccaattccaggattgccaactgacatcaagaaggatctcttcaagaagggctggtacgaaatctacgctgaagttgaagagttcgatgtcagtggaggagttatcaatggtgagggacaggagcccgaagaggaagccatagattactacagtgaagagaagaaggtatga

SEQ ID NO: 783 - DNA, 2712 bp, Pichia pastoris
atggaagaaacacagtttacagatagagctttagctattattacaaacgctacaaagttggccaaggacaattcccatccacaggtccagcctatccatctgttggccgctatggcccccacagatgaagatactaccccttatttgaaagtcttagtggagaagggaagatttgactggcagacttttgaaaggaacatcaatagagcattgataagggtcccatcgcagactcctgcccctactgatgtttccttcagtggagtagcagctcatgttatccaagaagctggaaagatgagacaacaacaaaaggattcctacattggacaggatcatttgctgttggcattgttggaggacaagtctattacgcagatcctgaaagattcttcaatctctccggatgctttaaaaacacagataattaaccttagagggaaccaaagaattgactccagacaagctgactcttcgtcaaatcacgaattcttggacaagtatgcaattgacttgacggaacaagctagagaaggtaagattgaccctgtcattggtagggaggaagaaatccgtcgtaccataagggttttggcaagaaggaccaaatccaatccttgtctaattggtgacccaggtgtcggtaaaaccagtatcgtcgaggcagtcgctcaaagaatcattgataatgatgtaccaaacattctacagaactcaaagctgtacgctttggatttaggtgccttgaaagctggtgctaaataccaaggtgagtttgaagagagaatcaaaggtgtattgaatgaaattgcagaatctaagcagatgatcatcctgtttatcgatgaaattcatatgctaatgggtgatggtaaatccgatgccgcaaacttgttgaaacctatgctggcaagaggttctttgcactgtatcggtgctaccaccgttattgaataccgaaagtatgtcgagacagatggtgcatttgagagaagattccaaaggattgatgtgcgtgagcccactatccgagagaccgtggccattctaagaggtttgcaaccaaaatatgaaattcaccacggtgttcgaattttggactctgcattggtaactgctgcacaattggcatctcgttaccttacttacaggaaacttccagactctgctgttgatttaattgatgagtcttcggcatctgttgcagttgccagggattctaaacctgaagaattagataccaaagagagagaacttcagctactggaggtagagatgaaagcccttgaaagagatgctgattccgacaagactactgaggagagactgactgcagtcaaacagaaggttcaagagcttgaggaggagttagtacctttgagggctaaatatgaacaagaaagggctggtcatgaagagttaaccgcagccaagaagaagttggacgaattagagattaaggccactgatgcggaaagaagacatgacaatgccactgctgcagatttgaggtactttgctatccctgatgtcaaacgtcgtattgctgaactcgaagagaaagttgccgaggaggaagctgcattgagtgacattgccatgatcaccaatgtggttggttccgaacaagtcgcagagactgctgccagattgactggtatcccagtgcaaaagctaactcaagctgagaataacaagcttattacaatggaaagagagttgagttccagtgtggttgggcaatctgaagctgttaaagcagtctccaatgcaatcagactatcgaggtctggtcttgcaaaccctaaccaacctgcatcgttcttattcttgggattgtctggttccggtaagacagagcttgcaaagaaggttgccggattccttttcaatgatgagaaggctatgatcagaatcgattgttccgagttgggagagaaatggtcgtacaccaaattgcttggttccgagccaggtttaattggatctgaccaaggtggtttgttgaccaaccagctgttgcgtcatccatactcagtcatcctatttgatgaagtcgaaaaagccgctcctgaagttctgaacattttgttacaaatgttggacgatggtcgtattaccgcttctaatggtactctggtgaactgttccaattgtattgttataatgacatctaatttgggtgctcaattcatcaacagtgccaaaggctcaaagatatccccagagaccaaggagttggtaatgacagctgtcagagcccatttccgtccagaatttttgaacagaatttctgctacggttgttttcaacagactgtcaagacatgctattagcaagattgttaagatcagactggcagaaattgaacaaagatttgaagccaatgccaagtcaattaagcttgacgttgatgatgccgctatcgagtatctttgccgtaacggatattcttccgatatgggtgctagacctttgaacagattgattcagaatgagatccttaatcaactagctgttttaatccttaagggacaagtcaaagacaaggaaacagttaagattaggttgggatccaaaggtctggatgttttaccaaaccatgcagttgagtcggactccatggacgtggatgttgatgattgggtggatgcggccgaggaagaagactcggacaacaaccatgatgaccaagcaccactttacgactaa

SEQ ID NO: 784 - DNA, 2343 bp, Pichia pastoris
atgttatccgccagaagagtacttgctaagataaacagccgtggattggccacggtgtcagggctcaccaaggattctctcgttgagatgaacctgttggaaaagggcaactacattaattacaagcaacaacttgacaacgtcaatattgtcaaggaaagactgggaagacctttgacctacgctgaaaagctgttgtacggtcacttggacaagcctcatgaacaagacattgagagaggtgtctcttacttgaaattgagaccagacagaatcgcttgtcaggatgctaccgctcagatggccattttgcaattcatgtccgctggtatgccttctgtcgctactccaactactgtgcactgtgatcacttgattcaggctcaaaagggtggtgctgccgatttggagcgtgccatcagactgaacaaggaagtctacgatttcttggcaaccgcttgtgccaaatacaacattggtttctggaagccaggttcaggtattattcatcaaattgttctggaaaactatgctttcccaggtgaattgctgatcggtaccgattcccacactcctaacgctggtggtttgggtcaattggccatcggtgttggtggtgctgatgccgtcgatgttatggctggtttgccatgggaattgaaggccccaaagattatcggtgttaagctgaccggtagaatgaatggatggacttctccaaaggatatcattctgaagttggctggtatcactaccgtcaagggtggtactggtgctatcgtcgagtacttcggtgatggtgttgacaccttctcttgtactggtatggctaccatctgtaatatgggtgctgaaattggtgccactacttctgtgttcccattcaacaactccatggttgacttcttggacgctactggaagatctgagattggtgagtttgccaaggtcttccaaaaggagtacttgtctgccgaccctggttgtgagtacgaccaggttatcgagatagacctgaacaccttagagccacacattaacggtcctttcaccccagatttggccactcctgtctccaagatgaaggaggttgccgttgccaatgactggcctctcgaggtcaaggttggtttgatcggttcttgtactaactcctcttatgaggacatgaccagagccgcttctatcattgaagatgctgcctcccatggtgtcaaggctaagtctttgtacactgtcactccaggttccgaacaaattcgtgctaccattgccagggatggtcaactgaagactttcactgacttcggtggatccgttttggctaacgcttgtggtccatgtattggacaatgggatcgtcaagatatcaagaagggtgacaagaacactattgtctcttctttcaacagaaacttcacttctagaaatgacggtaacccagctactcacgcttttgttgcttccccagagatggtcaccgcttatgctattgcaggtgatttgagattcaacccattgactgacaagcttaaggacaaggacggaaacgaattcttgcttaaggaccctgtgggagtcggtcttcctgtccgtggttacgaccctggtgaaaacacttaccaggctcctcctgaagacagagcctccgttgaagttgtcatttctccaagctcagaccgtctgcaaagactgactccattccagccatgggatggaaaggacgctgagagattgccaattctgattaagtccgttggtaagaccaccaccgatcatatttctatggctggtccttggttgaagtaccgtggtcacttgcagaacatttccaacaattacatgattggtgccataaacgctgaaaacggtgaagccaacaacgttaagaaccactacaccggtgtctactccggtgtcccagacactgccgccgcgtaccgtgacaatggtgttaagtgggtcgtcattggtggtgagaacttcggtgaaggttcctccagagaacacgcagccttggagccaagatacttgggtggtttcgctattatcaccaagtccttcgctcgtattcacgagaccaacttgaagaaacaaggtctgttgccattgaacttcactgatcctgcagcttacgacagaattcaacccgatgatgaggttgacattttgggattgaccgagttggctccaggtaagaatgtcactttgagagttcaccctgccgacggctccccaacttgggaaactccattgtctcacacctacaatgccgaacagatcgaatggttcaagtacggttctgctttgaacaacatggctgccgtcaaggcctctaaataa

SEQ ID NO: 785 - DNA, 732 bp, Pichia pastoris
atgccagaagttttgatctccaagaaaagaaagctcgtagctgacggtgtcttctacgctgaattgaacgagtacttcactagagaactcgctgaggacggatactccggtgtcgaagtcagagtcaccccaaccactactgagatcatcatcagagctacccagaccaactctgtcttgggtgagaacggtagaagaatcagagaattgactgctttggtccaaaagagattcaagatcgatgagggtaaggttatcctctacgctgagagagtccaagaccgtggtttgtccgctgttacccaatgtgagtctttgagatacaagctgttgaacggtctggccatcagaagagccgcttacggtgtcgtcagattcgtcatggactctggtgccaagggtgttgaggttgtcgtttccggtaagctaagagctgccagagccaagtctatgaagttcgctgatggtttcatgatccactccggtcaaccagccaaggatttcattgagactgccaccagacacgttctgttgagacagggtgttttgggtatcaaggtcaagatcatgagagaccctgctgctgccagaaccggtcctaaggcccttcctgactttgtcaagatccacgaaccaaaggatgagagagaggttccagctcctttcgtcaagtcttatgttgctgagccagtcgttgaggctgaggaggctgaggagcaagctactgcttaa

SEQ ID NO: 786 - DNA, 486 bp, Pichia pastoris
atgccaattgatcaacagaaattagagaagctacaaaagagtggcccaagaagagtcggaggtgccagactcaagcagaaaagatccaacagagatgctgaggctgatgacaccaaattgcaagccactctgcagaagttcaacgtccagactttgactggtgtcgaggaggctaacttcttcaaagatgacggaaaggtactgcacttcaacagagtcggtgttcaggctgctgccaactacaacacttatgctttcactggctacgctcaagagaagaacatcaccgatttgattccaggtattttgccacaattgggtgctgagaacttgcaattcttgcaacagattgctgagtctttgcagaagaacccagatgctttgaacgctttgaagaaccagaaccaggagggagctgaggccgaagacgattctgagattccagagttggtcgaaggggagacctttgacaagaacatcgattag

SEQ ID NO: 787 - DNA, 1542 bp, Pichia pastoris
atgaccgtcgttgaaccagtgggagatgtattcaacactatcttagtgctggactttgagtttaacgtttatgctgagatgctgccttgcacccagaaaatctctgaacttccattcactccaacaggtgttattttctctggaggtcctttctccgtatacgaagaaggatcccctcatgttgataaggagattttcaacctgaatgtgcccattctgggtatctgctacggtatgcaagagttggcctggatcgataatgttgaaaacgttgccagaggtgaaaaacgtgagtacggtccagctaccctaaacgtgcaagacaaggactgtgctctgtttaaggacgttgatcattctcaggtctggatgtctcatcacgacaagttgcacaatctcccttccggattcaagactgttgcaaccaccgagaactctcagtttgcaggtgttgccaacgaggccaaaaagatctatggtattcaattccacccagaggttacccacagtgttcagggtaaaaccatattgaaaaactttgctgttaatgtctgcggagctacccagaactggaccatggaaaacttcatcgacaccgagatcaacagaattagaaccttagtcgggcctaccgctgaagtcatcggtgccgtttctggtggtgttgactctactgtcgctgctaagttaatgaaagaggccattggcgacagattccatgctatctacgttgacaacggtgtcatgagaaaaaatgagaccatcactgtcaagaagactttggacgatggtctgggtatcaacttgactgttgttgacgctggagaacagtttttgagtcaactgaagggcgttactgatcctgagaagaagcgtaagatcatcggtaacactttcatccacgtttttgagaaagtggctgctgacatcaagccaaaagatggttcagagattgaatttttattgcaaggcaccttataccctgacgtcattgaatccatttccttcaaaggcccatcgcagactatcaaaactcaccacaatgttggcggattgacggagaatatgaaattgaagctgattgagccgttgagagagcttttcaaggatgaagttcgtcacttgggtcaactattggacattcctgaagatttggtatggagacatcctttccctggtccaggtatagccattcgtgttttgggtgaagttactccagagcaagtcaagattgcaagagaggccgactacattttcattgaagagatcaagaaggctggtctttacagaaagatttcacaagcttttgctgctttactgcccgtcaaatccgttggagtcatgggagatcaacgaacctacgagcaagtcattgcattaagggctattgagacttcagactttatgactgccgactggtttgtctttgaagctgcattcctgaagaaagtagcctctagaattgtcaatgaagttgatggagttgccagagtaacttatgatataacttctaaacctcctgccaccgttgagtgggaatag

SEQ ID NO: 788 - DNA, 1437 bp, Pichia pastoris
atgagcagcttcagagttctagacttggtaaagccctttaccccatttctgcctgaggttatctctccagagagaaaggtcccctttcaacagaagttgatgtggactggagtcactcttctgatcttcttggtcatgagtgaaattcccctgtatggtatcacttcaagtgactcctctgaccctttgttttggctgcgtatgatgttggcctctaacagaggaacgctgatggagttaggtatctctcctattgtcacttctggaatggtgttccaactgttgcagggaatccaaatcttggacgtgaacatggaaaacaaagcagacagagagttgttccaaactgctcaaaaagtgttcgccattttgctgagtatcggacaagctactgtttatgttttaactggaatgtatggcccccctggtgaactaggagttggtgtctgtcttttgttggttcttcaattggtgtttgcaggtattgtggtcattttgttggatgaactcttacaaaaaggttacggtttaggaagtggaatttctcttttcatggccaccaacatttgtgagcagattttttggaagacttttgctcctaccaccgttaaccgtggaagaggtaaggaatttgaaggagctttcatttctttctttcacctgatcttgaccaagaaggacaagaagagagctctgttggaatcattttacagagacaacgctccaaacatgttccaagttattgctactcttgtcgtctttttcaccgttgtctatcttcagggcttccgtttggagattccagttaagtctacccgtcaaagaggtccttacggaacttacccaatcagattgttctacacatccaacatgccaatcatgttacaatccgctttgacctcaaacattttcattatttcccagatgttgtattcacacttccctgacaatgcctttgttaagctcattggaacttgggaagctcaacctggttcagcacaactgtttgctgcctcgggattagcctactacatgcagcctccaatgtccctgagtcaagctttattagaccctatcaagactgtcgtctacgttgtgtttgttttgaccacttgtgccatcttctccaagacatggattgagatttcgggatcttccccaagagacgttgctaagcaattcaaagaccaaggattggttattgctggacacagagatgctactgtttacaaggagttgaagaagattataccaacagccgctgcatttggaggtgccacaattggtgcactttccgttgtttccgaccttttgggtactttaggttcgggaacctccatccttttggctgttacaaccatctatggttactacgagttggctgttaaggaaggtggtttttcaaagggtggaccctctggattcgttgatctgtaa

SEQ ID NO: 789 - DNA, 1047 bp, Pichia pastoris
atgcaagttaaatctatcgttaacctactgttggcatgttcgttggccgtggccagacctttggagcacgcccaccatcaacatgacaagagaggtgttgtcgtcgtgaccaagaccatcgttgtcgatggttccaccgttgaggctaccgcagcagcccaggtccaagagcacgctgaaactttcgcagagtcgactccttcagctgttgtttccagttcatcagctccttcctctgcttcttctgcttccgctcctgcctcttccggtagcttctccgctggaaccaaaggtgtcacctactctccttaccaagccggtggtggctgtaagactgcagaggaggtcgcttccgatctttcccagttgaccggctacgagatcatcagattgtacggtgttgactgtaaccaagtcgagaacgtcttcaaggccaaggccccaggtcaaaagttgtttttgggaatcttctttgttgatgctatcgagagcggtgtcagtgctattgcctccgctgtcaagtcatacggttcttgggacgatgtccacactgtctctgttggtaacgagttggtcaacaacggtgaggccactgtttcccaaatcggtcaatacgtttctaccgctaaatctgccttgagatctgctggtttcaccggtccagttctttctgtcgacactttcattgctgtcatcaacaacccagggttgtgtgactttgctgacgagtacgttgccgttaacgctcacgctttctttgacggtggcattgctgcctctggagctggtgattgggctgctgagcagatccaaagagtttcttccgcttgtggtggcaaggatgtcctcattgtcgagtccggatggccttcaaagggagacaccaacggtgctgccgttccttccaagtcaaaccaacaggctgctgtccaatctctaggtcagaagatcggttcttcttgtattgctttcaacgctttcaacgattactggaaggccgatggtcctttcaacgctgagaagtactggggtatcctagactcctaa

SEQ ID NO: 790 - DNA, 1074 bp, Pichia pastoris
atgagtaaggcatcaccggagactactcatctgttacaccatgatccttacgacaaaacagaaaggtccgcagcacaaaagtcatcttggaagaacactttatacatcatttttgccacagttgtttcagtgccattgctgtatctgttcttagtatatctgcccaacttagctcccgagtctgtgagcgagctgccaatcattcgcaaagttgacaaattggatttttcgaaccagttggaagtaccacggagactcattttaatcggagatgttcacgggtccttaaagccgttgaagaaactattgagaaagctcgattataatcccaagggcagtacagacacagttcttttgctaggagattttattagcaaaggtccccagtctgtagaagtggttgatttggccatcaaaaacaaattccagtgcattttaggaaaccatgagattagcgttctgcagagatataaccaattccatggattatctggtttaaagtaccgcaacaatgaaagtgacatagaaaattatgatttacaatcgggtcaactctacccattagatgatgaaatgaggcttgcaaagcaattgtatcctagacacattgagtatatgggcacttgcccctttatttatgacttgggaccggtacctcgttataataggaaacatacaaactacaaggaaaccgttgacggggtcgccgttcatgccggtctcaactggaacgttcatgaactgtatgatcaagatgtcaccgaggttactgaaatgagagcgatgcttcccccagatttctcaaaagctactgatgacaaatccattcctggttctgttggatgggcaaagatatggaaccattggcaaaacaatataactgatagcgacgattttgatggtttaaagaaccgcaaagtttactatggtcatcatgctagccgaggtctcaatgtgagaccgtacaccatgggaattgataccgcctgcgttaagggagaccgacttaccgctgttgttattacttaccacaagggtaagataagggagaaacttgtttctgttggttgctga

SEQ ID NO: 791 - DNA, 1149 bp, Pichia pastoris
atgtgtcttcaaagtatcgtcattgatctacttactaactttcaggtcctgaaatattggggtaagagagacacgaacttgaacttacctaccaacagctccattagtgtaaccttgtcacaaaaggatttgagaactttgacaaccgtgaacagtagcagaaactttgagaaagactctttgtacttaaatggggtttctcacagtattgaaaatgatcgtaccactaattgcctggagcaactacgctcgttgagacaacaactggaagaagatgatcctaacctgccgaaacttagccaatggaagcttcatataattagtgaaaataactttccaaccgcagcagggttggcttccagcgctgctggatttgcggccatggttgctgctatctctaaattgtatgaacttcctcaggatgcttctgagttaagtcgaattgctcgtaagggatcagggtctgcctgtagatctatgtttggaggttacgttgcttgggaaatgggtgagaaactagatggtactgattctaaggcagttcaaattgcgccgccggaacactggccaaatatgaaagcagccatctgcatcgtcagtgatttgaaaaaagatgtttcatctacgagtggtatgcagactactgtccaaacctctgaactgtttcagtatagggtcaatcaagttgttcctccgaggtattcacagatggttgatgcaattaagaatagagatttcgaaacgttcggtactttaacgatgaaggattctaactcttttcatgccacttgcttggactcgtacccccccatattctatctgactgatacatctaagaaaatcatcaagctgatacacactttgaatgatgcgatcggtaaggtggtagcggcgtatacattcgatgcaggtccaaatgcagttatatactacgagtcagaaaatgaagaagtggttctgggggtcctatttggtgttctgtccaacgttgatggctggaatgagatgaattcagccacattgaaagtgcctgaaggagtccctctttcgagtttggattcaactattgcaagtggagtctcaagagtgattttgacacaagtgggagaaggacctaaagagtccgacatgtttttagttgctccttaa

SEQ ID NO: 792 - DNA, 492 bp, Pichia pastoris
atgaattcctccaagcgttcgatctcaatccccagaagcttttctaaactcctatcatgtggcagtttcagtcttgtcgcagtttcagacgagtctttgacagccttcaacgaccttaagttgggtaagaagcataaatatgtgatttacaagatcaatgattccaagacagagattatcgtcgataaaatctcttctgacgagagctacgacgcttttttggaggcgctccctgaggacgactctaggtacgctgtgtatgactttcaatacgagatttcgtccaccgagggaaaaagatccaaaatcatcttttttacatggtcaccagagacagcctctgtcagaagcaagatgatatacgcttcctcgaaagacgctttaagaagagctttgaatggagtgtcaactgacatccagggtactgacttcagcgacgttgcctttgagtctgtgcttgaaagagttagcaggggtgccggatctcattag

SEQ ID NO: 793 - DNA, 897 bp, Pichia pastoris
atgccaatcgaaataaagggcaatgatgttgtaataacatcctcctcaaccactcagactcaagtccgcattaatctttttggggctacagtttattcatggacaattgcgggcaaggaacaattgtggacaagtgatgccgccttgtttgatggttcaaaaccaatcaggggaggaatccctttagtattcccagtttttgggaaaagcagtgctcctggttttgaaaaattaccacagcatggattcgcaagaaactccacctgggaatttttgggacaaacacatgcaaatcctccaacggtacagtttggcctgtctcctgataatgtcaatcgaaaagtatacaataactgggataacggggataatgaattcagtgtcatttataccattgctttggaggatgagcagcttgtgacctctgtagagattcaaaacacagatcagaaagaatggaaattcaattggctgtttcatacctacttcctggtagatgatatcgaagatactttgattaacaacttaccaggtgagaaatgtaatgaccgtgttgtccacgaaatttacactgaaaaacacccaattatctcatttgaccaagaggttgaccgtgtctacagcgatgtttctaccgataaacttcttcaaataattgagttagggaaggttaagcacaatatcaagcgtgtaaacttgccagacgtggttgtctggaacccatggagcgaaattgtaaaggaagtagcagattttgaacctaaagaagggtatcgtagaatggtatgcgtggagccaggctatgtcgaacaactaaagatactgaagcccggtcagtcatggacagcgtcacaaattctacacaaaggtgatgatatcaaccttcaagctatataa

SEQ ID NO: 794 - DNA, 603 bp, Pichia pastoris
atgtcaattcctccagaggttctgtgggcacaacgctctaacaaagatgacacttcaaagaatgttgtttatctcactattcgcatagcggatccagagaacataaaagttgatctacagccaggaagcttagaatttgatgctgactctagaggttcgaaataccacctgtctcttgagttttttgacgaggtggatgtggaaaagtcaaagtaccatacagctggttcacatttgttttttgtccttcaaaagaagaacgcatctgaagagttttggccaaggctgaccaaggaaaaggttaagttacattatctacacacagattttgaccgatgggtcgatgaggacgagcaagatggcgaagaagctgacccaaccgtacctgacccttcccaaggaatggacttcagctctttgatgaacaatgaggcactgtctcaatctctatcaagtgatgccggacaacccgatatggctgctttaatgcagcaactgcaaaactccggtgctggaggacttgggggagaaggagatcaagctcttgaccgcgctttagaggaagactcttctgatgaggaagaagaggataagcaggagtaa

SEQ ID NO: 795 - DNA, 1089 bp, Pichia pastoris
atgtcccctgcaatcaacatcgccattatcggagcaggtattgtcggttctgcgttcattaatcagttgaggagcgtatcgtctttgttcgactttaacgttatttatttggctaaaagcaaaagtgccttgatctcttatgatttcaaaccgttgaatctagccaattggaaagcagacttggacaatagctcattaaatcccttgacggtggaagaacttttgaaattcttgaaaaattcacctttaccagcaattttagttgataacacttctagtgctgacgttgcgtttgcgtacccccaatttgtctctaacggtatttcagttgcaactcctaacaagaaagcattttccggggacctaaatttatggagtgaaatattcaaagcttctggagaacccaatggtgggctagtatatcacgaggctactgtcggagccggtttgccggttattagtactatcaatgatctggtcaacactggagataagattgaaaagattgaaggaattttttccggatctctatcctatatcttcaatcgcttctctactacaaagccaaatgatattaagttttctgaaattgtgtccaaagccaaggagctgggttacactgagccagaccctagagacgacctctccgggttggatgttgctagaaaagtcaccattttagccaggttatctggctttaatgtgaaatctcctgattcattccctgttgactctttagttccccaggagcttgaaactttggagacgagcgatgaatttctttcaagattgcatgagtttgactcccaagtggggcacctaaaggaacaagctgcttccgagggcaaggtattgcgttttgttggaactgtagacttccccaacaacaaggtctcagttggttttggaaagtatgacgcttcgcacccctttgcttctcttcaagggtcggataacgtcatctctatcaaaacagagagataccagaaccctttgattattcagggtgcaggtgcaggtgccgaagtaactgctgctggtgtgttagccgatgttattaagattgggcaacggatttctaagttgtaa

SEQ ID NO: 796 - DNA, 951 bp, Pichia pastoris
atggctgacaacagagaagttcttgttttgagaggtaccttggaaggacacagtggatgggtcacttccttggcaacttgccctactaacccagatatcttactgtctggatccagagataagaccctgattgtctggcaattgaacggagatgaccaagcttatggtgtgccaaaaaaggctttaaagggacactctcacattgtttctgactgtaaactttcattggacagtgaatttgccctatcttcctcctgggacaagactgttcgtttgtggaacctaaagaccggagagatcatcaaatacgccggtcacacttccgatgttttgtctgtggacctgtctcaaaaccttagagttattgcctctgcttctagagataagactattaaactttggaacattgttggtgaagaggttgccactttggagggtcacaccgactgggttacttctgtcagatttgttcctggatcagcttctgacattatttctgcttcatctgacaagttggttaagtcctgggatttgaacgaaatgaaattgaccgcagactttgttggtcacactggttacgttacggcaattaccgtttctcccgatggatccctctgtgcttctgctggaaaggatggttccatcatactttgggatttctctgttaagaaagtcttgtacactttggatgcaaaagaagaagttcatgctgttgctttctcacctaacagattttggttgtgcgctgctacttccaagtctattaaaattttccacttggagaagcgtaagccaatggatgagctgaaacctgaatttgtttccacttccactaaggctagagacccacactgtatttccttagcttggtctgctgatggtcagaacttgttttccggttataccgacaacgttatccgtgtctggcaagttatgacttcaagttcgtaa

SEQ ID NO: 797 - DNA, 1875 bp, Pichia pastoris
atgtcaagttcaaacaaagaattcgatggagactcgattggttcttcagactctctggatatagaatccggtaacagagatccaaaaactcaaaacccacaagcttatgtcccaagcgacaatgaagatcgtatgtcagaattatctcactacgcttctacacctgaccagtcactaaaaatggtgaggacagaaaccaaaaagtcattgaaagatttgggagtctcggatgaacttcccacattagacccaaacaggcctattgctgtagaaaatcctatattccccgaagaatattatttggaaacagaaactggtttagtccctgtggcaacattgcaagatctgggtaggaacccaactgcattggaaaaacttagaaaagaaaaatctagagcgtttccccaacccaacggggaggctcccattctcaaagattcgtcggatgttgaaacgtttaagtcgaaagagtacagcccagaaatagagtttgtcacgtttttgatcaacgatccagagaacccatacaactggcccacgttcactaaatgggcatacactattatcttatctatattagtcgtcgccgttgcttttggatcctcgtgtatctctggagcattattcactgtggaagataattataatgtttcattggaagttgccattttgacagtttcattgatggtcttgggtttctccttgggtccattgttgtggtctcctttatctgagcagattggaaggagatgggtttattttatatccttgggtctctacacaatttttaacattccttgcgctctatcccctaatatcggtggtctcttagtttgtcgatttttgtgtggtgtttttagttccagcgcactttgtctggttggtggttctatagctgacatgcatccttctgaaacaagaggtaaagcaatcgcctattttgcagcagctccttatggtggaccagttattggacctttagtatgtggttggatcggtgttaaaaccaacagaatggatcttatcttttgggtaaatatgggatttgcaggatttatgtggttactagttgcctgcattccagaaacctatcaaccagtaattttaaagaaccgagcaaagaaattaagaatggagttgaacaatcctaacatcatgacagagcaagaagctaatccactaactttcaaggaattagtagttacctgcctttataggcctcttatgtttgttttcactgagcctgttttggacatgatgtgtgtttacgtttgtcttatttactcattgctttatgcatttttctttgcatacccagttatatttaatgagctttatggctatgaagatgatttcatcggcctgatgttgattccaatattgataggagcctttttggccttagttacaactccaattttggaatccatgtacgtgaaaatgtgtcaacgaagaaaaccaactcctgaagacagattggtaggagccatgattgggtctcctttccctgcaattgccctatttattttgggagcaacgtcctacaagcatatcatttgggtcggtccagcatcttccggtatcgccttcggttatggaatggtactaatttactactctttgaataattacatcatcgacacctacgccaagtatgcagctagtgctctggcaacaaaggttttcctgaggagtgctggaggtgctgctttcccactatttactacacagatgtaccataaactagggctacagtgggccagttggttgttggcattcatttcattagcaatgattctcatcccattcgttttctacatttatggtgctcgtttgagggccaaaatgtgtaaagagaactacagtgagatgtga

SEQ ID NO: 798 - DNA, 2121 bp, Pichia pastoris
atgtcaaagtccgaatcgtacgagttccaagctgagatctctcagttgttgtccttgttcattaacactgtctactccaacaaagagatctttttaagagagctgatctctaatgcctctgatgcattggacaagatccgttaccaatccttgagtgatcctaaagtgctagaaactgaaccagagttgttcattaggattaccccaaagcctgaagagaaggttttggagatcagagattccggtatcggtatgactaaagctgatttggtcaacaacctgggtactatcgccaagtctggtacgaaggctttcatggaagctttgagtgcaggtgctgatgtttctatgattggtcaattcggtgttggtttctactccctgttcttggttgctgaccacgttcaagtcatttccaagaacaacgatgacgaacaatatatttgggagtcaaacgcgggtggcaaattcaccgtttctttagatgagaccaacgaaaagttaggtagaggtaccgtgctgagattattcttgaaagatgatcagctggaatacttggaggagaagagaataaaggaggtcgttaagcgtcactctgagtttgtttcttatccaatccagttagtcgtcaccaaggaggttgaaaaagatgttccagtcgaagaggaggaagaaaagaaggaagagactgaggaagatgacaagaagcctaaactagaggaagttgacgacgaagaagacaagaaagaagaggaaaagaagattaagaaagtcaaggaaagtgtcactgagactgaggagctgaacaagactaagcctttgtggaccagatctccatctgaagtcactcaggatgagtacaatgctttctacaagtccatttctaacgattgggaagacccattggctgttaagcacttctctgtcgaaggtcaattagagttcaaggccattctgttcattcccaagagagctccattcgatctattcgagtctaagaaaaagaagaacaatatcaagttgtacgttagacgtgttttcatcaccgatgaagctgaggaactaattccagaatggttgagtttcgttaagggtgttgtggactccgaagacttgccattgaacttgtccagagaaatgttgcaacagaacagaatcttgaaggttatcagaaagaacattgtcaagaagttgattgagactttcaacgagattgctgaagacaaggaacaattcgagaagttttacagtgctttctccaagaacttgaagttgggtgtccatgaagacagccaaaacagatccgcattggccaagttgctgagatttaactccaccaagtctactgaggagctaacctcattctctgactacgtcaccagaatgccagagcaccagaagaacatctacttcattaccggtgagtctgtcaaggctcttgagaaatctccattcttggatgctttgaaggagaagaactttgaggtcctattgctgaccgatcctattgatgagtacgctatgactcaattgaaagagattgaggacaagaaattggttgacatcactaaagactttgagctggaagagtctgaggaggagaagaaggctagagaggaagaggttaaagatttcgagcctttgactaaagccctgaaagagattttgggtgacaaggttgagaaggttgtagtttcctacaagctggttgactctcctgctgctattagaacttcccaattcggctggtctgctaacatggaaagaattatgaaggctcaagctctgagagacaccaacaccatgtcctcgtacatggcttcaaagaagatcttcgagatctctccaaagtcgccaatcattaaggctttgagaaagaaggttgaggctaccggtacagatgacagagttgtcaagaacttgaccactttgttgttcgacacagctttgttgacttccggtttcactttggatgagccaacttctttcgctgccagaatcaacggtttgatctccattggtttgaacatcgatgaggaggaagagaaagagccagaacaggctactgaagctccaagtgaagaagctgttgctgagtctgccatggaggaggttgactag

SEQ ID NO: 799 - DNA, 375 bp, Pichia pastoris
atgacttttcacttttctataatttttcacattcgatttactaacacttttttagacaacaccaagtccaaccagatcaaggtcattaagaccccaggtggtgttctgagagctcaacacaccaagaagagaggtactaccccaaagtgtggtgactgtggtatcagtctgccaggtgtcgttgctcttagaccaagagaattctccagagctaagaagagtgacaaatctgtgagcagaccttacggtggttccagatgtggtaactgtgtcaaggaaagaatcatcagagctttcctgatcgaagagcaaaagattgtccaaaaggtcttgaaggaacaggccgagaaagaaaagcaggctgaacaaaactag

SEQ ID NO: 800 - DNA, 6648 bp, Pichia pastoris
atgagtagtgttaaccactctctccgtcattcaaagctaccgccgcatttccttggtctcaactcggttgaagtcgctgctccctccaaggtcagagactttgtcagggaccatggtggccactcggtcatcacgagagtgctgatcgcaaacaacggtatagctgccgtgaaagaaattcgttccgtcaggaaatgggcgtatgaaacgtttggtaacgatagagccattcaatttattgttatggctaccccagaggatcttgaagctaatgctgaatatattcgaatggctgaccagtatgtcatggtcccaggaggaactgcaaacaacaactatgcgaacgtcgacctcattgtagaaatagcagaatctactgatgctcatgctgtttgggctggttggggttttgcctccgaaaatccccatttgcctgagcaactggccgcttctcctaagaagattatcttcattggccctccgggctctgccatgcgatctcttggtgacaagatttcctctactattgtcgcacaacatgctaaagtcccatgtattccttggtcaggaactggtgtcgatcaggttataatcgaccccgtaagcaatttggtttccgttgatgaagaaacgtacgccaaaggatgctgttccgatccacaggacggtttggcaaaagccaaggctattggtttccctgtgatgattaaagcttccgaaggtggtggtggtaaaggaattagaaaagttgacagggaggaagattttctttctctttatgatcaagctgctaatgaaattccaggttccccaatttttatcatgaagcttgctggagatgccaggcatttggaagttcaattacttgctgatcaatatggaaccaacatctccctttttggaagagattgttccgttcaaagaagacaccaaaagatcatagaagaggcaccagttaccattgccaaacaagacactttcaggcaaatggaacaagccgctgtcagactgggtcaattggttggatacgtttctgccggtaccgttgagtatctatattcacacgctgaggacaagttctacttcttggaactgaaccctcgtcttcaagttgagcatccaaccacagaaatggccacaggtgtcaatcttccagttgcccagttgctaattgcaatgggtattcctttgaatagaatcagagatatcagggtactttacggacttgaaccaaatggcgctacagaaattgactttgaattcaaaactgaagaaagcttgaagagtcaaagaaaacccattccaaagggtcacactattgcatgtcgtatcacatctgaagatcctggtgaaggttttaagccttctggtggtgctctatatgagctaaatttcagatcttcttctagcgtttggggttacttcagtgtaggaaacaaatcctcaattcattctttcagtgactctcaatttggtcatatattctcgtttggcgaaaaccgtcaaatcgccagaaaaaatatggtcgtcgccttgaaagagctttctattcgtggtgactttagaactacaattgagtacttaataaaactgttggaaacagctgatttcgagaacaacaccatcactactggttggttggacgaactgatctcgaagaagctgactgctgaaagacctgatgaaaccacagcaattttatgtggtgctgaaaaaggtcaaatcccaggcaaagaacttcttcgtactattttcccaattgaatttatttatgaaggaaagaagtacaagtttactgtggttcaggctgcatttgacaaatacaacgtctttgtcaacggatgtatgattactgtaagtgtaacccatttgaaggatggcagtttattggtagcacttgatggtaaatcccattctgtctattacttgcaggaagaagtcggaaatactaggttgtcggtggatggtaaatcttgcattttagaagttgagcatgagccaactgaacttcgtactccatctccaggtaaacttatcaaatatcttgtggaacacggtgatcacgtcaaaattggacaaccttacgctgaagttgaagtaatgaagatgtgtatgcctttggtcagtcaggagaatggaactatcaggttattgaagcagccaggatcttcggttgccgctggagacatccttgctattcttgcattggatgatcccagcaaggtgaagcatgctttgccattcgatggtacaatccctgatatgaaacagccatttatccatagcaacaaaccagtttataagttcatttctcttctctccgtgctgaaaaacattttagcagggtatgataatcaagttgtgatgaacgatactctgcagagtctattggatgtgttgaagaaccctgaacttccttattcggaatggaatcattcgatatctgcacttcattcaaggttaccaattcatttggacgaacaattgaccagtttgattgagagatcgcatcaacgtggtgcagactttccagctaagcacttgctcaagcttttggacaaggagcaggctgttaatcctgatccacttttctcccaggtcattgcgcctcttactgctgttgccaaaagctacgaacatggacttgaagttcatgaacacaatgtattcgccgatttgatcacccaatactacgacatagagagcttgtttgccgataaaagggaggaagatgttattttacagctacgtgatgagaacaaatcgtcccttgacaaggtcatcgatgtcgtcttgtcacattccagagttggagctaagaaccatttaatcagagctattctggaaatttatcaaactatctgccaaaatgatctccaagctgcaaccattttgaagaaacctttgaaaaagattgttgagctagattctagatttacagcaaaggtttcgttaaaagctagagagattttgattcaatgttcccttccctctatcaaagaacgttcagaccagctcgagcatatccttcgatcttcagttgtacaaactcagtacggagagagcttcaatggaaactacaaactgcctaacttggacgttatacaagacgtaattgattccaagtacattgtattcgatgttttgacacaatttgttgttagcccaaacaagtatatatttgcagcagcagccgaggtgtatctgcgaagagcttacagggcttactcggtgagagaagttaaacatcatttcgtaggtgattctgctctcccaattgtggaatggaagttccaattgccgctgttatcaacagctgcttacaattccgtgcctgaagctatgagaaactcctccagtaaccgatcctctatttcaatggatagagcagtttctgtctccgatttgaccttcatgatcaacaagaatgattctcaacctttgagaacaggtatcataattcccacaaaccacttagatgacattgaggagtccttgtcatctgccattgatgtcttccctaaacgtccacgtaacaatggaccagctcctgacagaactaatgtggctcctgagcaacctactaacgtatgcaatgttttcattgccaatgtttctggctacaacagtgaggctgagatcgttgacaagattagcagcgttctttctgagttgaaagacgacctcagggctagtggcgttcgaagagttacctttgtcttgggagacaaggttggaacttatccaaaatactataccttcaaatttccagactattttgaagacgagacaatccgtcacatagagcctgctcttgcgttccagctggaactaagaagattgtccaatttcaatattaaacctgttccaactgagaatagaaatattcatgtgtatgaggcagttgccaaaaatacttcatgcattgacaggagattttttactaggggtatcatcagaacaagcagaatcagagaggatgtgactatctctgaataccttatcagcgaagctaatcgtcttatgagtgacattttggacgctcttgagattattgatacctccaacactgatttgaaccatatattcatcaatttctctgctgttttcaatgtcacgccagatgacgttgaagcagcgttcggtggtttcttagaaaggtttggacgtaggctgtggagactacgtgtttctgctgctgaaatccgtattatgtgcacggaccctgagactggtatcccattcccacttcgtgctttaattaacaacgtttcaggatacgttgtgaaatctgaaatgtatcaagaggtgaaaaatgatcatggggaatgggttttcaaaagtcttggtcctacaccaggttcaatgcaccttagaccaatttcaacaccatacccaaccaaagaatggcttcaaccaaaacgttacaaagctcatcttatgggtactacttacgtgtatgatttccctgaattattccgtcaagctacgctctcccaatggaaaaaatactctcctactgcgagagttccttctgatgtgtttgtggccaatgaattgatcgtcgatgattcaggtgaactaactgaagtaagcagagaacccggcgccaacgttgtgggtatggtggccttcaaggtaaccgcaaaaactcctgagtatccacgcggtcgccatttcatcataattgctaatgatatcaccttcaagatcggatcctttggccctcaagaagatgaatatttcaacaaggccacacaacttgcaagaaaattgggcattcctcgaatttatctgtcagccaactcgggtgctagaattggagttgctgaagaacttcttccattattcaaagtagcctggaaggaagaaggtaaaccaagcaagggatttgaatacttatacctcacatcggaagatcttactctattggaaaagtccggaaagtctaacagcgttaccactcaaagaatagttgaagaaggcgaagaacgccacgttataactgccatcattggagctagtgatggactgggtgttgaatgtctaagaggttccggtttgatcgctggtgctacatctcgggcgtacaaggacatcttcactatcacattggtcacctgtagatctgttggtattggtgcttacttggtcagattgggtcaacgagccattcaaattgaaggacaaccaataattttgactggtgcccctgctattaataagttgttgggtagggaagtgtactcttccaacctgcaacttggtggtacccagattatgtacaagaacggtgtttcacacttaaccgccaatgatgatctcgcaggtgtcgaaaagattatggattggttagcttatgtgcctgctaagagaaacatgcctgttcctattttagaatcacttcatgacaaatgggacagagatgtggactataagcctacaagaaatgagccgtacgacgtcagatggatgatcagtggacgtgaaactcctgatggtgagttcgaatctggattgtttgactctgggtccttcactgaaactttgagtggatgggctaaaggtgtagtcgtcggaagagcccgtttaggtggtattcctatgggagtcattggtgttgaaactagagtcacagaaaacctgattccagctgatcccgccaatccagactcaaccgaaatgatgattcaagaagctggtcaagtctggtaccctaacagtgccttcaagactgcacaagctatcaacgatttcaacaatggtgaacagctacccttgatgattttggccaactggagaggtttctctggtggtcaaagagacatgtacaatgaagttttgaaatacggttctttcattgtggatgctttagtcgacttcaagcagcctatcttcacttacattcctcccactgctgagttgagaggtggatcttgggttgttgtagaccctaccatcaatgaagacatgatggaaatgtatgcagacgtcgaatcaagagcaggtgttttggaaccagaaggtatggtaggtatcaaataccgtaaggacaaactccttgctactatggaacgattggatgccaaatatgctgagcttaaatccaaggttagcgatactagtctttcagaaaaggatgtttccgagatcaagaaacaaattgagcagagagagaagcaattgttgccaatttatgcacaaatctctattcaatttgctgatcttcatgacagatctggtcgtatgttggccaagggtgtcattaaaaaggaactggaatgggttaattctcgtcgtttcttcttctggagagtccgtcgtcgtttgaacgaggaatacctcattaagcgtattaccgaattcctatctgcttctgctaccagattggacaagatctcgaggatcaattcttggttgccaacatcgattgatttggaagatgaccagaaggttgccatttggttggaagaaaaccgtaaagctcttgacgccaatatcaaggagctcagggctgagcatgttagaagaactctggctactcttgtcagaactgatatggatactacttccaagagtttggctgaattgatcaaccttcttcctgaaaccgaaaaggaatcaattttatctaagatcaagtcatag

SEQ ID NO: 801 - DNA, 1698 bp, Pichia pastoris
atgtcatttagccctagaattgttccaaccactgccttctcggatcagaagccaggtacttccggtctcagaaagaaggtgacggtctttcagcagccaaattacaccgagaatttcctccaagcaatctttgattccatccccgagggtgcgcaggattcggtccttgtaattggtggcgatggaagatattacaacgatacagtcgttcaattgattgccaagattggcttggccaacggtgtcaaacgtatcattgtaggacagaatggtattctatccactccggctacttcccatattatcaggacgtacaaggatgtcaaacctacaggtggaatcatcctgaccgcttctcataatcctggtggaccaactaatgatctgggaatcaaatacaatctcagtaatggtggtccggcaccagaaactgttactgacaaaatgtttgccaaatcattagccttgacggaatacaagattattgagaatctacccaccattgacctttctaaactgggactcagcaaatgtggaccattggaagttgatattattcattcaacagaggcttatgttgaaatgctaaaggatatttttgatttcccactgatcaagtccttcatcaaacgtagatccccagaggggtttaaggttctgtttgatgcattgaatggtgtaactggtccttatggaaagtcgatcttcattgatgaattaggactgccggagtcttcaattcaaaattgtgttcccaaggctgattttggtgggctgcacccggatccaaaccttacctatgcaaagaccttagttgacagagtagacaaggaaaacatcgcgtttggtgctgcctctgatggtgatggtgacagaaatatgatttatggtgcctctacttttgtatctcctggtgattccgtcgcaatcattgcggagcacgctgaatctattccatatttcaagaaacttggagttcacggcttagcaagatctatgccaacaagtggagctttggatttggttgccaaagcaaagggcctcaatgtctatgaagtccctacaggatggaagtttttctgtgctctttttgatgccaaaaagctgtccatttgtggggaagagagtttcggaactggttctgaccatatcagggaaaaagacggtttatgggccattgttgcatggctgaatgtccttgctgcatttgatgctcagcatccagaaattgaaggaggtgccactattgcattagtccagaaaaacttctgggaaacatatggtagaactttctttaccagatacgattatgaaggatgcgagtcgatcccagccaacaaattgattgaattcctacaagagaaggttgatgatacctcttttgttggttcagagctagctccaggctacacagtcaaggaagctgctaacttctcatacaccgacttggatggttctgtctcatcaaagcaaggtttgtttgttaagtttacttccggcttgagatttattgtcagactgtctggtaccggatcttctggtgccacaattcgtttgtacttggagaaacatacatctgacaaatctaagaactctttatctgcatcagagtttttagccgatgatgtccgttttgtgttgaactttttgcaattccagaagtttgtaggtagagaggagcctgatgttcgtacatga

SEQ ID NO: 802 - DNA, 324 bp, Pichia pastoris
atggctgaggaaaacagattatacgttaagggtaagcacgtgtctttccaacgttccaagagtgttatccacccaaagacttccttgatcaaaattgagggtgtcgaaaactcaaaggatgctgagttctacattggtaagagaatcgcttacgtctacaaaggtgtaaaggctatcaacggtacaaaggtcagagtcatgtggggaacagtcaccagaactcacggaaactctggtgttgtcagagctaagttcgaacgtaaccttccaggtcagagttttggttccactgtcagaatcatgctttacccatctaacatctaa

SEQ ID NO: 803 - DNA, 1251 bp, Pichia pastoris
atgtctctttcaaataaactttcagtcaaagatctcgatgttgccggaaagcgtgtcttcatccgtgtcgacttcaacgttcctctggatggtgacaagatcaccaacaaccagcgtatcgttgctgctttgccaactatccaatatgttttggatcacaagccaaaggtcgtcgttctggcttctcatttaggccgtccaaacggagaggtcaacccaaaattctctttaaaaccagttgctgctgaattgtcctccctactaggtaagaaggtgactttcttgaacgatagtgttggaccagaggttgagaaggctgtcaactctgcctccaatggagaggttattcttttggagaacttgcgtttccacattgaagaagaaggatctcaaaagaaagatggtcaaaagatcaaggccgacaaggaggctgttgccaggttcagaaagcaattgaccgcattggccgatgtctacgttaacgacgccttcggtaccgctcacagagcccactcctccatggttggatttgaattggagcaaagagctgctggtttcttgatggctaaggagttgacatacttcgctaaggccctggaaaaccctgtcagaccattcttggccatccttggtggtgctaaggtttctgacaagattcaattgattgacaatttgctggacaaggtcgattccatcatcattggtggaggaatggctttcacttttatcaaggttttggataacgttgccattggtaactctttgttcgacgaggctggtgccaagttagttcccggcttagttgagaaagccaagaagaacaatgtcaaactggttcttccagtcgacttcgtcactgccgacgccttctccaaggatgcaaaggtcggtgaagccacggttgagtctggtattccagacggattgcaaggattggacgctggtccaaaatccagagaattgttcgcagctaccatcgctgaggctaagacaatcgtctggaacggtcctccaggtgttttcgagtttgacaagtttgctgaaggtaccaagtctatgttggcagctgccatcaagaacgctcagaacggtggaactgtcatcgttggtggtggtgacacggctaccgttgctaagaagttcggtggtgctgacaagctatcccacgtttccactggaggaggagcttctttggaactgttggagggaaaggagcttccaggtgtagtttacttgtccaacaaggcttaa

SEQ ID NO: 804 - DNA, 861 bp, Pichia pastoris
atgagtaaccagtataatccgtatgagcagaaccagtcttacgagctgccctcgtacaaggggggcaacaacgacgattttgtcaagtttatgaacgaaattgctgacatcaacgccaatttggacaactacgaagaactagtgaagattattgagcaaaaacaaacccaactcgtgaatgaagtcaacccagaccaggagaactctttgaaacgacagctagactccctaatcagtgaatcctcctctttgcaattatcgttaaagtccaagattaagaacgctcaacagctggctattggcgactcggctaaggtgggacaagctgagaccagtcgacaacgttttcttcaagctattcaggactaccgtattattgaaagcaactacagagaacagcagcgagtccaagccgaaaggcaatatcgtgtcgttaagcccgatgcctcccctgaagaggtcagagatgctatcgacgacttgggtggccagcaggtgttctcaacggctttgctgaacgctaataggagaggagaggcaaagacggcgcttcaagaagttcaatctcgtcacagagagttgcaaaggttagaaaagactatggctgaacttactcaactgttccatgacatggaggagatggtagttgagcaggatcaacacgttcaagagaccgagaacttggtagacactgcccagcaggacattgaaaaagcagtcggccacaccgataaggccttgactagtgctaaaaaggcacggagaaagaagtgtatctgcttctggatctgtgtccttatcatctgtattcttgcactgatccttggtctgggattcggtgtcggaaactggggaagatag

SEQ ID NO: 805 - DNA, 1035 bp, Pichia pastoris
atgaaccaaatcgaacagagcggacccattgattgcagttccttgaaattggggtcccgaaagtccgctctggctataatccaggcagaaatcgtccgccaattgatattgaaagaataccctgaattggagacgaagttggtcagtgtgtccaccctgggggaccaagtccagaataaagcacttttcacgtttggaggaaaatctttgtggaccaaagaacttgagatgttgttgttggagagtgtgggaggatttgaccaaatagacatgattgtacactcgttgaaagacatgccaactcatttaccagacgaatttgagctgggttgcattattgaaagagaagaccctagagacgctttggtcgtgcaagatggtttatcttacaagtcattggccgaccttccagagggagctgtggtcggtacgtcttcggttagaagatcggctcaactactgaagaatttccctcatctgaaattcaaatctgttagaggaaaccttcagaccagactaagaaaattagatgatccagattccgagtactgctgtctcctccttgcagcagccggtttaatcaggacaggcttacaacacagaatttcaatgtatttgaacgacgatgtgatgtaccactccgtcggacaaggagcattaggagtagagatcagaaaaggtgaccaattcatgaaaaatatctgtgaaaagattgggcatagaaccaccacccttcgttgtcttgcagagagagcactgctgagatatctagagggaggctgctcggtgccaattggggtctccactatttatagcgaggatacgaaggaacttaccatgaactccctagtcgtcagttgtaacggtcgtgactcggtaacagaatcaatgactgaagtcgtgactactgaagagcaagctgaagatttcggtgaaaggctggcccagaagctcatagatcaaggtgcgaaacgcattcttgacgagatcaacttcaacaagatcaaagagattaaggaagagggtttacattaa

SEQ ID NO: 806 - DNA, 792 bp, Pichia pastoris
atgtctgcaagtacttacagttttgaccaagcaatggactttgacatcgttcagtccgtgacgtcgacccaggaccatatccccatggttcttggcgagtcagtgcttcgttcttttgttggaaatgatgccaacaaggctcctgctatcaagcaggaatatgaggccttgccgctaaacgctcaaatcgtcaatcctgagctgacaccatccgtcggaactatttctcctttggagatccatacttccgttttggattctgtattgtcgacagactttactgatgctgacaactcccccatgtttgaatctccagagtctgaagatccaaacaactgggtttcgttgtttgcagatgaaactactcttgctaccactccagccgtttctcgtgcaccagcagcctctgcctctccagtagtcccttcgttgaagaccacctctggagacgagcaacagctgactgttaaacaattcgtcgagtatccttccgctaaggataagctttctcccaagtcagtggagaaaaagatttctttcaagaaggaccacttaggtgttgttggctacactagaagacagcgttcctctcccttggctccaatcgtggtcaaggatgacgatcctgtttctatgaagcgtgcccgtaacacggaagccgctcgtcgttccagggctaagaagatgaagagaatgagtcaactggaagacaaagttgaggagttactgatttgcaagagcgagttggaagctgaggttgagcgtttaaagagtttagtgaaacatcagtga

SEQ ID NO: 807 - DNA, 561 bp, Pichia pastoris
atgggtaaagttcacacatccaagcagcacgttaaaacctcccaccgtaaggctccaaagtctgagaacacctacttgaagtccctggttgagttgtacagctaccttgctcgtcgtactgacgctgagttcaacaagaaggttagaagagctctgaacttctccaagatcaacagacctcctgtttctgttggtaagatctcccaagctctcaagaaggaggagaacgccggaaagatcgttgtcgttgtcggtaccgtcaccgatgacatcactttgttggagttcccacaagccactattgctgctttgagagtcactgctactgccagagctaagatcttgaaggctggtggtgaaattttgaccctagaccaattggctttgaaggctcctcaaggtgagaacaccttgcttttggctggttctagaaccgccagagaggcctgcagacactttggtttcggtcctcatcagaagaaggccccaagaattttgtccaccggaagaaagtttgagaaagctagaggtagaaggcaatcaagagccttcaaggtataa

SEQ ID NO: 808 - DNA, 1155 bp, Pichia pastoris
atggacattgctttggagattctagacacttttgtctttgacaaagtctatgcaaaactactgcccatttctctggtgcaacatttgccagatggctatttgaagactttgggacatttgactggtgccaacaacaccatggaatcactgttcggaatagctccaaacgttgaccaagcgtctaagaaccactggctgagaacagtgaatgactctattgccttagcccgtcccggtgagcgtctggtctacggtgtcaacgctcctttacacttttttgacgaaacagcgtatacatacgcatcgatcttgggacgctccaatatcattcgacaattcacaactttgatgattctgatgattctttttggctggggtttgtatttatctgtggcttcattttcatactactttgtttttgataaagccattttcaatcacccaagatacctcaaaaaccagatgtctctggagatccatcaagcgttgactgctatacctacgatggttttgcttacagttccatggtttttgattgagttgcgtggatactctaaattatactttgatgtaaatgagtctactggaggatggaaggctattatttggcaaattccttgcttcattatgtttaccgattgttgtatctactttattcatcgttggttgcactggccatccgtgtataagcgtttgcacaagcctcaccacaagtggattgtttgtacaccttttgctagtcatgccttccatccagttgatggttatgcacaatcactaccttaccatttgtatggaatgttgtttccactacacaaggtgagctatctgatcttatttgggcttgtgaacttttggactgttatgatccatgatggagaatacctgtccagagaccctatagtcaatggagctgcttgtcatacagtgcatcacctatacttcaactacaattacggccagttcacaacactttgggaccgtcttggtggatcatacagaatgccagacaaggaactctttgataagaacaagaagaaagatgtaaagacatggcgttcacaagtcaagcaggccgattcgataagagaagacttagagggaaaagaagatttccgtgagtatggaactgaggaaaaacttaaaagcacatag

SEQ ID NO: 809 - DNA, 237 bp, Pichia pastoris
atgcctagacaaatcactgatatcaagaagtttgttgagttgactagaagagcagacgtcaagtccgccaccgtcaagaccaactctaaattcaactccaagggtgagaaataccagcagactaagttcaaggttagaggtgctagatatctgtacactctgattgtcgaagatgctgacaaggccaagaagttggtgcaatctttaccaccacaattgaaggttaccaagttgtag

SEQ ID NO: 810 - DNA, 582 bp, Pichia pastoris
atgcctcgtgctccaagaacttactctaagacttactccgtcccaaagaccccatacgactccgctcgtttcgaccaagagctgaaacttgccggtgagtacggtcttaagaacaagaaggaaatttacagaattggattccaactgtccaagattagaagagctgccagagacttgttgaccagagacgagaaggacccaaagagattgttcgagggtaatgctttgatcagaagactggtgagaaccggtatcttgtccgaggagaagagaaagctggattacgttctggctttgaaggtcgaggacttccttgaaagaagattgcaaactcaggttttcaagttgggtttggccaagtctatccaccatgccagagttttgatttctcaaagacacattgctgttggtaagcaaattgttaccattccatctttcatggtcagattggaatctcaaaagcacatcgactttgcttctacttccccatacggtggaggaagagctggtcgtgttaagagaaagaaccaagctaagagctccgagggtggtgccgaggaggaggaagaggatgaagagtaa

SEQ ID NO: 811 - DNA, 936 bp, Pichia pastoris
atgatctttaatcttaaaacactggctgcggttgcaatctccatttcacaagtgtctgcagtttcctctctgggttttgctctcggaaacaagaacgttgacggaacttgtaagtacttggccgactacgaggccgacttggatactattagaggcggctctgaagccgttgctattagagcttattccgctgaagactgtaacactttacaatacctcggtcctgctgttgaagagaagggcttcaaattagttctatcagtcagaccactggatgagagctactaccaggcagaaaagaatgcactaagtgaataccttccccaattatctgtttcgactttgcaatttttgtcagttggatccgaagctttgtacagagacgacttgccagcttcagatctggctgataaaattagagatatgaaggagtttttggctggcttgactgacaagaatggggactcctactcttccgtcccagtcggaaccatcgattcatggaacgtccttgtagacgcctccgctgcaccagctattgaagcatctgatgccgtttacgccaacgctttctcatactggcaaggtcaaggtccttccaactctacctattccttctttgacgatatcatgcaagcattgcaagtaatccagaccatcaagggatctactgatatcgatttctgggttggtgagaccggatggcctaccgacggtgacaactttggtgatgctgttccatctattgagaacgctgacaacttttggaaagaagctatctgcggtatcagaggttggggcattaacacattcgttttccaggcatttgacgaagactggaaggaagaggacgacgctgttgaaaaccacttcggtgtttgggacagttccagacagttaaagctggactcattaggttgcgacttttcttcttga

SEQ ID NO: 812 - DNA, 870 bp, Pichia pastoris
atgtttcgtttaagtgttgccaacattgcccgctctgccggtgcttccacaagaaactatgctactttacgtgaaattgaaatgcgtttaaagtccattaagaacattgagaagatcaccaacaccatgaagattgtggcttctaccagattgaacaaggctcagagagccatggccacttccagagtttaccatgagggagaccaagaagttttcaccactgctgagaccaaggctccagaagatgctgaaaaaacattgttggttgtcgtctcctccgacaagggtctatgtggttctatccactcccaaattgccaagtctgctagattgagactgaaggatcttccaaatgccgatgtcgtaactattggtgacaaaacaaaggtccaattgcttagaacacacccaaataacgtcaagctctctttcaacggtattggtaaggaagcccctactttctacgaggcagctttgattgctgacgagatcaagaagttgggtgactaccagaagattgaggtcttgtataacaaattcgtttccggtgtttctttccttccatctgaattttccgtcttctccactgacgccattaaggcttccgagaagctgtctacttttgaagttgacgaagacgctgaaattccagcaactctttccgagtacggattagccaactccattctatctgcccttgctgacggttatgcttccgaaatttctgccagaagaaatgcgatggacaatgcttccaagaatgctggtgacatgatcaacaagtactccattctgtacaacagaaccagacaagccgtcatcaccaacgagttggtcgacattattaccggtgcttcttcattggattag

SEQ ID NO: 813 - DNA, 279 bp, Pichia pastoris
atgtcatcctttttagacagatggttataccgtatgaggggaacctccaacaccggtagctactactcaacaccgcaattatcaactagaagctcaggatttcctgacgatgatccccagaccactactccgaatctgaggaatactccgagagcatactttcatcctgtgattccaggtgatccacttacggaagaggaaagtttgaagatgaagaagtcctcggtggacagcagaaaatcatcagtcgtcagtgccagttccgaggagaatgaatga

SEQ ID NO: 814 - DNA, 438 bp, Pichia pastoris
atgaatcttccagttaacgcagagagaaagaagagaattctcaagtcctactcatacagaggtattgaccttgaggcccttctcaagttgtccaacgaggagttcggaaagttgtgcacttccagtgtcagaagaagattctccagaggtctaggtgacagagaagaacgtttcctcaagaaactcagagttgtaaagttggccactccaccaaacgagaagccagccgttgtcaagacccatttgagaaagatgatcgttgtcccagagatgattggttctgttgtcggtgtttacaacggtaagattttcaacaccgttgagatcaagccagagatgttgggccactacttgggtgagttctccatgacttacactccagttagacacggtaaggccggtgttggtaacgctgccagatttgccgctctgaaataa

SEQ ID NO: 815 - DNA, 171 bp, Pichia pastoris
atggctcacgaatcagtttggttttcacacccaagaaactacggaaagggttctagacagtgccgtgtctgtgcctctcaccaaggtttaatccgtaagtacggcctgaacatctgccgtcaatgctttagagagagagccaacgacattggattccacaagtaccgttaa

SEQ ID NO: 816 - DNA, 993 bp, Pichia pastoris
atgtccgcctctcaatttatgaaactaccctcattgcagccttcttcggagcagaatgctttacctccgttgagaagtttggctgctggattatttccaacgaggctgatgtctgagaactctttatcaatgcaacacaacagttcagcgttcctggattcgtattcactttctcgggggtcgttgtcaccgcccatgtcgcagggtctagagtccatcggaagacgatctttgccaagtcttccaacgttttcgtttggagacgttcgcaacaactcactaacgtctacgtcgtcccgagcttcttccctcagtggagacgacgttgaatccaccccatcagtgccaaattctccaggatctatacatgcccctgggtcgattagttccttgcggggaaaaaggcgtcagagaagtggaccatcgtgtgatgcttgtcgcgtgaggaaagtcaaatgtgatgcagagataatcatatctgattaccaggacttgagtatagatgagaagctcatgttcgataagaacacacaggataaccagacgtttcagctgagcaacgggttcaccatcctgaagactttggtcaacatcaaatcttcgagggatgagaagtacatcaagtatagatcttgtactgcttgtaacaacagaactttgaaatgctgtttctccaaaggcttcacgaggaacgatattgtcaagtacaacaagttcaaatcggagtcctctgatgaagagtgctccgtcgctaagagggccaaaacagcacaaacaacccctcctccgtcgactaacttcgacagcagcagctcctctttgtctccaaagtcgactcttacggcaccctcgtcggtaactccgccactgctgccagcaagacgatcgtcttgtcttaattgtcgatccaagaagatcaagtgcgcacgactagaagactctgagcgatgtacacattgcgataaaaaggatctgtgttgcagctttgaatga

SEQ ID NO: 817 - DNA, 4971 bp, Pichia pastoris
atgtccagcgatattccaatcgagttcacagaaccccttcagttgaccgatatcggcatccagccccaattcctggattttcgatccacgacgttggaatctgatcgtttcgtgtgtgtcagggaacaaggtgccaatggcaacactgtcagcatcattgacttgcacaacaacaacaatgtgaccaaaaagaacatgacagcggataatgccatcatgcatccatctcagaacgttatttctctgcgtgctaacggaacaaccctacagatcttcaacctggataccaaacagagactaaagtcgttcacgatgtcagaacccgttatattctggaaatggctcaatgagcagactcttggtttggtaactcagaacgcaatttttgagtggaatgtatttgatggcactggggatggtccagttagattggccgataaacatgtctctttaaccaacaaccagatcatcaactatgtatcgaacaaggacaacacttggattgcagtcactggtatcgctcaagaagagggacgcattgtaggccacatccaattgtactcaaaggcaagaaatatctcccaggcaatcgacggtcacgtctgtaatttcgccacattgaaattgagcggtgcctccgtcgacacacaggtatttgtatgtggtaacagaacggccaccggtggtcaattacacgtaattgaaattgaccatcaagagggagctcctgttttccagaagaagaatgtggacattttctttcctgcagatgcagccaatgatttcccagtatccgtccatgtttctcaaaaatacggtatcatctatctgcttacaaagtacggtttcattcacttgtacgatgttgagtcaagcaccagtttgtttgtaaacagaatatcggcagagcctgtatttactgccgcttcatacaacaatggtaccggtatcatcgccatcaacagaagcggccaggtgctaactgttgacctctccagagaatcgttcattccttatattttgaacaagctctctaacattcctttggctctatctcttgcttcaagaagtggacttccaggagctgagaatctttttactcaacaatttaatcagtgcttagcctcaggagactacgacaatgctgccaagattgctgcctcttctgaacaactgagaacttctgagacgatcaaccgtctgaagaacttgcagccagccccaggtcagatctcccctatcttgagttacttttccatcctattggacaagggaaccttaaacaagttcgagtccatcgaattggctaagcccgttctacaacaggataagaagcctctattcgagaaatggttaaaggaagacaagctgcaatcatccgaggagcttggtgacatcgtcaagccttttgataccacacttgccttggctgtctacatgcgtgcacaagttccagttaaggtagtgtcatgccttgctgaaattggccaatttgacaagatcttgccttactgtgaaaaggtcaactatcacccagaatacactatcttgattcaaaatattgttagagtgaatccagacaaagcggctgagtttgccacatccttattgcgacaaactccaggtttagacattgagaaaattgctgatattttcttgtctcaaaactacattcagcaaggtaccgctttccttttggacgcattaaaagatgataaaccagcagagggccatttgcaaacgcggttattggagattaatcttttgcatgctcctcaagtggctgatgctattctggggaacaacatgttttcgcaatatgaccgaccaactattgccgcattggcagaaaaggctggtttgtttcaaagagcattggagcactttgacgatatcaaggacattaagcgagtgattgtgaacactcaagcttttccaaccgactggttagtcaactactttggcaaactcaacgttgaacaatctgtagcatgtttaagagaaatgctctccaagaatattgcacagaacttgcaggttgtgattcaagtggccaccaaatattcagacttgataggaccagtaactttgatcaaggtgtttgaggaatttaagtgcacagaaggtgaatactattatttggcctctattgttaacgtaacgcaagaaccagaagttgtcttcaagtacattgaagccgctgctaagttgggacaagttaaagaaatcgagagagtcaccagagagaataacgtctacaatggtgaaaaagttaagaacttcttgaaagaagctaagttggatgaccagttacctttgatcattgtttgtgatcgttatgactttgttcatgatttggtattgtacctgtacaagaataaatttttcaagtttatcgaagtttatgttcagcaagtcaatccttccaaaacaccacaagtcattgcaggtcttttggatgttgattgtgatgaggccattatacaatccctactacaaacagtaattggccaagttccaattgccccattggtagaggaagtcgaaaagcgaaacagattgaagctgttgcttcctttcttagaacaaactcttcaaggagggtctgctgacaaaaccgtgtacgacactttggccaaaatttacattgactctaacaacaatcctgaaaaattcttgcaggataacgataactacgatacacttgttgttggtaaatattgtgaaaagagagatccataccttgcttacattgcttattctaagggtcaaaatgatgaagaactcatcaaaataacaaatgaaaatgcaatgttcaaataccaagcaagatacttattaagtagatctgaccgtcaattgtggtcagttgttctttctgaagacaacatgtacaggagacaacttatcgaccaagttgttggtactgccattccagaacttgaagatcctgagccagtatcattggctgtcgaggcttttatggacgccgacttgccatctgaactgattgagctgttagaaaagattatcttggagccttcccctttcaacgataacccttccttacaggaactattgattttgaccgccatcaaggctgatcaaacaagagttgattcatacattgaaaagcttgatgactttgatccggaggagattggctctttggccacagaagctggattgtatgaagaggcattcaaggtgtacaacaaatttgaactgtacggtaaggctttgaaggtgctagtggaagatgtcatgtctcttgatagaggtgaagaatatgctgaaaagcttgacaaacctgaactgtggtcgcaattgggtgctgcccagctaaatggtttacgaattccagaggctatcgaatcttatatcaaggctggcgatccttccaactttgagcaagtcattgacattgcggagcatgcaggaaaagaggaggaacttattccattcctaaagatggctagagaaaccttaagagaaccaaaggttgacggcgctatcatcaatgcctatgctaacacagatagattgaacgatattgaacactttttgcaattgtcaaatgctgctgatcttgaatctattggtgacaagttgtacgaaaagcacaactatgaagctgcgaagctgctttattccagtatttctaactacagcaagctggcatctaccttagtttacctgggagattaccaagctgctgtcgattgtgctagaaaggcatccaatgtgaaggtatggaagcaagtcaacgaagcttgtatcgataacaaagaattccgtttggcccagatctgtggtttgaatttgatcattcatgccgaggaacttgacgagcttgttaacaaatacgaatactttggatactttgaccaacttctttcattgtttgaaaacggtctagggttggaacgtgctcatatgggtatgtttactgagcttgctgttttgtacacgaagtattctccagataaaaccatggagcatttgaaattgttttggtctcgtatcaacattccaaaagttttgagagcttgtgaggctgctcatctatggcctgaactgattttcttatactgtcactacgatgagtgggacaacgctgctttgactatcattgaaagatcaagtagtgcatttgaacacagctcattcaaggaggttattgtcaaggtgtcgaacttagaaatctactacaaggctatcaacttttacctgaacgagcatccatcgttgttgacggacttgctatctgttatgattccaagaatcgacttaccaagagtagtaaagttgttccaaaaatcggacaacctcccattagtgaagccgttcttaatctccgtcttggacaaaaataactctattgtgaatcaagcataccacgatttgcttattgaagaagaggattacaagtctttgagatcagtaattgaatccaacgataagtttgatgctctaggactggcagaaagattggagaaacatgaggtaatctttttcagacaaattgcagcagtcctttaccgtaagaacaagaagtggaacaaagctatttccattttgaaaacagataggttgtggagcgacgtcattgaaactgcagccatttctggtagtgagaaggttgcatctgaaacattgcagtacttcgttgagactggtaataaggagtgctttgtagccactttgtatgcctgttatcatctagtcaaccccgactcaattttagaattgagctggcttcatggtttgggtgattacactaagccttatgaaatctccattgccaaaaataatcaggacagaatcaacgagttgtacaaggatctgaagaagaggcagagccaagaaacaaatgctgatgatgaacaggcagggtctcaaagattgttgttaaccaatggtactggcattggtctgcaaccaaccggtactggatttgggggattttag

SEQ ID NO: 818 - DNA, 513 bp, Pichia pastoris
atgtcaagaaattttcaaactgttaagagaggagatagattcccaaccgatgctacaatgttccacattccatcatctgggggtgggccagctcctttcaatttgagagagaccgtgcaaggcaagagatttattgtcgttgccgctccaggtgctttcacgagtacctgtcacgaggaacatctcccaccatacatcaagaacttgccaactttcttgaagaagggaattgacttcatcctggtgatcactgccaacgatgcattcgtattgaactcatggaagaaggctctgggagccgattccgacaagatcatcttcgcttctgacaccaacttggagctggccaacaagttgggactgaccctcgatctgtcagttgctggactgggtcaaagaaccggaagatttgccttaatcgttggaaaagacggtgtggtgcaaaacgtgtttgcagagaagggccctgaggtcaagcattcctccgccgacagggttctagcaaagttgtaa

SEQ ID NO: 819 - DNA, 942 bp, Pichia pastoris
atgcacagaacttactcattgagaaacagcagagccccaactgcttcgcagatcaattcccctgctccaccaccttcgagcaccaagcagaaccgtttcttcggcaagggttcactaagcaacacgttgcgaagacagaccgccggttcttttggaccagagctttcaaagaagttggctcagctggtcaagatggagaagaacgtcatgcgagccatcgaatcatcctcttacgagcgtaaagccgtcgctaagcagctttccctatggggtgctgagaacgacgacgatgtcagtgacattaccgacaagttgggtgttttgatctacgaaatcggagaattggacgaccaattcatcgacagatacgatcaataccgaatcacactcaagggaatccgtgacatcgagggatccgtccagccttctagagaccgtaaactcaagatcaccgaccaaattgcctacttgaagtataaggaccctcaatccccaaagattgtcgtcttggagcaggagttggtgcgtgctgaagccgaatcgctggttgctgaggcccagttgtccaatatcaccagagagaagctgaaggctgccttcaactaccattttgactcaactagagagcattctgagaaattggccctgattgccggctacggtaaggctttgttagagcttttggatgactccccagtcactccaggtgaaactagacctgcctacgacggatacgaatcctctaagcaaatcatcattgacgctgagaacgctcttgcctcatggactttggaaggtgctgctgtcagaccaactctttccatcagacatgtcgagggagaatacgacgacgaggatgttgagggtctcaatgaggacaccgataaccttcacctcactgaggaggaatggcaaaaggagcaacaggttcagaacgcctaa

SEQ ID NO: 820 - DNA, 1614 bp, Pichia pastoris
atgagttcaacagatatccaaggtgatcaaggtgacaatgaaaagatatacgccattgagagcagtccctccaatgagcaaataaaagatattcatgaggctccggccgacaacaaaagtgaactagacatcccagtcaaacccaagggttcctatatcttggtgtctgtgttatgtcttctagtcgcattcggtggtttcgtgttcggttgggataccggtaccatctcaggtttcgttaacatgtctgactttacgagacgtttcggacagtttaacggtgaaacgtattacctttctaaagtgagagttggtttaattgtttctattttcaacattggttgtgctatcggaggtgtcactctaggtaaacttggtgacatttggggtagaaagaaggctttgatgttcgtcatggtcatctatatggtcggtattttgattcaaattgcttccattgacaaatggtaccagtatttcattggaagaattattgcaggtctggccgtcggtgcagtttccgttttatcccccatgttcatcagtgagacttctcctaaacacatcagaggttccttagtctcctgctaccaattaatgattacagccggtattttcttgggttactgtaccacttacggaaccaagacttacaccgactccacccaatggagagttcctttgggattgtgtttcgcttgggccattctgatgattgttggtatgaccttcatgccagagtccccacgtttcttggttgaggttaacagagtcgacgaggctatgaagtccattgccagagttaacaaggtctctatcgacgatccatctgtctacaatgagatgagacttatttctgacggtattgagaaggagaaggaggctggtagcgtttcttggggtgaactgttcactggtaagccaaagattttctaccgtctattgattggtattttcatgcaatctttgcaacaattgaccggtaacaactatttcttctactacggaactaccattttcaaggctgtcggattggacgattctttccaaacttctatcattcttggtgttgtcaattttgcttccacattcctaggtatctacaccatggataaatttggtagaagaagaacacttttaggaggttctggagccatggttgtttgtttggtcattttcagttccgttggtgtcaagtctctttatgagaacggtaaggatgatccatccaaaccagcaggtaacgccatgattgtcttcacctgtctgttcattttcttctttgcatgtacctgggctccaggtgttttcgtcgttgtgtctgaaacctacccacttagaattagatccaagggtatggccatcgctcaaggttccaattggctttggggtttcctcattgccttcttcactccatttatctcaggtgccattgatttcgcctacggttacgtctttatgggatgtactctgttcgccttcttctttgtgtacttcttcgttcctgaaaccaagggtctgtcgctggaagacgttgatgaagtctatgagaaccttaccttcggaagagcatatgcatacagccacacgattaaagacaagggcgccctataa

SEQ ID NO: 821 - DNA, 408 bp, Pichia pastoris
atgcaattctctatcgtcgctactttggctcttgctggttccgctctggctgcttactctaacgtaacttacacttacgagactaccatcaccgatgttgtcaccgagctcaccacttactgcccagagccaaccaccttcgttcacaagaacaagaccatcactgtgaccgccccaaccactttgaccatcactgactgtccttgcaccatctccaagaccaccaagatcaccactgatgttccaccaaccacccactccaccccacacaccaccaccactcacgtgccatctacctctaccccagctccaacccactctgtttctaccatctctcacggtggtgctgctaaggctggtgttgctggtttggccggtgttgctgctgccgctgcttacttcttgtaa

SEQ ID NO: 822 - DNA, 792 bp, Pichia pastoris
atgtctcaagcaccagcatcagctcaacaaggatcagccccacaaggccaaagacaatttggtggcgcccgtggaggtagaagaggaccaaagagaggaccaagaagaggtgaggaagagaagggttggaccccagtcaccaagcttggtagattggtaaaggccggtaagatcacctccatcgaggagatttacttgcactctctcccagtcaaggaatttcaaatcatcgaccacttattgcctgacttgaaggatgaggtcatgaagatcaagcctgttcaaaagcaaaccagtgccggtcaaagaaccagattcaaggctgttgtcgttattggtgactccaacggtcacgttggtttgggtatcaagactgccaaggaagttgctaccgctattagagccgctatcatcatcgctaagctgtctatcattccagtcagaagaggttactggggttccaacttgggtgcccctcactctttggcttctaagacctctggtaagtgtggttccgttttggtcagaatcattcctgccccaagaggttccggtattgttgcctctccagccgttaagaagatgatgcaactggccggtgttgaagatgtttacacttcctccggtggttccaccagaactttggagaacactttgaaagctgccttcattgccattggtaacacttacggtttcttgaccccaactttgtgggacgactacgagttgtccgagtctcctctcgacgtttacgccgacgaggcctctgcttcttacagaaagagatattaa

SEQ ID NO: 823 - DNA, 513 bp, Pichia pastoris
atggttcaagtaggtgacaaattcccaacggatgtggcattaacgtatattccatggactcctgaaaattctggagtcttagcttgtgctattccaatcccatacgacttatcgaagaaattgccaggtaggaccgtagtaattgtttctgccccaggtgcatttacccctacttgtacggctaatcacattcctgttttcattgagaaaatcgacgaattcaaaaagaaaggcgtagacgatgtggtcgttattaccactgacactccttttgccaatgctgcttggggtaaagccttaggtgccaaagacgagatcatctttgcaaatgaccccttggccgctctgtcgaaagagttgggctatctaaagagcgaggtacctgcttcttttgggattcgtggtgccagatatgccgtcgttgtcaaggacggtgttgtttcttattttggtgttgaaacaagctcaggcgtgactgtcagtggtgctgatgcggttttggaagctctatag

SEQ ID NO: 824 - DNA, 972 bp, Pichia pastoris
atgaccttgacgattaacccgagtttaaagaacgtcttagaaaaccagaagggcggcgcacctgtggagaatgatcttaaggcgctgagaaagcatgctgacaagatagaggaacactactacaaagaggtgataaccaaaccatctgacgttgcaggcatgcaatttactatcactgctcatgacggagatcaaattgagtgccgtttctactctaaagatgctgatcctaaccaagtaaggaccagtaagctaccgtgcattattcacttccatgggggtggatacataaccggtgacgttagccgttacagtcatttgacctctcaatatgtctcagcgactggcgtacctgttctgagtgtggactatagactggctccagaatatccagctccaattcctcaagaagatggctttagtgcgctacagtacctttatgaacattgtgataacctaatgattgatcccaacaagattattctaatgggagattcatcaggcgctgggttggctttatctgtggctgcattggcagcagaaaggggcattccaatagccaagcagattctcatttatccaatgttggactcaaacaataccgaagaacccgattctgaagaccttaaggagaaaaaaccttatctaacatggactcatagaatgaacaagctggcctttgattctcttctatcagaaaaagaagaatatgagccatcattattcccattcaacgatcctaatgttgattggtccaaatttcccaaaacttatttggaaaccgtgacagttgacatcttaaacgatgacggccggcagctgcatagaaatttgactgagaacaatgtacaagttgaatttcatgagtgggaaggactttgccatggcttcgaacctcttctttggaccgaggaaaatgatctacttcaaaacattttagagaagcgttaccaagcaatcctggatgtatag

SEQ ID NO: 825 - DNA, 735 bp, Pichia pastoris
atgcctcagaagaccaccagcaagtatttgctgatgataccaatattcaatcgactagctttcgggcagtgttgtcgttttgttaaccatctttcgggactgaaattggacgaggagaagaaggccatcatttccgagagaactgccaagtactacgaggagtatgaggaagctgctcgtgttctggagaaggctaagagcgacgctgctgcctctggttcatactttgtcgaggctgagccaaacttggtccttgttgttagaatcaagggtatcaacaagattgctccaaagccaagaaaggttttgcagttgttgagacttttgcaaatcaacgccgctgttttcgttagaatcactaaggccactgctgagcttttgagattggttgagccatacgtcgcttatggttacccatctctggagactgttagggagttgatctacaagagaggatacggtaagcttaacaaacaaagagttcctttgaccgacaacgatatcatcgagaaggttttaggtcaatacggtatcatctccattgaggatttgatccacgagatctacaccgttggcccaaacttcaagcaagccaacaacttcttgtatccattcagactctccaacccagacggtggatggggtgtcagaagaaagttcttccactacattcaaggtggtgctactggtaacagagaagagcacatcaacagcttggtcaagaagatgaactaa

SEQ ID NO: 826 - DNA, 444 bp, Pichia pastoris
atgagtttaagtacttttaacgccgaagaagctgaaaatttggacgatattgagaagcaatttgctgtcaaggcagtgacacaagctgaaacttactggaatcttctcaccaaaattcctggcacaaaactcaagcttactccttacgatgatgagatttttgaggctttattgaaggactttccagagtttgaaaatccagaatatgccagcaagatcaatgaggacgaaatgaaatctctgagcggtaaagagagatggagaaagttcatgaaaccttttgaagaaaagatcgacgacttcaattttggaaccttgctcagaactgacagttccaaagagtacgaccaagaaggaactattttcgtagtccgtctacagttctacgccatcgagatagctcgtaacaagtacggactcaacgattggatatcccaaaaataa

SEQ ID NO: 827 - DNA, 1488 bp, Pichia pastoris
atggagcaaccacaagcaatggaaaaggttgagtctgtcgacgttacagaggcaaacgcagttgctgctggaaccaacaaactcaccaagagaattgtagctgctggtctgggaggtaagttgatgggtaccaagtcaatggtcgacgtcacagccgatcaactggctaaggactctatcaacgagcttttggccagagacaaggctttgaaggagaagtacgagaagcagaaacatatcagtgaacaaccatggactaaggacaattggcaccaacacataaattggttgaacatgatcttggtttgcggtttgcccctgtttggagctattgcaacgtattacaaaccacctaccaaggagaccgttatactgggagttgttttgtacattctcggtggtctgtcaattacagctggttaccacagactgtggtctcatagagcctattcggctagaactccgttaaaggttttatttgccctctttggagccggagctgtggagggttccatcaaatggtggtctcactctcacagagttcatcacagatacacagacactcatagggacccatatgatgccagaaagggattctggtactcccacatgggttggatgttaaccaagccaaacccaagatacaaggcaagagccgatatctcagacctcgctgatgactggattgtcagatttcaacacagacactacctgttaattatgactttcatggcccttattttgcccactattattgccaagtatttctgggacgacgcatggggtggatttatctacggtggtatcttcaaagttttcgtcattcaacaagccactttctgtgttaactctcttgctcactggattggtgttcaaccgttcgatgacaggaggacaccaagagatcactttttgactgctatcgtcaccttcggtgagggataccacaacttccaccacgagttcccatcagattacagaaacgctctgaagtggtaccaatacgatccaacaaagattgtcatttacttatcatctaaggttggattgtcttacaatttgaagactttttctgacaatgccatcaaacagggtttggtgcaacaacagcagaagaagctggactccatgagggctcatcttaactggggtactccattacaagacttgccagtctgggataagtctgagttcttcgagaagtctaaagataagaaaggtttggtcattatttctggtattgttcataacgttgagaatttcattggtgaacatccaggtggagagaaacttgtcaagggtgccctgggcaaggatgctactactgctttcaatggaggtgtttatgcgcactccaatgcggcccacaacttattagccactatgagagtggctgtcataagggatggtaacgccaatgcaaacactttctccttgcagaacgagtttttggacaagaaagccgccgctgcagctgcttcaaattaa

SEQ ID NO: 828 - DNA, 1626 bp, Pichia pastoris
atgtcagaaaagtactcaagacctgctcagcctccgccaacgtataaccagccgggtggtggacaatcaccgtttaacgagccttattatccgcagcaaggtgtcaactcatctgactaccatcaacagcaacgaccagattatgaccctgaatcgcaatttcctccagagaaaattgtgggatctggcaaacctgataatgctgaaacgtttgatgactccttcaaggtgaaaaacaaactcaatgactggccatttactattctcttcattgctactttagcaggctttgtcgtcgttgctggaattgttctctcagcttgggccagtaactattccaccagtggtagtggtatttatgatagcggtgcatcattcactttgaatacaaatactgtggtcttgtttgcatttgttattgtaatttctctagtccttgctgtgttgatgctgtgttttgcaagaattgctcctaaaagatttatacaagttggaattgtgctaaatgtggtattaggtcttgcctcttccatttattatttagccgtgggctactattcggctggtgtcgttttcttggtgtttaccctgattagcgcctactgctattggtcaatgagaggtcgtattccatttagtgcaacggtgctcactattgtcattgatgttatgaagagaaatccttctactttgatgacctcattgattggaattatagtttctggtgcctttgcagctctgttcagtgctactgttgtagcaacttacatgaaatggactcccagtgatgaaaatggaaactgttccttcaacgagggttcaacttcgtgttctcgttcgaaagtaattggaattttagtgttcgtctttttcgcaggttactatattacggaagtgattgggaacgttatccatgtaaccattagcggagtgtacggatcatggtactatctttcacgttctgaccaaggaatgcctagatttcccgcattgggagctttcaaaagagctatgacctggtcttttggatcgatttgttttggttccctaattgttgcgctactgcagttattgaaaactataatccaaattttgaaaaacgatgccatgcaaaatggtgagggatggcaaacaattatcctgtgttgcgcagattgcattttaggacttattgaatgggctgtacgttacttcaaccattacgcatactcatttgttgcactttacggagagagttacatgaagtctgctagagccacatgggatctattcagagccaaagggttggatgccctggttaacgattgtttgatcggtgcagggttatcattttttgccttgtttgtttcttacctttcggccctattttcttacctgtacctgagatataccgctcctggatacaactcagatggttccttctatgcaccagttattgcattcacctttgtaatcgctttgcaaattgtcaacattgcatcgtccgttatcagatcgggaactgcaactttctttgtttgcttagctagagatcccgaagtgttccagatttcatatccagacgagttttcacgcatttttgccgattatcctcaggtgatgaacaaagtcgcagctagacagtag

SEQ ID NO: 829 - DNA, 447 bp, Pichia pastoris
atgcaattcaaaagtttgatcggtgcaactctcgcattaagcgttgttaaggctacaactgagttggagccaatcttcacaaatgatgtcaatgtcacagtccccacggtgccaccagagatcacttcaacccctgatgttagtgttcctggaaacttgaccgaaactggaggactcacaaacaccacaggaacaggaggatttactaataccactgcaactggcacaggaggtttcactaataccactgcaacaggcacgggcacaggcacaggcactggaaccggaaccggcacaggcacaggcacaggcacaggaactggcactggaaccggtactggtactggtaccactggcacaggtacagaaactggtaacggtgcccaagcggtactaggtagttcagtcttagccgcagctggtctcttcgtcgctatgttaatttga

SEQ ID NO: 830 - DNA, 405 bp, Pichia pastoris
atgtctacagagaaccaagagattaaggagcaaattgacgctaccaaccaagagattgttaacaacgctcaggaggccgcagagcctgccacagaagccgttgctgaatccagcacccaggccgaagcaaccggtgaggtgacctctgagcacgccaagtctttgaaggaaaagactgaggagtttttggaccactccaagaaggaagttgaacacgcctttgagaccgccaaggagaaggctgatgagctagtcaagggagccaaggccaagaagaccgaggctgctgagagcaacgctgaaacttctgaggctgccaccgagtctgctgacaaggtagaggagaagggtatcaagaaatactttaccaagttcaagaacgtgatcaagaaggttgctaactga

SEQ ID NO: 831 - DNA, 1005 bp, Pichia pastoris
atgttgtccacaattgccaagcgtcaattctcctcctctgcctctactgcctacaaggttgccgttcttggtgccgctggtggaattggtcagcctttgtcgttgctgatgaagttgaaccacaaggttactgacttagccctgtatgacatccgtttggctccaggtgtagccgctgatgtatcccacatcccaaccaactccaccgtcaccggttacactcctgaagataatggtttggaaaagacactgacgggagctgatctggtcatcattccagctggtgtcccaagaaagccaggtatgaccagagacgatctgttcaacaccaatgcttctattgtcagagatttggccaaagctgttggtgactacagtcctagtgctgcggttgctattatttctaacccagttaactccactgttccaattgttgctgaggtcttgaagtccaagggtgtctacaacccaaagaagctattcggtgtcaccactttggatgttctgagagcctctcgtttcttgtctcaagtgcaaggtaccaacccagccagtgagccagtcactgttgttggtggtcactcaggtgtcactattgttcctctgctgtctcaatctaagcacaaggacttgccaaaggacacttacgacgctctggtccaccgtatccaatttggtggtgatgaggttgtcaaggccaaagatggtgctggatctgctacgctgtctatggctcaggccggtgctagatttgccagctccgtgttgaacggtttggccggtgagaatgatgtcgttgagccatctttcgtcgactctccattgttcaaggatgagggtattgaattcttctcctccaaggttactttgggtccagagggtgtcaagaccatccatggtttgggagaattgtctgctgctgaagaggagatgatcacaactgccaaggagactttggccaagaacatcgctaagggtcaagagtttgttaagcaaaacccataa

SEQ ID NO: 832 - DNA, 1341 bp, Pichia pastoris
atgtctgacaatgcaaacgaaaccagtagtagcctgttagacaacgtttatctggactcatcagatctgcttattgccagatatgacaagtggattttggcattggccttttttgagaacttctttgcccgttacgacagcattctcagtagtactgctaaggattacggcaagcttgtgaagcatttttccactgacactttacctcaatttgaagtgagccccagctccaatattgcaggagctgtttacggatctgtcaactctgaggcagatccgaacaagaatgtcactggtgtcaactcgttcatagaattactcaagtttaggtccagtgaagatcagggaaaaatagctggattagagacttcgattagagagcaaattattcctgagttcaagaaatactcggctgatttatccgctaagaagaaggatctgacggcagatgccagtaagcagcggaaagaattgaagaaactgggcttgcatttgtctagttcaatttcaaaacttcagcactcaactcaggtgttcgagtctgcctcgggaactggaaagatggactacaagaacgatccatacatgttgaagagagccgtatccctccatggcactgaattgatcgccaaagagcacaatcatatggattttttgaaacgtgaagaactatccttgatgaccctggaaaaaagaactctagaatttattcaattgatctttgctgatgtttccaaccgtatcactgcggcagattccgttttctctcgtagtttcgactccctgagtaagacattgtccagtattgatcttgagtacgaatggaaacaattttctgaggtcaataaacagagactggttaccgtggaaggtaatgatgatataagtggtgctaatatcagtgctgataacaagaagcggggtttgtccgacctgtcatttcccaatgatcatcaccctgccactgaacccattttggaaggcatactgcagaggaaggaaggtaaggtcaacaagaagtacgtctccgaatactacgtcatcactaaaaccagatacttgtatgagtttgagtccaacgctcctaagaattctacgcaacctaatacggtactttatttacctgaatgtactctgaagtcccttaatggaccagataatagcaagttcaagattgaaatctcagggaaagatgcaactcaggcattcagtgtaatcaagtcaacactgatcctcaagacctctacctatgatgagatgaggacctggttcaatgtccttagcgaggtaagtgggttaatgcagacccaagaagaatctcgtcttgatagtcctaattaa

SEQ ID NO: 833 - DNA, 1515 bp, Pichia pastoris
atgaccgatacgaaagccgtagaatttgtgggccacacagccattgtagtctttggagcttcaggggacctggctaagaagaagactttccctgccctcttcggactttaccgtgagggatacctgtccaacaaggtgaagattattggctatgctagatcaaagctggatgacaaggagttcaaggatagaattgtgggctatttcaagacaaagaacaagggcgacgaggacaaagttcaagaattcttaaagttgtgctcatatatttcagctccttatgacaaaccagatgggtatgaaaagttgaatgaaactattaacgaattcgaaaaggaaaacaacgtcgaacagtctcacaggttgttctacttagctttgcccccttctgttttcatacctgttgctacggaggtcaagaagtatgttcatccaggttctaaagggattgctcggattatcgtggaaaaacctttcgggcacgacttgcagtcagcagaagagcttttgaatgctttgaagccgatctggaaagaagaggaattgtttagaatcgaccactatctaggtaaggagatggttaagaatttgttggccttccgttttggaaacgcattcatcaatgcttcttgggacaacagacatatcagctgtatccaaatctcgttcaaggagccttttggaacagaaggtcgtggtggctattttgactcaattggtataataagagacgtcattcagaaccacttgcttcaagtgttaaccctcttaaccatggagagacccgtctctaatgaccctgaggctgttagagatgaaaaggttcgcattctgaagtcaatttctgagctagatttgaacgacgttttggtgggtcaatacggcaaatctgaggatggaaagaagccagcttatgtggatgatgaaactgttaagccaggttctaaatgtgtcacatttgcagccattggcttgcacatcaacacagaaaggtgggaaggtgtcccaatcattttaagagctggtaaggctttgaacgaaggtaaagttgagattagagtgcaatacaaacagtctactggatttctcaatgatattcagcgaaatgaattggtcatccgtgtgcagcctaacgaagccatgtacatgaaactgaactccaaagtcccaggtgtttcccaaaagactactgtcactgagctagacctcacttacaaagaccgttacgaaaacttttacattccagaggcatatgaatcacttatcagagatgctatgaagggagatcactctaattttgtcagagatgacgagttgatacaaagttggaagattttcactcctttactgtatcacttggagggccctgatgcaccggctccagaaatctatccctacggatccagaggtccagcttcattgaccaaattcttgcaagatcatgattacttctttgaatcacgcgacaattaccaatggccagtgacaagacccgatgtgctgcacaagatgtaa

SEQ ID NO: 834 - DNA, 1083 bp, Pichia pastoris
atgtctgtgatgaaagccctcgtgtacggtggtaagaacgtcttcgcctggaaaaacttccctaaaccaactatcttgcacccaacagatgtcatcgttaagacggtggctactaccatctgcggaacagacttgcacatcttgaaaggtgatgttccagaggtcaaacctgaaaccgtcttgggtcatgaagcaattggagtcgtcgaatctatcggtgataacgtcaaaaacttcagcattggtgataaggtgctggtttcatgcatcaccagttgtggaagctgttactactgtaagagaaacttgcagagtcattgcaagaccggtggatggaaattaggtcacgatttgaacggtacgcaggctgagtttgtccgtatcccatatggagacttctcattgcaccgtattcctcatgaagcagatgaaaaggcagttctgatgctgtctgacatcttacctactgcttacgaagttggtgttcttgccggaaatgtccaaaagggagactcagttgccattgtcggcgccggtccagttggtcttgccgctctgctgactgtcaaagcctttgagccttctgaaattattatgattgacactaacgatgaaagactgagtgcctccttgaaattgggagccaccaaggcagtcaacccaaccaaggtcagcagtgtcaaagatgctgtttatgatattgtcaatgccactgtccgcgtcaaggagaacgacctggagccaggtgtcgatgttgccattgagtgtgttggtgttcctgacacgtttgcaacttgtgaagagattatcgccccaggtggccgtattgccaatgttggtgttcacggcactaaagtggatttacaactgcaagacctatggatcaagaacattgctatcaccaccggtttggtagccacatactccactaaagacctgttgaagcgagtctctgacaagtctctagaccctacaccactggttacacatgagttcaagttcagtgaatttgagaaggcctatgagacttctcaaaatgctgccaccaccaaagccatcaagattttcttatctgccgattaa

SEQ ID NO: 835 - DNA, 2475 bp, Pichia pastoris
atgttgaaagcacgtactgtcaagcctaaccaactgagactaaatgcgttgagggcaaaagttcctaggatactgttggcctcatcgctatcgacattgagtcttcggacaagctccaacacattagctgttagaccggttcaaccgaagattccctttgccagacataatgtgaatcatttacgactaagaactccgatgtccattaggtttgccagtagcggcggcccacaaataaatatgaatggacagcaggaggaagaattgcctgctctacaaaaatatggtgtcaatttgactcaattggccaaagatggaaagcttgatcctgttatcgggagggatgaagagattcgtcgtacgattcaaattttgtctcgtaggactaagaacaacccagctttgataggaaatgctggtacaggtaaaactgccatcatggaaggacttgctcagagaattatcaaaggagaggtccctgaaagtatgaaggataaagaagttgtcgcccttgatcttggatcattgatttcaggtgccaagtttagaggtgaatttgaagagcgtttgaaagctgtattgaaagagctggacgaggcccatggcaacattatcctgtttatcgacgaactacacatactattggggctaggtaaagcagaaggttcaattgatgcatcaaacttgttgaaacccgctctggctagaggccaattgcaatgttgtggagcaacaacaattgaggaatacagaaaatacattgaaaaagatgctgcattagcaagaagattccaaagtgttttggttaatgagccatccgtacaagatgctattagcatactaagaggattgaaagaaaaatatgagattcatcatggtgttcgtataactgactcggcactggtcaccgccgccgtgtattctaatcgttatatcacagacagattcttgcctgataaggccattgatttagttgatgaagcatgctccgccttgcgtttacaacatgagtctaagcccgatgttatccaacaattggatcgccaaatcatgaccatccagattgaattggaatctttgagaaaagaaactgacccgatttccgtagaaagaagagataagctagatgaacagctgaaacttaaaaaggaagaactggaaaggttgactcaggtctgggaagatgaaaagaatagcttggagaagatcaagactgccaaggaagaactcgaacaatcgaaactagagttagaaagggcacaaagggaaggtgattttggaaaggcatccatgctaaggtattccaagattccagaacttgagcaaaaagtttctgctactgctcaaagagtcaaagaaggagagtctgaaacgaccaccaatttacttcatgaatcagttacttcagatgacattgcttgggttgtttcaaaaatgacgggtgttccggttcaatcattgatgaaaggtgagaaggacaagctgttatacatggaggaatccatcaagtctagagttataggtcaggatgaagcaattcattcagttgccgatgcagtcagacttcaaagagctggtcttacaaacgaaaaaagacctattgcaagctttatgtttttgggtcctactggtactggtaagactgaactcactaagtccctggcagaatttttattcaacgacgagaatgctgtggtgaggtttgacatgtctgaatttcaggagagacactctttgtcgagactgataggagctccaccttcatacgtaggttttgaagaaggaggtgaactaacagaagctgtcagacgtaaaccatatgcagttgtcttatttgatgaatttgaaaaggcacatcgggacatttccaaactgatgcttcagattctcgatgaaggtaacttgacagattctcagggacacaagattgactttaaaaatactatcattatcatgacatccaatcttggccaagatttattattggctgacacagaacttgaaaatgtcggtggaaaagttagtgagaagactaagaatgaagtcatacaggtaatgaaacagaactacccacctgagtttatcaatagactggatgacgttttggtcttcaatagactctcgagagagtccttgagaaagattgttgacatcagattgagtgaagtccaagacagattggttgatagaagaattgagctcaagctcacagacgctgccaaggaatggctcacagagaagggatatgacccattgtatggtgctagacctttgaacagagtcattaagaagcagctgctgaaccctctttccattagattgattcaaggagagattaccaataactcaactgtcaaggttgaccttgttgatggtgatttacagatcacaagtgagaagaatgaagctgaggcagagactgtccgtaaggaggatggcgatgagcctgctgaatatgaaattattaaggactaa

SEQ ID NO: 836 - DNA, 360 bp, Pichia pastoris
atgcctaaaaagagagcttccaacggtagaaacaagaagggtagaggacacgttaagtttgtcagatgtttgaactgtgccagatgtgttcctaaggacaaggccattaagcgtgtcaccatcagaaacatggttgaggctgctgccgtcagagatttgtctgaggcctctgtttacgaggagtatgctcttccaaagctttacaacaagctgcactactgtgtttcctgtgctatccacactagaattgtcagagtcagatccagaagtgacagaagaatcagagctcctcctcaaagacaaagattcagcaatgacagaagagtcaacccagctgaagctgccaagaaggctttgtag

SEQ ID NO: 837 - DNA, 366 bp, Pichia pastoris
atgttcagaacagcagctagttctatcggtcgccgtggtttcaccactgtcaagggtgacccagctaaagctcaagctttcaagaagcacttggacgatgtctatcaccactccaagggaaccactgcattgtggaagaagatctcttacttcgttgcccttcctgccattgccctaactgccgtaaacacctacttcgttgaagctgagcacgctgagcatagagcccacaaccgccacttatctgatgaagaatggccaaaagcgtatccataccagaatgtcagaagagttgacttcttctggggtgacggagacaaaactcttttctggaacccagatgtcaacagacacgtcaaagagtaa

SEQ ID NO: 838 - DNA, 597 bp, Pichia pastoris
atggggttattggacttggagcagcaattggccttttatagggcatatcatttcaataaggtgaatgtagcaattcacttggtatttgtaccaaccattctcttcagcactgtggggttcttatctgccattcctttgaatcaaatcaccccatttgatttatcaggagtaccattttttggaaagttgtataacttgggtgcctttttgattgcgtcctttagcatctactacatcttgttggaccgactgggacttgtattgaccccccttttgcttttgataagctactccatcagcactctgtatgatttttatgataaaagtgaggtggtaaagggctctctggttctttttggcattggatgggctgttcaattcgtaggtcatgctctatttgaaagaagagctccggcgttgttcgacaacctggttcaggctttggtcctggctccatacttcgtcgcatttgaagttgtgtttgctcttgggttcaggaaggatctccagaaaaagatgaataaccacgcaggtaagctgatgcttgaatttcgaactagggagaagggtcaccctgtcgtcgaaaagaccgactga

SEQ ID NO: 839 - DNA, 636 bp, Pichia pastoris
atgtccttctccgatttctctaaagttgaaactatcagcgaattgaacgatttattggctgacaagtcttacatcgatggtacttctccaactcaaattgatgtagtcgtctacaaggctttccaaaagcaagctccaaactttgctagatggttcaaccacatcgcttctttcactgacgagttcgacacattgccagaaggcaacgctccagcagctgctgttgctgctgagcttgctgaagaagaggaagacgttgacttcttcggttccgacgatgaagaagaggatgaggctgctgaaaagctgaagcaagaaagattggctgcttacgctgctaagaaggctgctaagggacctggcccagctgccaagtctttggttactttggacgtcaagccatgggatgacgaaaccaacatgcaagatttgttggacaacgtcaaggccatcaaatgggacggtctggtctggggtgctcacacattcgtacctgtcggatttggtatcaagaagctgcaaatcaaccttgttgttgaggacgaaaaggtctctcttgctgacttgcaacagttgattgaggaggatgaggaccacgtccaatccaccgatattgctgccatgtctaaattgtaa

SEQ ID NO: 840 - DNA, 399 bp, Pichia pastoris
atggcaccaaaagcagagaagaaaccagcctctaaggccccagctgagaagaagcctactgccggaaagaagacttcttcttcttccgaaccaaagaagagatctaaggttagaaaggagtcttacgcttcctacatctacaaggttttgaagcagactcaccctgacaccggtatctctcagaaggccatgtctatcatgaactctttcgtcaacgacatcttcgagagaattgcttctgaagcttccaagttggcttcttacaacaagaagtctaccatctctgcaagagagatccagaccgctgttagactgattcttccaggtgaattgtctaagcacgccgtctctgaaggtactcgtgccgttaccaaatacacctcatcaacccaggcttaa

SEQ ID NO: 841 - DNA, 393 bp, Pichia pastoris
atgtccggtggtaaaggaaaagcatcttcggctgaaaaggcctcaacctcaagatcttctaaggcaggtttgaccttccctgtgggaagagtccaccgtcttctgagaagaggtaactacgcccaaagaattggttctggtgctccagtctatttgactgctgtcttggagtacttggctgctgaaattttggaattggccggtaacgccgccagagacaacaagaagtccagaattatcccaagacacttgcaattggccatcagaaacgatgaggaattgaacaagttgctgggacacgtcaccatcgcccaaggtggtgtcttgccaaacattcaatccgaattgttgccaaagaagtctgccaaggccaaggcttctcaggaattgtaa

SEQ ID NO: 842 - DNA, 1002 bp, Pichia pastoris
atggctatcactgtcggtattaacggtttcggacgtattggacgtctcgttctgagagtcgctctttccagagctgacatcaaggttgttgctatcaacgacccattcattgctccagaatacgctgcttacatgttcaagtacgactctacccacaaggcttacaagggtgaggtttctgccagcggcaacaagatcaacattgacggtaacgaaatcaccgttttccaagagagagaccctgtcaacatcccatggggtaaggctggtgtcgactacgtcattgagtccaccggtgttttcaccactttggagggtgcccaaaagcacatcgacgccggtgccaagaaggtcgtcatcactgctccatccaaggatgctccaatgttcgttgtcggtgtcaacgaggagaaatacacttctgacttgaacattgtctccaatgcttcttgtactaccaactgtttggctccattggccaaggttgtcaacgacactttcggaattgagtccggtttgatgaccaccgtccactccatgaccgccactcaaaagaccgttgacggtccatcccacaaggactggagaggtggtagaaccgcttctggtaacatcattccatcttccactggtgctgctaaggccgtcggtaaggttattccagaattgaacggtaagctgaccggtttggctttccgtgtcccaaccgtcgatgtctccgttgttgacttgaccgtcaacttgaagaaggagactacctacgaggagatcaagtctgttatcaaggctgcttccgagggtaagctcaagggtgttttgggttacactgaagatgccgttgtctcttctgacttcttgggtgacgagagatcctccatcttcgacgcttctgccggtattcaattgactccatctttcgtcaagctgatctcttggtacgacaacgagtacggttactccaccagagtcgtcgacttgttgcaacacgttgctaaggcttaa

SEQ ID NO: 843 - DNA, 1245 bp, Pichia pastoris
atgaacttgtacctaattacattactattcgccagtctatgcagcgcaattactctcccaaagagagatataatctgggattactccagtgaaaaaatcatgggtgtcaacctcggtggatggctggttttggagccctatatcaccccttcgctttttgaagctttcggcgatgatgtaccagtagatgaatatcgttacactgaacgactaggtaaatcgctggctttggatagacttcaacagcattggtcaacgttctacgacgaaaaagattttcaagacatcgcagcttacggacttaactttgttcgtataccaattggctactgggccttccaattgctggatgatgatccttatgttcaaggccaggaagagtatcttgacaaggctttggagtggagtagaaagcatggactgaaagtttggattgaccttcatggagctccaggatctcagaacggctttgacaactccggtaagcgagacagttgggatttccaaaatggtaacaacgttcaagtaactttggatgttctgaaatatatttcaaaaaaatatggaaccacggactactacgatgtggtcattggtattcaactcttaaacgaaccattgggacctattttagacatggataatctaagacagttctatgcggatggttatgatctagttagagatgttgggaacaactttgttgtaatccacgatgcattttaccaggcgccagagtactggggggacgatttcacctcagcggaaggttactggaacgtggtgcttgatcaccaccattatcaagtcttcgatgcagatgaattgcaaagaagtatcgatgaacatatagaagccgcctgtgattggggtagagatgcaaataaagagtaccactggaacctctgtggtgaatggtcggcagcacttactgattgtactccttggttaaatggtgtcggaaaaggcacgagatatgaaggtcaacttgataactccccttggatcggatcttgtgagaatagccaggatccttcgaaattgagctctgaacgtatctgtgagtacagaaggtacgtagaagcccagctagatgctttcttacacgggaaaagcgcaggttttattttctggtgtttcaagacagaggccagtttggagtgggattttaaaaggttggttaatgccggtatcatgcctcagccattggacgacagacagtatccaaatcaatgtgggttctaa

SEQ ID NO: 844 - DNA, 1053 bp, Pichia pastoris
atgtctccaactatcccaactacacaaaaggctgttatcttcgagaccaacggcggtcccctagagtacaaggacattccagtcccaaagccaaagtcaaacgaacttttgatcaacgttaagtactccggtgtctgtcacactgatttgcacgcctggaagggtgactggccattggacaacaagcttcctttggttggtggtcacgaaggtgctggtgtcgttgtcgcttacggtgagaacgtcactggatgggagatcggtgactacgctggtatcaaatggttgaacggttcttgtttgaactgtgagtactgtatccaaggtgctgaatccagttgtgccaaggctgacctgtctggtttcacccacgacggatctttccagcagtatgctactgctgatgccacccaagccgccagaattccaaaggaggctgacttggctgaagttgccccaattctgtgtgctggtatcaccgtttacaaggctcttaagaccgctgacttgcgtattggccaatgggttgccatttctggtgctggtggaggactgggttctcttgccgttcaatacgccaaggctctgggtttgagagttttgggtattgatggtggtgccgacaagggtgaatttgtcaagtccttgggtgctgaggtcttcgtcgacttcactaagactaaggacgtcgttgctgaagtccaaaagctcaccaacggtggtccacacggtgttattaacgtctccgtttccccacatgctatcaaccaatctgtccaatacgttagaactttgggtaaggttgttttggttggtctgccatctggtgccgttgtcaactctgacgttttctggcacgttctgaagtccatcgagatcaagggatcttacgttggaaacagagaggacagtgccgaggccatcgacttgttcaccagaggtttggtcaaggctcctatcaagattatcggtctgtctgaacttgctaaggtctacgaacagatggaggctggtgccatcatcggtagatacgttgtggacacttccaaataa

SEQ ID NO: 845 - DNA, 435 bp, Pichia pastoris
atggcttccaagactgaaaacgttactttgggcccacaagtccgtgatggctcccaggtgtttggtgttgctagaatctttgcttctttcaacgacaccttcgtccatgtcactgatctctccggtaaggaaactattgccagagtcactggtggtatgaaggtcaaggctgacagagacgagtcttctccatacgccgccatgttggcagctcaagatgttgctgctaagtgcaaagaggttggaatcaccgccgttcacgttaagctcagagctaccggtggtacctcaaccaagaccccaggtccaggtggacagagtgctttgagagctctggccagatctggtttgagaattggtcgtattgaggatgttactccagttccatctgactctaccagaagaaagggtggtagaagaggtagacgtcgttga

SEQ ID NO: 846 - DNA, 156 bp, Pichia pastoris
atgccttctttaaagacattcaagactaagcagaagctgggtaaggctcagaaacaaaaccgtcctttgcctcaatgggttagactgagaaccaacaacaagaaccgttacaacgccaagagaagacactggaagagaaccaagttgggtatctaa

SEQ ID NO: 847 - DNA, 387 bp, Pichia pastoris
atgcagattttcgtcaagaccttaaccggtaagactattaccttggaagtcgagtcctccgacaccatcgacaatgtcaagtccaagattcaagacaaggaaggaattcctcctgaccaacaacgtttgatttttgctggtaagcaactggaagacggtagaactctgtctgactacaacatccagaaggagtctactttgcacctggttctgagattgagaggtggtatcattgagccatccttgaaggttttagcttctaagtacaactgtgataagtctgtttgccgtaagtgctacgccagattgccaccaagagccaccaactgtcgtaagagaaagtgtggtcactccaaccaactgagaccaaagaagaagcttaaatag

SEQ ID NO: 848 - DNA, 1647 bp, Pichia pastoris
atgagcaaagaaagcggaaaggttctacaagtcaactattcggactcggaaacctccaacggagaagaccagtacgtccacaagataaaacctgtagaggatgaggacgacacgtcgatgatgatgtctttcgacaatcacaagcccactattactatcattatcttaaccgtgatggcatcgttttctggattcatgtttggttttgacacaggttacatctcgtcagccctggtgtccattggtacggatttggacaataaggttcttacttatggagagaaggaactgatcacctctgcaacctcgttgggagctttgttgtcagccatatctgctggtttgttggccgatattatcggaagaaaacccgtcatcatgggatcaaatttgctgtttgtcgttggttctgtcattcaatgtgctgccaataccgtttggaccatgattggtggtcgttttgtgatgggttttggtgtgggtatcggttcgttgattgctccattatacatcggtgaaatggctccttctcgtttcagaggccgtttggttattattaacgtcatcgccattaccggaggtcagttggttgcttatgctattggagctggacttactcatgttcacaatggctggagaattctggttggactgtctatcattccacctgttattcaactgttcgttttcttcttccttcctgaaacaccaagattcctcattatgaccaacaagttagagaaagccgccaaagtcatcggcaaaactcataacgaatctgatgaagagttgatccaaaccaaaatattagaaattcaaagcgcaaacgccatcatcccaggatcaaacccattccagaagacctggaatgccatcaaggaaattcacagggttccttccaacttcagagctttggttattggatgtggtttgcaaggtattcaacaattcacaggcttcaattctttaatgtacttttcagctactgttttcgaaacaattggattcaaaaattctaccgctgtttccctgattgtcgcaggtacaaacttcatttttacatcaatcgcattttttgtcattgacagagtcggaagaagaagaatccttctgataggtgttacaggaatgattctttctttggttatgtgtgctgtcgcatttcatttcctggacatccacttcagtggccacaacgccattgtcgagactaatggtatcagtggtactggtgtagctatcatcgtcggtatgatcctatacgttgcaagttacgctcttggtattggaaacgttccttggcaacaatctgaattgttccctcaatctgtcagaggtgttggttctgcttactgtaccgctgttaactggtctggatctctggtaattgcttccactttcctaaccatgctggagaatattacaccaactggaacgttttctttctttgccggattgtctttcgtttccttaatctttgtgttcttttgctaccctgagttgtctggtctgaaattggaagagacccaagagatactgactggtggattcaacatcaaggcatctttgaagttggccaagcaaaggagaaataagcaattagaggaccccgacaagattgtgcataaggtggtagatcaagtttaa

SEQ ID NO: 849 - DNA, 531 bp, Pichia pastoris
atgcttagaagatacttttcctcaaattcagcaagaatggtacaagtcggacaatctcttcccaagaccacccttttcgttaaggatccaagtgaccaattcgagtctggctccattgagcccaactccgtaattgtcactgtccctgctgctttttcacccacctgttcggacacccatgttccaggttatttgactagactcaaggacctcaagtccaagaacatcaaccatctgtatgttgtgtctgtcaatgacccattcgtgaccaatgcctggaagaagacattgttgaagagcttctccattgacaagactgaagttccagtgactttcttggctgaccctaagggtgatttcatccacgggttggacctggactttgattctgccgctgtctttggtaacaatcgttccaagagaagcgctctcatcattggttccgatggtaaggtcgccaaggattttgttgaaccagacaacactggacttaaggtctctgctgttgacagcgttttaaaggcattgtaa

SEQ ID NO: 850 - DNA, 504 bp, Pichia pastoris
atgattatttacaaggatatcatctctggagatgaactgctgtctgatgcgtacgacgtcaaagaagttggtggagttgtctacgaggctgactgtcaaatggtcactgtcggtagtggtgatgtagacattggtgccaacccttctgccgaagaaggtggtgaggacttggaagatggtgctcaaactgtcaacaacgtcgtttactcgttcagattggctgagactcaattcgacaagaagtccttcatggtttacatcaagggttacatgaagagaatcagagctcatttaactgagaacgctccagaccaagttgaagcctttgagaagggagccagtgcttacgccaagaagatcttgtcttcttttggtgactgggacttctacaccggtgaatccatggatcctgatggaatgatcgtcctgttgaactaccgtgaggacggtgttacaccatacgtttccatctggaaacacggtgtgaaggaggagaagatctaa

SEQ ID NO: 851 - DNA, 837 bp, Pichia pastoris
atgtttaccagatctgttagaaactcctttgtgagggcaggacctattcgtctcggtcccgttgtttctaagagactgtacagccaagcgcagaatggtggcattaaccataagagaattctgatcggacttggtctattggctattggaaccaccctttacgggacaaccaaccctaccaagactcctattgcatttgtggaaccagccacggaaagagcgtttaaggacggagacgtctctgtgatttttgttctcggaggtccaggagctggaaaaggtacccaatgtgccaaactagtgagtaattacggatttgttcacctgtcagctggagacttgttacgtgcagaacagaagagggaggggtctaagtatggagagatgatttcccagtatatcagagatggactgatagtacctcaagaggtcaccattgcgctcttggagcaggccatgaaggaaaacttcgagaaagggaagacacggttcttgattgatggattccctcgtaagatggaccaggccaaaacttttgaggaaaaagtcgcaaagtccaaggtgacacttttctttgattgtcccgaatcagtgctccttgagagattacttaaaagaggacagacaagcggaagagaggatgataatgcggagagtatcaaaaaaagattcaaaacattcgtggaaacttcgatgcctgtggtggactatttcgggaagcaaggacgcgttttgaaggtatcttgtgaccaccctgtggatcaagtgtattcacaggttgtgtcggtgctaaaagagaaggggatctttgccgataacgagacggagaataaataa

SEQ ID NO: 852 - DNA, 468 bp, Pichia pastoris
atggctaccgaattgattgttcagtctgagaaggctttccagaagcaacctcacatcttcaccaacccaaaggccaaggccaacaagcgtactaagagatggcacaaggacgtcggactgggattcaagaccccaaagtccgccatcgagggttcttacattgacaagaagtgtccattcactggtaccgtttccatccgtggtaagattctgaccggaactgttatttctaccaagatgcacagaaccatcatcatcagaagagactacttgcactacgttccaaaatacaacagatacgagaagcgtcacaagaacgttgctgctcatgtttccccagctttccgtgtcaacgaaggtgacttggtcactgttggtcagtgcagacctctctccaagactgttagattcaacgttctgaaggttactcctgctgtcggtggtaacaagaagttctccaagttctag

SEQ ID NO: 853 - DNA, 1026 bp, Pichia pastoris
atgagtcactatacttatcttggagatagcgggcttcaaatttcccgtgttattgtggggtgtatgtcttttgggtcgaagaagtggaatgaatgggtaattgaggacgaggataagatttttgaaattctaaaacattgttacgataagggcatcagaacatttgacactgccgattcctattctaatggggaaagtgaacgtttattgggcaagttcttgaaggtttataatattcccagagaaagcgtagtgattttttccaaggtgttctttcccttaggagataatgaaaagggcttcaactataccactagagcgcaattcccccaacacgagctgatcaatcgtcaaggcttgtccagaaagcatatcatcgacggtgtgcgatcatccgttgaaaggttagggacttatattgatttgctgcagattcatagattggatccaaatgtgccccctaaagagatcatgagagccttgaacaatctggtagagagtaaccaagttcgatacctgggggcctcaactatgaaaacttggcaatttgtcaacttgcaaaacatagcagaacagaatggatggcacaagtttatttcaatgcagaactactacaatctcctctacagggaggaagagcgtgaaatgaacgactactgcaaacataatggtgttggtttgattccttggtctcctaatgccagagggatattaaccagacctttgaaaactctgacaaccagagcaaccaccgatgcagcaatcaagatggtaggtctggactctttatcgccagagagtgaagagataatcaacagagtagagaaactagcatcgaagaaaaacgtctccatggctgttatctctaccgcttgggttcttcataaaggttgcaatccaattattggattttccaaaccttcgagagtcgatgaagcgttggaggctctggacttggaactgctgccagaagacatccaattcctggaagagccttatcgggcaaacaatgatctgtttgggtga

SEQ ID NO: 854 - DNA, 5637 bp, Pichia pastoris
atgtcctacaacgacgacaaatattacaatcaaggttacccttctgagggctatcatccatccgaagaagcccttcaatctcagggatactatgaccaaggccaaggtcaacaacctcatggattgaaccaaggcggcctccccccacatgaatattatcaaagctacgaccagcagttcgatggctaccaccaagagtacacatctgatcccaacttggttggtcatcaaggctactacgaacaaccccccagaactgctcaggacccagaggctttctcagattttagctatggacctggaaatggcgctggaactccatatgatggatatggggcccaatacactccttctcaaatttcttatggtgatccgagatcctccaacacgtccactcccgtgtatggtgcaggtccatacgatcagtctggaatggtagccttgcctaccgacccctatcctgcttggaccgctgacaatcaagcccctgtctccattgaacagattgaggatgtcttcattgatttaacgaataagttcggttttcaaagagattctatgagaaacatgttcgactattttatggttttattggactctagatcttccagaatgtctcctgctcaggcacttttgtctttacatgcagactacattggcggtgatcatgcaaactacaaaaaatggtacttcgctgcccaattggacttggacgatgaagttggattcagaaacatgaacctcggaaagctttccagaaaggctagaaaagccaaaaagaagtcgaagaaggccagaaaagttgtcgaagagcacgccgatgacactgagcgcaccttaaccgaactggaaggtgacagctctttggaagctgctgattatagatggaatgctagaatgaacgcatatgttcctctcgacagggttagacacatcgcactttacttacttctatggggtgaagctaaccaagtcagatttactcctgaatgtttgtgtttcatctacaagtgtgcttccgattatcttgagtctgacgcatgtcagcagcgggtcgaacctgttccagaaggcgattacctcaaccgaattatcacacctttgtacagatttatcagatcgcaagtatacgaagttgacaacggtcgttatgtgaaacgtgaaaaagatcacaataaagttgtcggctacgatgatgttaatcagcttttctggtacccagaaggtatcgctaagattgtttttgaagatggttctcggttagtcgatgttccttctgaagaaagatatatcagattgggagaagtcctttgggaaaacgtttttttcaagacttacaaggaaattcgttcctggttgcattttattaccaatttcaatcgtatctggatcatccatgtttctcttttttggatgtatgctgcctacaattcacccactttatacaccaaacattatattcaaacccagaacaatcaacccttagcttcttctcgttgggctgcagcagccttgggaggtacagttgcttgtgctattcaaattgccgcaactatctgtgaatggctatttgtaccaagaaaatgggctggagctcagcatctgtctagaagacttattttcctgactttgattttagcctgtaacttagctccggttgtatttgtgtttgcttgggctggtttggagacctattctcaggctgcctacattgtttccattgttgtattctttgttgccgttgctacaattgtgttcttctcggtgatgccactaggtggtctttttacttcttacatgaataagagatcgagaagatatgtggcttcgcagacttttactgcctcatttgctcaactgaaaggtctagacatgtggatgtcttaccttctttgggttgttgttttcaccgccaagacccttgaatcctacttcttcctgatcttgtctctaagagacccaatcagaaatttatccatcatgacaatgaaccgttgtgttggtgaaaggtggtttggagacacgttatgtcgtgagcaagctagaatcgttttgggattgatgtacgttacagatttattcttgttctttttggatacttacatgtggtacattttgtgtaactgtgttttttctgtgggacgatccttttacttgggtatctccattttgactccttggaggaacatttttaccagattgccaaagagaatatactcaaaggttttggctactactgatatggaaatcaagtataaaccaaaggttttgatttctcaagtttggaacgctattgtcatttccatgtacagagagcacctccttgccatcgatcatgtccaaaagctattgtaccatcaggtgccatctgaaattgaaggaaagaggacattaagagctccaactttctttgtttctcaagatgacaataactttgacactgaatttttcccaagagattctgaagctgaacgtagaatatcattctttgctcaatctttggccactccaattccagaacctcttcctgttgataacatgcccacgtttactgttttcacacctcactactccgagaagattcttttgtctttgcgtgaaattattcgtgaagatgatcagttttctcgtgttaccttactggaatatttgaaacagctacacccaatagaatgggactgctttgtcaaagataccaaaatccttgctgaagagacttctggttttgacaatgacaaccaagaaaagaatggaaacaacctgaaatctcaaattgatgacttgccattttattgtattggtttcaagtctgctgcgccagagtacactttaagaacaagaatttgggcttctttgagatcgcaaactttgtaccgtactgtttctggtttcatgaactatgcacgtgctatcaagctcttgtatcgtgttgagaatccagaaattgtacagatgtttggatctaatgccgaaaaccttgaaaaggaacttgaaagaatggcccgacgaaaattcaaatttgttgtggctatgcaaagattgtctaagttcaaacctgaggaattagaaaacgctgagttcttgctgagggcttaccctgaccttcaaattgcttacctggacgaagaacctcctcttaacgagggcgaggagcctaggttatactcggctttgattgatggacattgtgaaattatggagaatggtagaagaagacctaaatttagagttcagctctctggtaacccaattttgggtgatggtaaatctgacaaccaaaatcattctatcatctttactcgtggtgagtacattcagttgattgatgcgaaccaggataactatttggaagaatgtttgaagattagatctgttttggctgagtttgaggaactgaacatcgaccatgttaacccttatactcctggtttgaaatctgaatttgacggtgttaaacaccctgtagccattgtgggtgccagagaatacatcttctctgttaactccggagttctgggtgacgttgctgcaggtaaggaacaaacctttggtaccctgtttgctcgtactctggcccagattggtggtaagctgcattatggacatcccgattttttgaataacatatacatgactactcgtggtggtgtttctaaggcacagaagggactacatttgaatgaggatatttatgctggtatgaccgccatgtgtcgtggtggtagaatcaagcattgtgagtactaccagtgtggtaaaggtagagatcttggttttggctcgattttgaatttcacaaccaagattggtgccggtatgggtgagcaaatgctttcccgagagtattactacctaggtacacaattgccactggaccgtttcctttcattctactacgcccatcctggtttccatattaacaatttatttattcagttgtcgcttcagatgtttatgttgactttagtcaacctgaactctttggcccacgagtcaattatctgtcagtacaacagaaatatacccattacggatattatgtatcctgttggatgttataacctcatgcctaccattgactggattagacgttatacgttgtccattttcatcgttttcttcatttctttcattccactagctgtccaagaattgattgaaaggggaatgtggaaggctgctcagagattctgtcgtcatttcatttctttgtctccaatgttcgaagtttttgttgctcagatctattcgtcatctcttgtgaacgatttgaccgttggtggtgctcgttacatctccactggtcgtggctttgcaaccgcacgtatccccttctctgtgctttactcacgttttgctgactcgtcaatttacatgggagctaggtccatgctgctgttactgttcggtactgtcgctcactggcaaccagcattattgtggttctgggcatcattgtcggctttgatgttctctccattcatcttcaacccccaccaatttgcttggcaagattactttattgactaccgtgacttcataagatggttgtctcgtggtaacaccagatggcaccgtaactcctggatcggttatgtacgtctttccagatctagaatcaccggtttcaagaggaagaccattaacgacgagtctgaaaaggctgctggagatgcagccagagctcatcgttccaacattcttgttgccgatttcattccttccgctatttacactgctggttgctttacagcttacacattcatgaacgctcagaatggtgttgctaatgctactgttgtgaactctgtattgcgtattgtcattgtctcaattgctccaattgtggtcgatctggccgtgttaggattctgtgctggtttagcttgttgtgccggtcctatgttgggtctgtgttgcaagaagactggtgctgtgatggctggtgtagctcacggtattgctgtcgtcattcacatcattgctttcattggtctatgggtgttagagggattcaacttcactaaaacactgatgggtctcgcagcaatgatttatattcaacgtctgattttcaagttaatgactttgaccatgttgactagagaatttaagaatgatcattcgaacacttcattctggactggtaaatggtacggttctggactaggctggatggcctggacccaaccagcccgtgagtttgctgcaaaagttatagagatgtctgaatttgctggtgacttcgttttaggacatattctcttgttctgtcagttccctctactgtgtgtccctctgattgacaggtggcactcaatgatgttgttctggttgaagcctagtcgtcaaatcagaccaccaatctactcgttgaagcaagctcgtcttagaaagagaatggtgagaaactacctgaccctctacttcttggtatttgccatctttgttgctatcattgcaggtcctgcagctgcagctggtcaagtgaatgtcgaggaactaactgaacatttaccagagtttgctgaaggtttgattcaaccaagacgccaggacaataacgatacaggaaacaacaacacctggggatggacttatacaccatcaacatcttcctggtctaccaaggcttaa

SEQ ID NO: 855 - DNA, 1542 bp, Pichia pastoris
atgataaggtctactcttctaagaaggtcaattgtcactccttgtagatacaagtctaccaaggttaactttcatagaccagatggaccaggttctaaggatgctgctgagcaggctgatgcgactgctaccattctagcggactctttagactttcaaaaacgaatccgtcccagtgagtctgctcctaataagttgacgtggcttgatgcactaaatgaaaagaagagacaattgtctgaaggtaagacaattagttcttttgcttatcagtcaactaagacgactgccgttggcgaaaagacaaggtccgaatctttctcttatcttactctgccctttaaagacgacgtctggttaagagactcctatatcaatgctgcgggaagactacgcgtgggccaactattccaggatctagatgccctggcgggaagaatcgcttatagacactgtgcgcccgctgagcctgttaatgtcaccgcatccgtggatcgtatctatattgttaaaaaggtagacgatattgaaaactacaactttgttttgacgggtgttgtcacttggaccggtcgctcttctatggagatttctgtgaaaggttacgcgttccctggtgactacccctctgagattaaggaaaccaatttgagtgacgatgcggttttcctgaaagctgattttacatttgtggcacgtaaccctgaaactcataagtcgtttccaatcaatcacttactacccactaatgaaagggaatggctagatttcagacgagcagaatcgcataatgctcagaaaaaattacgggccaaactggaaactctggacaaagtaccccctactcaacaggaatcgaatctcatccataatttatacattgcctccaaagcagttgccaagttagatcccgaacagtcctcaaagctcatctttatgaaagactcccaagtgtcttccaccttattcatgcagcctcagtatagaaacagacactcatacatgatatttggaggttaccttttgaggcaaacttttgagctggcttactgtgcagctggtgccttttcctgtgctcccccaagatttgtctccttggattctaccactttcaaagctccagtaccagtaggagccgttttattcatgaatgctcgagtctgttacactgaacacatcaaggaggagggtgaaggtgatagtattccagtacttgcctctttactaaaggcatacgaattgcctccagcgaaccagatatctcacgattcttccgaatttcttagtcgtccgggtacaatcatccaagttaaggtagatacaaagattcgaaatttggatagtgtggaagcaattgaaagcggttctttcatttactctttcttcgttccaagagacactgaaggtgtacgagacaagccaggctattgttctgtcgttcctcaaacgtacgaagagatgatgttgtacatcgagggaagaaggagagcttttgacacagcagagtatgccaaggctttacatgaagctaaaaaagcttag

SEQ ID NO: 856 - DNA, 450 bp, Pichia pastoris
atgcctaccagattctcagcaaccagaaagcacagaggtaatgtctctgccggtaaaggtcgtgttggtaagcacagaaagcatcccggtggtcgtggtaaggccggtggtcaacaccaccacagaaccaacatggacaagtaccatccaggttacttcggaaaggttggtatgagacacttccgtttacaacaagctcgttactggcgcccagtaattaacatccagaacttgtggtctttgattcctgaagagaagagagaagatgctttgaagaactcttctgcttcttctgccgtcgttattgacactttggccaatggttatggtaaggtccttggtaagggttctttgccaaacatcccaattatcgtcaaggctagatttgtttccaaggaggctgagcaaagtatcagagctgttggtggtgttgttgaattagttgcttaa

SEQ ID NO: 857 - DNA, 1209 bp, Pichia pastoris
atgagcaaacaaactccgtcaggaatgacttttatttccctagtggatgattcaaatgattctcctgtaactcaatctacttcagccgataaggacgagaagcatacagctgtgtcgcaggagcagataaacgctgctggaaagaagcagaaccaagttgatgacgaggaagaagaggagcagaaggaggaatacaaacgttctcttgaagaaattgaaatcaaagatgctgcttattacaagatgacagatcctgttctcctgtatgatattccggcccaggttaattcttctgatgagtacatcaaatggtctcccaatatcgtacagacgagaatgttgctcaaccatttgcaaattccatttgaagtacaatggttaacgtaccctcaaataaagccaaccttacaaaagttaggtgtcaagccttgggattcagatcctgagtatactcttccagctatttcatataaggggactactgtgatgggcagatccgagattgaggaatttgttaagcaaaactttgaccccttatcaactccaaattttacagattattttctggacatcgaagaccgtaaatttaaccgagctatttccaactattcagatcagattcttatggggaagctttctttcccactgttggctttttcggaaagtattgtggtaaaagatgagaatgaccctgaatatttccaaagaacaaaaaatgaaagattcggtgttgactgccaggctttggtaaaggataaagaaaagattcatgaaatggtggaagccatttgcaatgaattgcctggatttatggagctatatgattactcggaagctgagaacgctgatttactatttctgaaagtaaacaagtatttgatgggctttcacattactcgtgctgatcttattattgcatcatatgttttctggatcaagactgctgttaaggctggaatggaagaacactcatttcacaattattggtttgatgcttggtataacagaatctccaaacttcttgactcccccttcgatggctcaaaggttgaacaagaagcgcttgatgatttgaacaagaggatagagggctctcatcagaatcgtgtcagagagtctggggagcaaattgatgaaaatgacaagaccgagaatgtcaatgaactcactgaacctgccagttcgactgttgagcagccccccgcgtag

SEQ ID NO: 858 - DNA, 450 bp, Pichia pastoris
atgtccgataaattgtccgaagcccaaatttctgaattcaaagaagcattttccctttttgatcaagatcaagatggcaagattacttccaaagagctaggaattgtgatgcgctctttgggtcaaactccaacagagagtgaattgaacgatttaatccgagagattgatagcaataccgatggaagcatagatttccccgagtttttaacaatgatggctaggaaaatgagagactctgatagtcaagccgaaatcttcgaggctttccgagtatttgacaaggatggcgatggaaaaatcgacaagggtgaactgaaacatgttctgacttccatcggtgagaagttgacagaggaggaggttgacgagatgcttagagaagctgatactaacaatgatggtgttattgacatcaaggaattttccaatctcctagttaataaatag

SEQ ID NO: 859 - DNA, 1518 bp, Pichia pastoris
atgtcaacttcttcaaaacttggatggctatccaaactggatgtatcatccactccagagcgcaatcttcgccgatcttccattattggtacgattggtcctaagactaacagtccagaagtacttgtcagtctgagacaggctgggcttaatattgttagaatgaacttctctcatggttcttacgagtaccatcaatcagttgtggacaatgccagaaaatcagaggaaatatatcctggtagaccgcttgcaattgctttggacaccaagggtcctgaaatcagaacaggaactaccaaaggtgaaacagattatgcaattcctatgggacatgaaatgatattcaccacagatttgtctttcgcaaagtctagcgatgacaaagtgatgttcattgattataagaacattacaaaggttattgaacctggaaagattatttatgtggatgatggtgttctttcatttgaagttttagaagtcgttgatgaaaacactctcaaagtcagatctatcaatgctggtgcaatttcatcccataaaggtgtcaatttacctaacacagacgtggacttgccagctcttagtgaaaaagacaagcaagatctgaggtttggtgtgaaaaacaaagtcaacatggtatttgcatccttcattcgttgtgctaatgatatcaaggagattcgccatgttctcggagaagatggcaaacagatccagattattgctaagattgagaaccagcaaggagttaacaattttgatgaaatcctggaagtcactgatggtgtcatggtcgctagaggagatctaggtattgaaatccctgcacctcaggtatttgttgttcagaagcaattgattgccaagtgcaatctggcaggtaaacccgtaatctgtgctacccaaatgttagaatctatgacttacaatcctaggccaacaagagccgaggtttcggacgttggaaatgctattttggatggcgccgattgtgtgatgttatccggggaaactgccaagggaaactaccctcatgaggctgttgctatgatgcaccacactgctctaattgcagagtcagctattgcttaccttccacactacaacgaaatcaaggatcttgctcgtggtcttattaacacagttgaaactattgctattgccgctgtttctgctcactttgaacaaaatgccaaggccattgttgtgctttctacttcaggaacttcagcaagaatgatttctaagtatagaccgaattgcccaatccttatggtaaccagaaatgatgaggcagcaagatattctcatctctatcgtggagtatatccattcatctataaacaggaagttaatgataactggcaacaagatgttgaagaacgtttacaatatgccatcactgaagccattggcatgggaatattgaaaaaaggtgatgctatcgttgcagtacaggggtggaccaagggactgggtcacaccaatactatgcgcgttgtttttgcttaa

SEQ ID NO: 860 - DNA, 2106 bp, Pichia pastoris
atggtgtttcaagtaaatgttcctgtgggcgaagctagaaagggtgaaacagctcccagaagatactacaaggttaaagatgcagcggtgctcaaaccgagtgactgtaacccgaaaactgaaactgtttacgattacttggttgaaatgtttgaacgacatgaagacaacaaggctatggcttggagggatctcgttgatattcatactgagaagaagaaggtcaacaaaatgattgatggtgagctaaaaaatattgaaaaagaatggcaatattacgaattaagtgattacaaatttatcacttacaaagagctgaaatcgataatttttgaatatggccggggccttgtggaattaggtatcaagccgaatcaggaggaacggctgcatatatatgcttcaacatcacacaagtggttccaaacatatttggcaactcaaactcaaaacattccaatagtaactgcgtatgacaccctcggtgaaagtggtttaactcattctttagtgcagacaggttctgtggcgattttcaccaacaatgaccttcttcacactctcatcaacccgttgaagaaagcggtttcggtgcgttttattatccacactgaaaaacttgattccagtgacaagagatatggtggaaaactttaccaggatgctcaagtcgcaattgatgagatcaagagaactcatcccgatatcaagttcatctcatatgatgaaatagttgccttaggccgaggctccaagttgaatgctattcctcccaaagctgatgacctttcgtgtattatgtacacatcaggatctacaggcactcccaaaggtgtggttttaagtcatagaaacgtacttgccggtattggtggtgcctccactttagttcctagaagcctaattaatgggaaagaccgaatcattgcatttcttccattggcccatatttttgagttagtatttgaattgatctccttgtggtggggtggatgtttagggtatgctaacgtgaagactttgactgatgcttccatccgaaattgccaatccgacctgaaggccttcaaaccaacgatcatggttggtgttgctgctgtttgggagtcggttagaaaaggtattcttgatcagctgaacaaatccccttttctattacaaaaagtattttggggagcctacaaaagcaaacaagcaatgaagtactgccatattcctggcacttcaattattgatgcggtaatttttcgcaaggtaaaggctgctactggtggtgaaattcgccttctgcttaacggtggatcacccatttctgcggatacccaacgatttatcacaaaccttcttgctcccatgctcttaggttacggtttaacagagacagttgctaatacatgtatcacggatatcgacaactttgagtttgatgttgccggtgcattgactggcgctgttaccgtcaaattaatagacgttccagaagctggttattttgcaaagaataaccaaggagaagtgttgattcagggagcatgtgttacaaaagagtactataagaatgagcaagaaactgcaagtgtttttgattacgaaaaaggttggttcagtactggtgatattggagaatggacgtcgtcggggcagctaaaagtaatagaccgtaagaaaaatctgattaaaacactgaatggtgagtatatcgctttggaaaagatagagtccgtatatcgatctaacagctatattcataatgtttgctgctatgctgatcagaataaatccaaaccagtagcaatcgctgttccaaacgagaccacgttgcgcaagcttgctgttcaactgaagctagcaagcgctgttgatgaggtcgacttagcaaaggtagtccacgattctaaattgatctccaaagtacaccaatctcttctggagacggctaagcagcaaggtctaactggaatagaattgattcagggtgtcgttattttggatgaagaatggactcctcagaatgggtttgtaacctcagctcaaaaattgcaacgcaagaaaattttggagagtgtcaaggatcgtgtcgatgaagtatataggcaaaacagttga

SEQ ID NO: 861 - DNA, 774 bp, Pichia pastoris
atgtcaagagaagattctgtttatttagcaaaactagctgagcaagctgagcgttatgaggagatggtcgagaacatgaagaccgtcgcctcttccggcttagagttgtctgtcgaagagagaaacttgctttctgttgcatacaaaaacgtaattggagctagaagagcttcttggagaatcgtctcctcaattgaacagaaagaggaagccaagggtaaccaatcacaagtgtctttgatcagagaataccgctccaagattgagaccgaattggccaacatttgtgaggatattttgtctgttttgagtgagcaccttattccttctgccagaactggcgaatccaaggtcttctactttaagatgaagggtgattaccaccgttatttggccgaattcgctgttggtgacaagcgaaaggaagctgctaatttgtcattggaggcttacaagtctgcctctgacgttgctgttacggagctacctccaactcatccaattagattgggtctggctctgaatttctcagtcttctactacgagattctaaactctcctgaccgcgcctgtcatttagccaagcaagctttcgacgatgctattgctgagttagaaaccctatctgaagaatcttacaaagactccactttgattatgcaactgctgcgtgacaacttgactttgtggacctcagacatgtctgaaactggacaagaagagtcatccaatagccaagataagacagaagctgctcccaaagatgaagagtga

SEQ ID NO: 862 - DNA, 2529 bp, Pichia pastoris
atggttaacttcactgtcgatcagatgcgatcccttatggacaaggtgaccaacgtccgtaacatgtcggttattgcccacgttgatcacggtaagtccactttaactgactccctggtgcaacgtgccggtattatttctgctgccaaggctggtgaggcccgtttcactgatactagaaaggacgagcaagagagaggtatcaccatcaagtctaccgccatttctttgtactctgagatgggtgacgacgatgtcaaggagatcaagcagaagactgaaggtaacagtttccttatcaacttaattgactccccaggtcacgttgacttctcttctgaggtcactgctgctctgcgtgttactgacggtgctttggtcgtcgttgactgtgttgaaggtgtctgtgttcaaactgagaccgttttgcgtcaagctttgggtgaaagaatcaagccagttgttgtcattaacaaggtcgaccgtgctcttttggagttgcaagttaccaaggaggacctgtaccagtctttcgctagaaccgtcgagtccgtaaacgtcgttatcgctacttacactgacaagaccattggtgacaaccaagtctacccagaacagggtaccgtcgctttcggttcaggtctgcacggatgggctttcaccgttagacagttcgccactagatactccaagaagttcggtgttgacagaatcaagatgatggagcgtctgtggggagactcttacttcaacccaaagaccaagaaatggaccaacaaggacaaggacgccgctggaaagcctttggagcgtgccttcaacatgttcgttttggaccctatcttccgtctgtttgctgccatcatgaacttcaagaaggatgaaattccagttctgttggagaaattggagatcaacctgaagcgtgaggagaaggagttggagggtaaggctcttttgaaggttgtcatgagaaagttcttgccagctgccgacgctttgttggagatgattgttcttcacctgccatctccagtcaccgctcaagcttacagagccgagactttgtacgaaggtccatctgatgaccaattctgcattggtatcagagagtgtgaccctaaggctgagctgatggtttacatttccaagatggtgccaacctccgacaaaggtagattctacgccttcggtcgtgttttctccggtactgttaagtccggtcaaaaggtcagaatccaaggtcctaactacgttccaggtaagaaggaggacttgttcatcaaggctgttcaaagaactgttttgatgatgggaagaaccgtcgagcctattgacgatgtcccagctggtaacattctgggtattgtgggtatcgaccagttcttgctgaagtctggtactcttactaccaacgaagccgctcacaacatgaaggtgatgaaattctctgtctctccagttgtgcaagttgccgttgaggtcaagaacgctaatgatctgcccaagttggttgagggtctgaagcgtttgtccaagtctgacccatgtgttttaacctacatctccgagtctggtgagcacattgttgctggtactggtgagctgcacttggaaatctgtttgcaagatctgcaagacgaccacgctggtgtccctctgaagatttctcctccagttgttacctaccgtgagactgtcactaacgaatcttccatgactgccctgtccaagtctcagaacaagcataacagaatttacctgaaggctcaaccaattgacgaggaattgtctttggctatcgaagaaggtaaggttcacccaagagacgactttaaagccagagccagaatcatggctgatgaatacggttgggacgtcactgatgccagaaagatctggtgtttcggtccagacggtactggtgccaacttagttgttgaccagtctaaggctgtccaatacttgcacgagatcaaggactctgttgttgccggtttccaattggctaccaaggaaggtccaattttgggagaaaacatgagatccgtcagagtcaacatcttggatgttaccctgcacgccgatgctatccacagaggtggaggacaagtcattccaaccatgaagagagttacctacgccgccttcctgttggctgagccagctatccaggagcctatcttcttggtggagatccaatgtccagagaatgccattggtggtatctactctgttttgaacaagaagagaggtcaagttatctctgaggaacaaagaccaggtaccccattgttcactgtcaaagcttacttgccagttaacgagtcattcggtttcaccggtgaactgagacaagctaccgctggtcaagctttcccacagatggtgttcgaccactgggccaacatgaatggtaacccattggacccagcctccaaggtcggtgagattgttcttgctgccagaaagagacagggtatgaaggagaacgttcctggttatgaagagtactacgacaagttgtaa

SEQ ID NO: 863 - DNA, 1578 bp, Pichia pastoris
atgcttagaacttctccagctactaagaaagctctcaagtcgcagattaacgccttcaacgttgctgccttgagattctactcctcattgcctttgcaggttccaattaccttgccaaacggtaagacctacaatcagccaacaggtttgtttatcaacaatgagttcgttccttctaagcaaggtaagacctttgctgttttaaacccttccactgaggaggagattactcacgtctacgagtccagagaggacgacgttgagttagccgttgcagccgctcaaaaggctttcgactcaacctggtccacccaggaccctgctgagagaggtaaggtcttgaacaagttggctgacctgatcgaggagcactctgagacccttgccgccatcgagtccttggacaacggtaaggccatttcctccgctagaggtgatgttggtctggttgtcgcctacttgaagtcctgtgccggttgggccgacaaggttttcggtagagttgttgaaaccggaagctcccacttcaactacgttagaagagagccattgggtgtttgtggtcagattatcccatggaactttcctcttctgatgtggtcctggaaagttggtccagctttggccactggtaacactgttgtcctgaagacagccgagtctactcctctgtccgccctgtacgtttcccaattggtcaaggaggccggtatcccagctggtgtccacaacattgtgtccggtttcggtaagattactggtgaagctattgctactcatcctaagatcaagaaggttgccttcactggttctaccgccactggtcgtcacatcatgaaggctgctgccgaatccaacttgaagaaggttactttggagttgggtggtaaatctcctaacatcgtgttcaacgatgctaacattaagcaagctgtcgccaacatcatcctcggtatttactacaactctggagaagtttgttgtgctggttccagagtttatgttcaatccggtatttacgacgagcttttggccgaattcaagactgctgctgagaatgtcaaggttggtaacccattcgacgaggacaccttccaaggtgctcaaacctctcagcaacaattggagaagattttgggtttcgttgagcgtggtaagaaggacggtgctactttgattactggtggtggcagattaggtgacaagggttacttcgtccagccaactatcttcggtgatgttacaccagagatggagattgtcaaggaagagatctttggtcctgttgtcactatcagcaagtttgacaccattgatgaggttgtcgaccttgctaacgactctcaatacggtcttgctgctggtatccactctgacgatatcaacaaggtcattgacgttgctgctagaatcaagtccggtaccgtgtgggtcaacacctacaacgatttccaccaaatggttccattcggtggatttggccaatccggtattggtcgtgagatgggtgttgaagctttggaaaactacacccaatacaaggctatccgtgtcaagatcaaccacaagaacgagtaa

SEQ ID NO: 864 - DNA, 876 bp, Pichia pastoris
atgtacaggaacttaataattgctactgcccttacttgcggtgcatacagtgcctacgtgccttccgaaccatggagcacactgacacctgatgctagccttgaaagtgccctcaaagattactcacaaacttttggaatagctattaagtccttagatgccgacaagattaagagagaggctgtttcccagattggagatggacagattcaggcggctacaatcacctcatctgaaccgaaagtaactgcccaagtagtttcccaaataggggacggccaaattcaagccacgacctccacttcatcaaaatcgaaagaaaccgctcaagttgtttcccaaataggtgacgaaaccgctcaagttgtttcccaaataggtgacggtcaaattcaagctacgacctccacttcatcggaagtaaaacaaactacaggagttgtctcccaaataggagatggccagatccaagccactacagccactacatctgtcgcttctcagattggagacggccaagtgcaggagtcaaaaccaacggacacatcagaggataaagggacttctgatttagtgtcttgccttactgattcttctcttgctttggttcttgaaaagggtgtgctgacagacgctcagggtagaattggtgcgattgtggccaataggcaatttcaatttgatggaccgccaccccaagctggcaccatatatgcaggaggatggtcgattacagacgatgctaagctggcccttggtaacagtacaaccttctatcaatgtctttcgggtaccttctacaatctctatgacgaaaaaattggcgaacagtgtgaaccagtcgagttggacattgtagacctcatagagtgttag

SEQ ID NO: 865 - DNA, 840 bp, Pichia pastoris
atgtcgttatcgttagacaacatagttccaagcttcagattggacggatcagtcagtattgtcactggtggttccggagggctggcttctgtgatcaccaaagcccttttggcacaaggttccgaaattgctgtcgttgatctcaacttggaacgtacaaaggaggcagccgagctcctgatcgagtggggaaaggaaaacctcgccaaggccaatggaggctctgtacctagagtgacttactgggcctgtaacgttgccgacgctgccaatgtcgaggaggtattcaccaatgtcaacaaggaacatggtaagttggctgaatacttagtacattgcgccggatactgcgagaattttccggctcatgagtaccctgcccgaaatgcagaaagcttggtacaggtcaatttgctggggtcactatatgtttcccagtcatttgcccgtcctttaattaaatccggccacagaaacggatccatcgtgctagttggatccatgtccgggactattgttaacgacccacaacctcaagtcgcatacaatatgtctaaggctggtgtcattcacctggcaagatcacttgcttgcgaatgggctccttacaacatcagagttaacacactgtctccaggatacatcctgacacctttgaccagaaacgtcatttcaggtcatactgaaatgaaggattcttgggaatcaaaagtacctatgaagaggctagctgaacctaacgaattcgtgggctcagttctctacctcctttcgaagactggctcttcttacaccacaggacataacctggtggtcgatggtggttacgaatgctggtaa

SEQ ID NO: 866 - DNA, 1461 bp, Pichia pastoris
atgctcaaattcggacaaagacgttttcttagcacttcaagaatcctcgctcaggccatcaaacacgatgtcgtcgtgattggtggtggacctggtggttatgtcgctgccattaaggctgcacaattgggtctagatactgcttgcattgagaaaagaggggcccttggaggaacctgtttgaatgttggttgtatcccttctaagtctctgttgaacaactctcacctttatcacaccatcaagcacgatactaaagagagaggaatcaacgttgctgatgttcaaattgacattggccaattgcaaaatgccaaggagaaatctgtgaagcaattgactggaggtatcgaaatgctgtttaagaaaaacggtgtcaaatattacaagggttctggttctttcgttgatgaacacactatcaacgttgatcctgttgagggaggcgacaaagttgaactcaaagctgataatgtgattattgctactggatctgaaccttcgccattcccaggaattactgtcgacgaggagcgtatcgtgacttcaactggagctttggacttgaaggaggttccaaagcgtatggctattattggtggtggtatcattggtttggaaatggcttctgtttggtctagagtaggctctgaagtcactatcattgaataccgtgacagtattggtgctggtatggatgccgaagttgcaaagagtacgcaaaagttcttgaccaagcaaggcttgaagttcaagtgtggtgccaaggtcactaagggtgaacgcgtaggcgaagttgtgaacattgagattgaaacaacaaaggatggtaaaactgagcaatttgaggctgatgtcctattagttgccgttggccgtagaccttacactgaaggcttgaacgccgaggcaattggattggactttgacaacagaggaactttggtcatcgactctgaataccgtaccaagcaccctcatattcgtgtaattggagatgttacttttggtcctatgttggctcacaaggctgaggaagaaggtattgccgccgcagagtttataaagaagggccatggtcacgtcaattacggaaacattccatctgttatgtacactcacccagaagtcgcttgggttggtcagaacgaacaacaacttaaggaggctggtatcaaatacaaagttggtaaattcccatttattgctaactctagagctaagaccaacttggacactgaaggatttgttaagttccttgctgatgccgaaactcaacgtgttctgggtgttcacatcatcggtcccaacgctggtgagatgattgctgaggctgggcttgctttagaatacggtgcttctacagaagatatcgctcgtgtctgccatgctcatcctactttgtcggaggctttcaaggaagcagctctgggtacctttgacaagactatcaacttttaa

SEQ ID NO: 867 - DNA, 669 bp, Pichia pastoris
atggctagaagaccagctagatgttacagatactgcaagaacaagccgttcccaaagtccagatacaaccgtggtgtcccagatcctaagatcagaatttatgacttgggtagaaagaaggctgctgtcgatgacttcccattgtgtgttcacttggtttccaacgagattgagcaactgtcttccgaggctttggaagccgctcgtatctgtgctaacaagtacattaccacacaatctggtagagattcattccacttgagaatcagagtccacccataccatgtcttacgtatcaacaagatgttgtcttgtgccggtgccgatagattgcaacaaggtatgagaggtgcttggggtaagccacacggtttggccgctcgtgtcaccattggtcaaattctgatgtctatcagaaccaaggactctaacaaggccgtcgttattgagggtctcagaagatcccgttacaagttcccaggtcaacaaaagatcattatctccaagaagtggggtttcactccactggaccgtgaggactacattgtcaagagagctagtggtgagatcagagacgatggtgcttacgtcaagttcctgaccaagaagggtcctttgcaagagaacttggagcaattcccagactacaactacgccgaggctaattag

SEQ ID NO: 868 - DNA, 459 bp, Pichia pastoris
atgtcccaaaacgagagaaccttcattgctgttaaaccagatggtgtccagagaggtctggtaccagagatcctgtccagattctggaacaagggttacaagttagttgctatcaagttgactttggctaacgaagacttgttgagagagcactatgctgatttgacctccaagccattcttcccatctctgctgtcttacatgttgagtggtccagtcttggctaccgtctgggagggtaaggatgttgtcaagcagggtagagctttgttgggtgctactaaccctttggcttccgccccaggtaccatcagaggtgacttcgccgttgacatgggtagaaacatcatccatggttccgactctgttgagtctgccgagaaggaaatcggtttgtggttcaaaaaggaggaacttgttgactacaagccaactttgacctcttggatctacgaataa

SEQ ID NO: 869 - DNA, 960 bp, Pichia pastoris
atgaagtttggtcttggatcattgggattggctgtggcgctaatacctattgcctcagcattatacagagttgacgactatgaaacatatgtaccaaccacggttggaccacacccgacaggcgctatagagcctgctgaagatcaagttgatatcaaggtggagccaacagtgtactcccaactgctggacgagtttgagaatgtgttgggagagtctgacggaatggtaaatcatgataatcttgcctcaatttggatgtcattttcaatgattgtcgtgtctgaaattggagataaaacctttttgatcgcagcgttgatggctatgagatctcccagatggttagtgtttgcaggagcatcgtcggccctagtggtaatgacagtcctgtcatgcattgtcggccatatccttccgaccttgttgactgaaaagactaccaagactttagccagtattttgttcgtagtatttggaataaagttggccaaggagggattcgaaacgccgaaagatgtcggagttgaagaagagctagctgaagttgaagaagaaattgcattgtcatccatcaacaataaattggatgacgccgaaactggatctgtatctggttctaacaagaagaaataccaaactacactctctcacctactcgaagagaccaaggagttgttatcgttcattctgtctcccactttcttacaggttttcacgatgactttccttggtgaatggggagacagatcgcaaatagccactatagctatggctgccagtgctcaattttactttgtgatagtgggtagtgtgctagggcacgcactctgcacaggcattgctgtactgggaggtaaacttcttgcgggacacatttctttacgggctgtcaaccttgggggttccttggccttcttcatctttgcattcatatacttatatgagatatatatgtag

SEQ ID NO: 870 - DNA, 1296 bp, Pichia pastoris
atgaagatatccgctcttacagcctgcgctgttactctagctggtcttgcaattgcagcaccagctccaaagcctgaagattgtactactacagtgcagaaacgtcaccaacacaaacgtgctgtcgcatacgattacgtttatgtcacagtgactatcaatggccaaggtgaaaccatttctccaactgttgtggcagaacttgagacggtttccacgcctgcaacaagctcatccgcagttgcaacttcttctgctcctgcaaccacttcttcaatcccagagacaacttctgcacaagtgaccacctcttctgttgcagagtccacttcagcgcaattcacttcatctaccgaagaagcctcttcttctgttgagcaaacgactcaatcaagttcaagttcaagtccaagttccagttccagttcaagttcgagctcaggctctagttcaggatccagttccggtggaatcgatggagacctaagctggtactcaggtcctggaaacaaattccaggatggtactataaagtgttccgagttcccatccggtaacggtgttgttgccttggaccatctcggattcggaggatggtcaggattataccacccatctgatacctctactggtgggatctgtgaaccagacacctactgctcttatgcctgccaatcaggtatgtcgaagacacaatggccatctgaacaaccggacaatggtgtttccgttggtggtctgtattgtgattctgatggatacctttaccgttccaagaaagacactgactatctatgtgaatggggtattgatgtcgcctatgttgtcagtgaaattggtaaaactgctgccatctgtagaaccgactatccaggaactgaaaacatggttataccaactgttgtgagtccgggtggagaactccctctgacaacagttgaccaatcctcttactatacgtggaggggaatgaagacttcggcccaatactacgtgaacgatgctggtgttgactggaccaccggttgtacctggggagactatggaaccgactacggtaactgggcgccattgaactttggtgccggttacgacaacggcatttcatacctttctttaatccctaaccctaacaacaaggactccttgaactataatgtcaagattgttgcttatgatgattcttctgtcgttatcggcgagtgcaagtatgaaaatggttcatacaatggaaacggttccgacggttgtaccgttgctgtcaacagcggtaaggccaagtttgtgttgtattaa

SEQ ID NO: 871 - DNA, 513 bp, Pichia pastoris
atgactcgttacagtgctgtcccagctaacccagatcgttctgcctctgctcgtggctcttacctgcgtgtttctttcaagaacaccagagagaccgctcaagccgtcaacggatggaacctgaagaaggctcaacagtacttggaccaagtccttgaccacaagagagccattcctttccgtcgtttcaactcttccatcggaagaactggacaaggtaaggagttcggtactgacaaggctagatggcctgctaagtctgtcaagtttatccaagacttattgaagaacgctgaatccaacgctgagagcaagggtttggacattgacagtttgatcatctcccacatccaagttaaccaagctccaaagttgagaagaagaactttcagagcccatggtagaattaacgcttacaactcttctccatgtcacattgagttgatcttgtccgagccagatgaagccattgagaaggccaaggaagagccagcccagttgactgaagcttag

SEQ ID NO: 872 - DNA, 1131 bp, Pichia pastoris
atgtcgtccattgcattccatacattcagaggttccagagctaagatggctacggccctccttctgacaggagccgtgggagctggaagctaccactacgagaaaaagagacgtcaatttaacaataggaacaataacaacaataacaataagaacaacaagaattttgccaaagctctattcggattttctacaggaactgctgctgccactttaaccgatgagagtaaagtgaaagtagctactttatcagatatccattctttcaaagaataccaacaggtctataatgatatcgccaagaagatagaggacgaggacgactttgacgtagacggatctgctggacctaacttggtgagattggcatggcattctgctggaacttacgacaagtacgacaagaaccctcataccaacggtggttcttacggaggaacaatgagattttctaaggaagggggtgacggtgccaataacggattagccaaaggaagagagtttctagagccccttttaaagaagtacacatggctttcacacggtgacttgtggaccttggctggtgttgttgctattcaagagatgggtggtccaaagataaaatggagaccaggaagaaaagatttgtctgaagagtaccaagcaccaaacggaaagctaccagatgcagctcaaggacctgattatgttcgtaaatttttcaaccgtctagattttaccgatagagaaatggttgctctgattggtgcccacaccctgggaagatgtcatgttacgagcagtggttacgatggaccatgggattttgctcctaccatgtttgacaacggatttttcactcaattacaaaaaggagtaggttcaggtgaagggcaatggcatttgagaaaatgggatggccctgaacagtacgaagacaacaattccaattctttgatgatgctgcctgctgacatggctcttgttcaggatccaaagttcaagaagattgttgatgagtttgctgcttcacaggaggcatttttcaatgagtttgcccctgccttccagaagctgttggagagtggtattcatttccccaaggaatccaaagagttggtgttcaggacactagacgagcagagttag

SEQ ID NO: 873 - DNA, 1533 bp, Pichia pastoris
atgtctcaaccacctaaatggacaacatcaaatggtgctcctgtctccgatgtatttgctacagagagagccaccttcgacaacgctaatcacgctaacaatgcccccaaagttgggcctctgctgctacaagactttcaattgattgattctcttgcccatttcgacagagaacgtattccagagagagttgtgcatgccaaaggtgcgggagctttcggtgagtttgaggtgactgacgacatatctgacgtttgtgctgccaaattcttggatactattgggaagaaaacccgtatcttcactcgattctccaccgttggaggtgagaaaggttctgccgacagtgcccgtgacccaagagggttttccaccaagttttacacagaggaaggtaacttggaccttgtgtacaacaacactcccatcttctttatcagagatccatccaagttcccacatttcatccacacccaaaagaggaatcctgctactaacctgaaggacgccaatatgttctgggattaccttgttaacaaccaagagtccattcatcaggtgatgtacttgttctcagatcgtggaactcctgcttctcttagaaaaatgaacgggtactctggtcacacttacaaatggtacaacaagaaaggtgagtgggtttacgtacaagttcacttcaagtcggacctgggtgtcgtaaacttcaacaatgaagaggctggaaagcttgctggcgaggatccagactaccacaccggtgatcttttcaacgccattgagagaggcgagtatccttcatggacttgttacattcagaccatgactcaagaacaagctgccaagcaaccattttccgtgtttgacttgaccaaggtttggccacacaaagacttcccattgaggagatttggtaaattcactttgaacgaaaacccaaagaactactttgccgaagttgagcaagccgccttctctccatctcatactatccctagtatgcagccatctgctgatccagtccttcaatctcgactgttctcctacccagatactcaccgtcatagattgggtgttaactatcagcagattcctgtcaattgtccagtggctcctgtttttacccctcagatgcgtgatggttccatgactgtcaatggcaaccttgggtctactcccaactacaagtcttctttctgtccattctctacagaggcacagatccagaccaattcacacacaccagaagaagttttggctgctcacactgagaaattccactggggaggtatccttgacagtaagagctacgattttgaacagccaagagcgctttggaaagtattcggcaaaactcctggtcagcaacgtaacttctgccacaacgttgccgttcacgttgcggctgccaaccatgaaattcaagacagggtttttgaatacttctccaaggtttaccctgaaattggtgaccagattcgtaaagaagtattgcagctatctccaagaggtgactctgcagcaagattgtag

SEQ ID NO: 874 - DNA, 1257 bp, Pichia pastoris
atgcagtttggaaaggttctatttgctatttctgccctggctgtcacagctctgggagaaacaacttcttcattgagtgccacattgacttcaaccacacgaatttcaattgcatctggatgtagtcttgaagacttcactgctactgctcagtctaatcttgatgagttgtccgattgtgaagctgtcagaggtgatatccacattgccggaagtctgggatcagctgctatcgctaatgtcaaggccatttacggttctttaattgtcaagaatgccacctctttggtttcattgaccgctgattctttgaccaccattaccgaacaattggctctttctgagttgaccattttggacacactctcttttgctcaattgacttccgttggttctatttacttcgtcaccttgccagctttggaagagaccggtttccacactggtgtctctgacactgagtctgtttacatttctgacactgctttaaccaacttggacggtatcgttgctaccgatgtcgatgttttcaatgtcaacaacaacttcaatttggacactgttgactcgcacttggaaactgtttcctctgctttggaggtttccttcaactcagacgatgttgaagtatcctttgacaatttgttgtgggctaacaacattaccttccgtaacgttgcttccgtctctttgaacaacctgaccactgttaacgcttctttgggtttcattgagtctggtttccaaaagttgagtttcccaggaatcaccagggttggtggatctttctccattgttgacaacgacgatttagaagaaatagacttttctaacgttcagtcgattggtggtggtttaatcatcgctaacaactctaagttgactgacttcagtgaatgggaggacttgcaaactgttggtggtgctcttgttttggagggttctttcgacaacggttccttcccatctttgagagctgttagaggtgccttctctttggagtctgatggagatatctcttgtgatgacttctctgatatcaggggtgacactgccggtgagtatcagtgctctgctgcttcgttctccacttctgctagtgctcagtcttcttctagttcaaccagtactggcggatcctctacccacaccggtagttccactgctaccagctcttctagtgaggatgctggtgtagctttggctcctgcttctctcttcactttgttagcctcaattgttctcggattcttgtag

SEQ ID NO: 875 - DNA, 1512 bp, Pichia pastoris
atggttgtaccaagattgtattattccaccagccgtgctgctttgcagaccgctagagctaatcagcgtcttgccagaggtttggctaccgctgctgcctccaccggtaaggttagagccgtcattggtgccgttgtcgatgttcaatttgaacaaggtcaattgccagatattcttaacgcccttgagctgcagaacggtgaccagaaattggtcttagaggttgcccaacatttgggtgagaacaccgtcagaaccattgctatggacggtactgaaggtttggttagaggaactagcgtcactgacactggttctcctatctccgttcctgtcggtagaggtactttaggtcgtatcattaacgtcattggtgagccaattgacgagagaggaccaattgagtgcaagcaaagaaaccctattcatgccgaccctccatccttcgtcaaccaatccactgctgccgaagttttggaaactggtatcaaagtcgtcgacttattggccccttacgccagaggtggtaagattggtctgttcggtggtgccggtgtcggtaagactgtgtttatccaagagctgattaacaacattgctaaggctcacggtggtttctccgttttcaccggtgttggtgaacgtaccagagaaggtaacgatttgtaccgtgaaatgaaggagactggtgttattaacttggagggtgactccaaggtcgccctggtcttcggtcaaatgaacgagcctcctggagctagagctcgtgttgctttgactggtttaaccattgctgaatacttcagagacgaggagggtcaagatgtgttgttgttcgttgacaacattttcagattcacccaagctggttctgaggtgtccgctttgttgggacgtattccatctgccgttggttaccaacctactttggccactgatatgggtctgttgcaagagcgtattaccactactcaaaagggttccgtcacctctgtccaagccgtttatgtgccagccgatgatttgactgatcctgctccagccactaccttcgcccacttggacgccaccaccgtgttgtctcgtggtatctctgaattgggtatttacccagctgtcgaccctctggactccaagtctagattgctagacgttgccgttgtcggtcaggaacactacgaagttgctacccaagtccaacagaccttgcaagcttacaagtctttgcaagatattattgccattttgggtatggatgaattatccgagcaagacaagcttaccgttgagcgtgctcgtaagattcagagattcttgtctcaaccattcgccgtcgccgaggtcttcactggtatcccaggtagattggtcagactgaaggacaccgtcagatccttcaaggaggtcttggatggtaagtacgaccatttgccagaaaacgctttctacatggttggtggtatcgaagacgttgtcgccaaggctgaaaagttggctgccgaggctaactaa

SEQ ID NO: 876 - DNA, 1731 bp, Pichia pastoris
atgtcgcttattggcggaggttcagactgtgccgcgggaagtaatcctctggcacagtttaccaaacacacacaacatgacacatccttgcaacaatccatgaggaatggggaatttcaacaaggaaaccaaagaatgatgagaaatgaaagtaccatgtccccaatggaaaggcagcaaatggatcagtttatgcagcagcaaaacaatcctgcgttcaatttccaaccaatgcaacacgagctgaacgtaatgcaacagaatatgaatgcaccacagcaagtagcaaacaatagctggaaccaagagtttcgaatgaaggatcccatggttgcaaacgctccatctgcccaggttcaaacacctgttcaatcaactaactgggcacaggatttccaacaggcaggtcctgaagttcagcatcatgcgcagcagcaccaacaccctattttgagcgttcccggtgtaagagctggaatatatgggggtggaagactcatgggcgggagcatgatgaaccgtgctgctcaaatgcaacaacagaacccggctcaggctcagacttcagaacaatcacagacacaatgggaagaccaattcaaggatatcgagtccatgttgaacagtaaaacccaagaacccaagacaaagcaacaagaacagaatacattcgagcaagtctgggatgacatacaggtgagttacgccgatgttgagctaaccaacgaccagtttcaggctcaatgggagaaagattttgcccaatacgccgaaggaaggctcaattacggagaatacaagtatgaggaaaagaatcaattccgtaacgatccagatgcctatgaaattggtatgagattaatggaaagtggagctaaactaagcgaagcaggtcttgctttcgaagctgctgtccaacaagacccaaagcacgttgatgcttggttaaaactgggtgaggtccagacccaaaatgaaaaggagtcagacggtattgcagctctagagaaatgcctggagttggaccccaccaatttagcagctctgatgactcttgcaatttcttacattaatgatggttatgacaatgctgcttatgctacattggaaaggtggatcgagacgaaataccctgatattgcttccagggcacgctcgagtaatccagatttggatggtggtgatcgtattgagcagaacaagcgtgtcacagagcttttcatgaaggcagcacaattatcaccagatgttgctagcatggatgctgacgttcaaactggcttaggtgtattgttttactcaatggaagagtttgacaagactatcgactgtttcaaggccgccattgaggttgagcccgataaggccttgaactggaatcgactgggtgctgccttagctaattacaacaaaccggaggaggcagtagaggcatattccagagcattgcaattgaatcctaactttgttagggctcgctataatcttggtgtttcattcataaacatgggcagatataaagaggctgttgaacacctgttgactggaattagtttgcatgaggttgaaggtgttgatgcatcagaaatgagtagtaatcagggccttcagaataatgcccttgtcgagaccctaaagagagcatttttgggtatgaataggagagacttggttgataaagtatatccaggtatgggattggcccaattcagaaaaatgtttgacttttag

SEQ ID NO: 877 - DNA, 414 bp, Pichia pastoris
atggctagaactaaacaaacagcaagaaaatccactggtggtaaagccccaagaaagcaattggcttccaaggctgccagaaaatccgctccatctgctgctggaggtgtcaagaagccccacagatataagccaggtaccgttgctctgagagaaatcagaagattccaaaagtctactgagttgcttatcagaaagctgcctttccaaagattggtcagagaaattgctcaggacttcaagactgacctgagattccaatcttctgccatcggtgctttgcaagaatccgtcgaagcttacttggtttccttgttcgaagatactaacttgtgtgctattcacgctaagagagttactatccaaaagaaggatatcctgttagctagaagactgagaggtgaaagatcctaa

SEQ ID NO: 878 - DNA, 312 bp, Pichia pastoris
atgtctggtagaggaaaaggtggaaaaggtctaggaaaatccggtgctaagcgtcacagaaagattcttagagacaacattcaaggtatcacaaagccagctatcagaagattggccagaagaggtggtgttaagcgtatttccgctttgatctacgaagaagtcagagctgtgctgaagactttcttagagaacgtcattagagatgctgttacttacactgagcatgccaagagaaagactgttacttctctggatgtcgtctacgctttgaaaagacaaggacgtaccttgtatggtttcggaggttag

SEQ ID NO: 879 - DNA, 588 bp, Pichia pastoris
atggctccaattattcagaaaccagctccattcttcaagaagactgccgtcgtcgacggtgtttttgaggaagtctccttggatcaatataaaggaaagtgggtccttttggctttcattcctttggctttcactttcgtctgcccaactgagatcattgcctactccgaggctgccaagcagtttgctgaggagggtgcccaagttctctttgcctccaccgactcagagtactctctgttggcttggactaacgtcgctagacaggatggtggtctaggcccagtcaacatcccattgttggctgacaccaaccacactttgtctaaggactacggtgttttaattgaggaggaaggtgttgctctgagaggtattttcctgattgaccctaagggagttttgagacagatcactatcaacgatctgccagtcggaagatctgttgaggagtccctgagacttcttaaggccttcaagttcactgacgagcacggtgaagtttgcccagctaactggcaaccaggtgctgataccatcaagccagaagttgatgcttccaaggaattcttttccaagtccaaatag

SEQ ID NO: 880 - DNA, 225 bp, Pichia pastoris
atgttcagattagccgctagacaaaccccaaagagaatgttctccacttccagagtggccgcttccggtgctcacggcgatgttggtccatactccaaccttcccttcaaggtcaagaacagaagagttccatatgccgttccacactttttgttttttgccattggaatgggtattccattcttcgcctgctatgtgcagttgaagagatctggatcgatctaa

SEQ ID NO: 881 - DNA, 1269 bp, Pichia pastoris
atggaaagactttcacaactaagaaaacatttggcaggtgatgatcctgtagaacggttaacggcaaagaactctgatgatgtagtaattgttgccgccttcagaactgctgttacaaaaggtggaaagggcaagtttaaggatgtgaattcggatgtgttgcttcagaagttgatcgaaggattgttcgaacaaaaactgcctcctggatttgataaaagcctgattgaagaagtgacggtaggaaacgttttgaatcctggtgctggtgctaatgaacatagagccgccatgttggcagctggaattcctagctctgttccatttttggcaatcaacaggcagtgttcttcagggctaatggctgtcaatgatgttgcaaataagattctcgttggtcagatcgcctgtgggctagcggccggtgttgaaagtatgtcaagcaactatggaccatcagctatgcctaaagtatctaaatcagtattaaaacatccagagggagccaaatgcatgattcccatgggaataactaatgaaaatatcaactccaagtttggcatctccagaacagcccaagatgaatttgcttcgaattcttaccaaaaagctgaaaaagcagtccgtgagggtcagttcagagaggagattattcccatccaagtagaagtggaggacgaggatgatgaaaatgacgatgatgatgctcccgcaaaaactaagactattactgtggaccaggatgaaggtcccagacctaacgttaccgtagagtcattaggcaaactaagaccagcattcaagaaggatggttctacacatgccggaaatgcatcccaagtctcagatggtgctgccgttgttttattaatgcgcagaaatatggcccaggatttgaaccttcccattcttggcaagtatattgcatgtactaccgtgggagtacctccagagatcatgggagttggcccagcatatgccattccagcagtcctcaaattggtcgatttgccaaaggaaaaagtgacagtttatgagatcaacgaggcgtttgcaggtcaggcactttattgtataaataaggttggtcttgataagaataaagtgaacccgaatggaggagcaattgctctgggtcatccattgggttgtactggtgcccgtcaagtgtcaactatcatgcgagagttaaagccaggagagatcggagtcacatcaatgtgtatcggtaccggaatgggagcagcagcagtgtttgctagagaatag

SEQ ID NO: 882 - DNA, 516 bp, Pichia pastoris
atggctgctgtatttttcccaagaacgtgtttcaaatgtggtgaggtcgggcaccttgcagaaaactgccaacaagagcaaaagctttgctacaactgtagagccccaggacacgaatcaaatgactgtccagagccaaagcaaacttcatcaaaacaatgttacaactgtaacgaaaccggtcatgttcaatccgagtgtgaacagccaaagaaggctgccaagtgttactcatgtggtaagttgggtcatttctctcgtcactgcccaaattcctcttccgcttcctctgcaggccctgtggcctcttcttccaccatttgctacaagtgttctggacctaaccactttgctcgtgactgtcaagctggctctccaaaatgttacgcttgtggaaagctaggtcatatctccaaggactgtaccgtctccggaggttctacaaaagcctgttacaactgtggtgaacagggtcacatttcccgtgactgccctccaactgctgaggccaactaa

SEQ ID NO: 883 - DNA, 327 bp, Pichia pastoris
atgccaccaaagattcaacaatccaaggcagccaaggccgctgccgccatggccggtagtaagaagtctaagaagaagtggtccaagggaaaggttaaggacaaggctcaacatgctgtcatcctggaacaggacaagtacgacagaatcatgaaggaggttccaacttacagatacgtttccgtctccgttttggtcgacagactaaagatcggtggttctatggctcgtgttgctctgagacaattggagaacgacggtgtcatcaagccagttctgttgcactctaagcaacagatctacactagagctactgcttccgagtaa

SEQ ID NO: 884 - DNA, 975 bp, Pichia pastoris
atgtctaactctttggaacaattaaaagctgcaggaactgttgttgttactgacactggtgaatttgaatccattgctaagtacactcctcaggacgctaccacaaacccttcattgatccttgcagcctctaacaaggccgagtatgccaagttgattgatattgctgttgactacgcaaagaagcaaggtggatctgttgaagagcaagcaaacattgccctagaccgtctcttgatcgagtttggtaaggagattctaaagattgttccaggccgtgtatccactgaggttgatgctcgtctgtcttttgacaaggaggccactatcaagaaggctttggagatcattgagttgtacaagtctgtaggcgttgagaaggaccgtattttgatcaaaatcgcctcaacctgggagggaattcaagccgcccgtgagttggaggccaagtacggaatccactgtaacttgactttactcttctcttttgtgcaggccgttgcttgtgctgaggcaaaagtcaccttaatttctccattcgtgggccgtattttggactggtacaaggcttcaacgggtaaggattacaaaggtgatgaggacccaggtgttcaatctgtgaaggcaatcttcaattactacaagaagttcggttacgacaccattgttatgggagcttctttcagaaacactggtgagatcaaggctctagctggttgtgatttcctgaccattgctcctaagttgttggaagagctgttgaactccaaggaacctgttcctcaaaagttggacgcatctgctgcttcatccttggacattgaacgtgtttcttacattgatgatgaggctgccttcagattcggcttgaatgaagatgccatgtccactgagaagttgtccgaaggtatccgtaagttttcggccgactgtgtgactctactgaatttgttgaaggagaaggtccaggcttaa

SEQ ID NO: 885 - DNA, 2766 bp, Pichia pastoris
atgcgttttttggtctcatcctttcggcccttcagacatacaatttcgtcgcatatctcaatgggccaggctctgtctgccattcgtgtatttcataaaaattctcactcacgtacccaaggtttaaggcgccactctcactactgttgccaccgcaagatagatatgagtacttctactaaacttccagagcgtcaattgctaccagccaatgttaggcctaccaaatatgatttgacattggagcccttattttctaccttcaagtttaacggagaagagactatacatttagatgttcaggaggactccagttctattacgctacacgctctagacatcgatctccaagattcactattgataacttcaaacaagtctaagactcccccgcttcatgtgacaagcaatgatgatgaccaatcgctcacttttcaattcaaagagggtactctagtaaagggagataaggtgcagctgcagttgaaatttgttggtgaattgaatgataagatggccggtttttaccgctcttcatatgaagagaatggagaaactaaatatttggcaactacccagatggagccaacagattgtcgtcgtgctttcccttcctttgatgagccatcgctaaaagccgtattcaacattgccctcattgctgatcagaaacttacttgtctctcaaacatggacgtgaaagaggaacaatctctcggagatagaaggaagaaggtgatattcaatcccactccactaatttctacttacctaattgcttttattgttggtgatttaaaatatattgaagccgactataactatcgcattcctgtcagagtttatgccacccctggtttagagaagcagggtcgtttttctgtcgagcttgctgctaaaacattagaattctttgagcaacagtttgatattgattatcctcttccaaagatggacatggtggcgattcatgatttcagtgcaggagctatggaaaactttgggcttgttacctatagagttgttgatttgctgtacgatgaaaaaaattcaaatttggctactaagcaacgtgttgcagaagttgtccaacacgaattggcgcatcagtggtttggtaatcttgtcacaatggagtggtgggagggcctttggctgaatgaaggctttgctacatggatgtcttggtactcttgtgacaagtttttccctgattggaaagtatgggaacaatatgttacagattctttacaacaggctctggctctggacgctctacgtgcttctcaccctattgaagttcctgtgaaaagggccgacgagatcaatcaaatttttgacgcaatttcctattctaaaggatcctccttgctaaaaatgatctccaaatggctcggagaggatgtgttcattaagggagtctccagttatttaaaaaagcacaggtatggtaatacgaaaaccaccgatttgtgggaatcgctttctgaggtgtctggaaaagatgtggtcaaagttatgagtatctggactggtaaaattggatttccaatcatctcagtaactgaaaatgcaaaccgtatcacttttactcagaacagatatttaactactggtgatgtaactcctgaagaggatacgacgatttatcctgtttttttgggactcaaaacagaaagctcaactgatgagtcgctggtccttgactcaaggtcaatgtcagtagatatccagaattctgactttttcaaagttaatgctgaacaagccggtatttacaggaccaattatgcaccagagagatggatcaaacttggaaagcaacctcaccttctaagtgtagaagaccgtgctggtttggttgcggatgcgggcgctctggctagttctggtcactcatctacaaggaactttttgaaccttgtaaattcatggaaagatgagtctagctttgttgtctgggacgaaataacttcccgtgttgcagctttaaaagcagcttggttatttgaatcccaatctgacattgacgccctgaatgctttcgtaagagaccttatttctacgaagatcaaaagtatcggatggtcattcaatgataatgaaccattccttgaacaaagactaaagagccttctatatgctactgctgctggtgcaaaagtaccaggagtagttaaatcagcattgataaactttcaaaaatacgttgctggtgataagactgccattcaccctaacataaaggcagttacgtttcaaactgttgcggcccaaggatctgaaaaggaatgggatcagttactcgacatctacaagaaccctgtatctattgatgagaaaattattgctcttaggtctctcggaaggtttgaagatcccatcttgatcgcaaagaccctggcactgttatttgatggttccgtaaggtcacaagatatttacgtaccaatgcaaggccttcgtgcgactaagataggagtagagtcacttttcaagtggttgactcttaattgggacaagatttataaattgcttccacctggtctgtcaatgcttggttctgtggttactatcagtacttctgggttcacttccttggatgatcaaaagcgtgtcaaagatttctttgcatcaaaggataccaaaggcttcgaccagggtttggcccaggcgttagacaccatccaatccaaggcaagttgggtacaacgtgactctaggaatgtatccgattggctacgtgagcagggatacaaaaaatag

SEQ ID NO: 886 - DNA, 1581 bp, Pichia pastoris
atgatgacagaccaaatcggaaaccaggcttctccggcctctaactcatatttgaacaacgatggaatagatgagttgaccccgatgactcggagaaaaagagtatcctcgctatctttatctgaccaatgggccggatcccttcagatgactccaacaactggatccactgggaatttaaagcgtataggttcttccaaattgtcaattaataatggattgaatgcagtgcgtgtcaaaaagacagtcatcgatcatgtcagggtggcgtcatatgcatttgcctttgacattgatggagttattgttaagggtccagagactatccccgaagcaaaagaagcccttaaactgttaaatggtgccaacgaatataacataaaggttccgtatatatttgttaccaatggaggcggaagggctgaacaggctagagctgaagaactctctaagagacttgatattgaagtaaccgaagaccaagtcattcagggccatactcccatgcgggagttggtcagcgtttacaataacgtgcttgttatcggtggtgttggggatgcctgccgtaaagtggctgagaaatatggatttaagaatgtatttacacctttggatgtgatgaaatggaacccatcagtcacaccttatcataatctgacagaggaagaactggcagtggcccgtgatgttgacttcagcaatacaggcattgacgctattttggtgtttgccgattctcgtaactgggccgcagatcagcaaatcattttagaacttcttttatccaagagcggtttcatgggaacagtgtcagattccttcgaagaaggtcctgcactttactttgcgcattcagatttcgtttgggcaaccaactacaatttatctcgatatggtatgggggcactacaagtatccattgcagccctctatagagaacacacaggaaaggaactgcaagtcactcgatttggaaagccacaaaggggcaccttcaaatttgcttcaaaggttctttctcaatggcgaaaagacgtgttagaagagcatgtggaagaattgacaactgaagagggaacatcagatatggaggaacaatcaccaggtgaccctttattgaatgatccgtctcagaatatgaatagaaactccaaaccaactttattggcgacagaatcagaatcagagtccgattctgataatgaaggtttaacagtggaaaaactttcgaaactgacgctcgaccttccacctgcttcaacagtgtattttgttggtgatacacctgagtctgacattaggtttgcaaactcgcacgacgaatcgtggtactcaattctagtcaagactggggtataccaggaaggctcgattcccaagtataagcccaagcatatttgtgaaaatgtacttgaggctgttaagtttgcgattgagcgagaacactcaaaagagctagaggaatggaataattcggctgtcgatccagatgctgcaacaacacagctgtcgcctttgacacttgtagaagagaccaaagtagttcccaagaagcactctgcaaagtttgagatgtaa

SEQ ID NO: 887 - DNA, 885 bp, Pichia pastoris
atgtcagaccccaaaccattgccctttgtgtaccaatttctatctggggccattgctggagtcagtgagattctagtgatgtaccctttagatgtggtgaagactcgtattcaattgcaagtgggaagtggagcaaacgctgagtacactggaattgttgactgcgtcaccaagatcgtcaagaatgaaggattctcacgtctttatagaggtatctctgctccaattcttatggaggcacctaagagagccacaaagttcgcagccaatgacgaatggggaaagttttacagaaatgcctttggcgttcaaagcatgacccagtcgttagctgtactgactggtgccaccgctggtgccactgaatcgtttgttgttgtgccttttgagcttgtgaaaattagattgcaagacaaatcgtctaaatattccggaatgggagatgtggttaaacagatcgtcaagaaggaaggagtattgtccttgtacaatggtctcgaggctactttgtggcgtcatatctggtggaatgccggatactttggtgtgattttccaagttagaagtctgttgcctaagactgagagcagcacccaaaagactgccaacgatctgttgtctggtgccattggtggtactgtcggtaccatactgaatactccatttgacgtggtcaagtctcgtatccaaaacactgtcaaggttcctggtgtggttccgaagtataactggactttaccatcgttgctgctggttaccaaagaggaaggtttctcagctctttataaaggattcctacctaaagtgttacgtctaggaccaggaggaggtatcttactggtggtatttaccacttgtatggactttttccgaaccttacagtag

SEQ ID NO: 888 - DNA, 546 bp, Pichia pastoris
atgtccagtactaacacagttcctccagtgtctcaatacaaagaattcgaagttattggccgtcgtctgcccactgagaccgttccagagccaaagttgtaccgtatgaccatctttgctaagaacgaaactattgctaagtctcgttactggtacttcttgcagaagctgcacaaggtcaagagagcttctggtgagatcgtcgccatcaaggaagtccttgaggagcgtccaactgaggttaagactttcggtatctggattagatacgactctagatccggtactcacaacatgtacaaggaataccgtgatgttaccagagttggtgctgtccaaggaatgtatcaggacttggcttccagacacagagctagatttagatctatccacattctgaaggttgttgagttgactaacgacgacgacatcaagcgtcaatacgtcagacaattcttggagaaggatctgaaattcccattgccacacagagttcctaagactcaggcactttatgcttctaagcgtccatccactttctactaa

SEQ ID NO: 889 - DNA, 306 bp, Pichia pastoris
atgtcctttgtcattagaagaaaactatccactttgatccctccaaagatcgcttccgcaaagaacctgggatccaaccctcacgctaagaagatccaggaggtcgtcaagttctacaaggctcttcctcaaggccaagcctctttccctaaagcttcttcgccaattggaaaatacggagagaagtacttcaacgacggaaacgcttcagctaagccattgttgcacttggctttaggtgttattcttttcggttactccttagaatactactaccacttgcgccatcacaaaggtgaacattag

SEQ ID NO: 890 - DNA, 1311 bp, Pichia pastoris
atggctatttcaaaagtatttgcccgttacgtctacgactccagaggaaacccaaccgttgaggttgacctctacactgaaaagggacttttcagagcaattgttccttccggtgcttctaccggtgtccacgaggctctggaattgagagacggtgacaagtcaaagtggctcggtaagggtgtcttgaaggctgttgccaatgtcaatgacatcattgctccagctatcgttaaggcaaacattgacgttaaggaccaagaggccattgacgctttcttgaacaaattggacggaactccaaacaagggtaagttgggtgccaatgctgtccttggtgtctctttggctgccgctaaggccggtgccgctgagaagaacgttcctctttaccaacacattgccgacctgtccggtactccaaagccatacgtcttgccagttccattccagaatgtcttgaacggtggttctcacgctggtggtgctctagctttccaagagttcatgattgttccaaccgatgctccaaccttttctgaggctctgagaattggtaccgaggtctaccacaacttaaagtctttggctaagaagacttacggacaatctgctggtaacgtcggtgacgaaggtggtgttgctcctgacatttctactccaaaggaggctttggacctgatctctgccgccattgagaaggctggctacaccggaaagattggtatcgctttggacgttgcctcttccgagttctacaaagacggcaagtacgacttggacttcaagaaccctaactctgacccatctaagtggttgagtggccaggagttggctgccctgtacaaggaattgatttcccagtacccaattgtatccattgaagatccatttgctgaagatgactgggctgcctggtctcactttttctctactgtcgacatccaaatcgttggtgatgacttgactgttaccaaccctatcagaatcaagagagctattgaggagaagtctgccaatgctttgttgttgaaggtaaaccaaattggtactttgaccgaatctatcaaggctgctactgactcttatgctgctggctggggtgtaatggtctcccacagatctggtgagactgaagataccaccatcgctgacattgctgttggtctgagagccggccagatcaagactggtgctccagccagatctgagagattggccaagttgaaccaaattctgagaattgaggaagaacttggtgacaaggccatctacgctggtaagaacttccacaaatctgttgctatctaa

SEQ ID NO: 891 - DNA, 615 bp, Pichia pastoris
atggcctccccttcatccaagatccatcatgttactaacaaatccagggctaatttgcgtactcaaaagagacttgcagccagcattattggtgctggtaagaagaaggtctggttagacccaaacgagactgagcaaattgcacaggccaactccagagaggctatcagaaagctgtacaaagacggtttgatcgtcaagaagcctcctgtgggacactccagagctagagctagagcttttgccgaggctaagcgtgctggtagacacaccggttatggtaagagaaagggtaccgctaacgcccgtatgtccactcaaaccttgtggatgagaagattgagagttcttagacgtttattggtcaagtaccgtgacaacggtaagatcgacaaaaccttgtaccacactttgtacagagagtctaagggtaacgctttcaagcacaagcgtgctttgatcgagcacatcatccaggctaaggccgaggctgcccgtgagaaggttctgaaggacgagtctgaggctagaagagccaagaaccgtgctcaacgtgagagaagacaacagagacaggctgagaagagagaggctttcctgaacgaggaagcttag

SEQ ID NO: 892 - DNA, 1161 bp, Pichia pastoris
atgtcaaaaaacgctcaggttgacgatcttgcccatgggcttgcaggtgccggagggggaattctctcaatgattatcacttatccccttctgaccctatcaacccatgcccaatcttcaaaaacccagaaaccactagatggctctgtagatgagaaggaattggagcccaagaagtcttcaacttacggtactctaaaacggattttgaaaaagcagggagttcggggtctctacaacgggctggaaagtgctatccttgggatagcagtcaacaacttcatttattactacttctatgagctaactggaaacactttggaaggcttgtcccgtggtagaaagagaggttccagagttggtggtctctctgcattccaaagtattgttgctggagctattgctggtgtgatttcccgtattgccacaaatcctatctgggtagcaaataccagaatgactgttctttccagagaacagagagatctgaagagggtaaacacattgcaggcaattttgtacatcttcaagactgagggattcaaaacgctgttcagtggcctcattccggcattgtttttggtcctgaacccgatcattcattacacgatttttgagcaactgaaaacactactggtaaagacaagaaagagagcgttgactcccttggatgctttactgttgggtgcttttggaaaacttatttcaacggtgatcacctacccctacgtcaccctgagaactagaatgcatttgcaaaacgctgagaatgctaggaattcttccggtgagagctcagtcagcaattccgctgttctttcggccacgtcagacgaagacttgggcaaagagggcgacaacgagaaaaagattgcccaggaacaacctaccaacactatttggggcctttccacgaaaatgttaaaagaagaaggaatatcaagtttctacagtggaatgtctgtcaagttatcgcagtcaatcttgtcagctgcctttttgttctttttcaaagaagagttggtatcagccagtgatgtggcaattaaggcggtgaaaaaggtcgactacaagtctttcttgaataaccccgctcaagtagtgcctgatttgaaccctgcaccatctcccaatgctgacggctctccagtggatatttag

SEQ ID NO: 893 - DNA, 621 bp, Pichia pastoris
atgtccgtgtttacgccaatagaggacgccctgaaggcttacaaaaatggagaatttctcatcgtgatggacgatgaagacagagaaaacgaaggcgacctgattgttgccgcagaattgataacgacacagaaaatggccttcctcgtgaggtattcctctggatatgtttgcgttccactttccaccaagagagctgcagagttagaactaccaccgatgatcaagaacagaacagacaggcagggcactgcgtacacacacactgtggacgccagagatggcactaccactgggatttccgcctctgacagagcgttgacctgccaggttttggccaaccccaggtcaaaacccgaagagttgatgagaccgggacatatttgccctctgattgcacgagaaggcctgttgaaagagagaagagggcacacggaagctgctgttcaattgtgtgaattgaccggattacaacctgctggagtgataggagagctggttcgtgacgaggacggctctatgatgcgattagacgactgtgttcagtttggtctccgccacaacgtaaaaattatcaaccttgaccagatcattgaatacatggattccaagaacagctag

SEQ ID NO: 894 - DNA, 1683 bp, Pichia pastoris
atggctgaaataacactaggaacttacatcttcgaacgtctgaagcaaatcgacgtcaagactatctttggtgttccaggagatttcaacttggctttgttggatcacatctatgaagttgagggcatgagatgggcaggaaacgccaatgaattgaacgctgcttacgctgcagatggttattccagagtgaagtcaatggctgctttgatcaccaccttcggtgtcggtgagctcagtgccgtcaatggtatcgctggttcctttgccgagcatgtcggtctgctgcatattgtcggtgtcccagctatctcttcccaggagaagaagctgttgcttcaccacaccctcggtaacggagacttcggtgtcttcaagcgtgtcttcaagaacgtctccaagtctgccaactttatctctgatatcaacgaggctcaagatatgatcgacggtgccatccgtgaagctttcatttaccaacgtcctatctaccttggactgccaactaaccttgtcgagatgaaggttgacagaactcgtttgaacaccccaattgacttgaagccagttccaaacccagtcgaggctgaggaggaggcattacagtccatcttggaactgatctcaaaggcttcaaagccagttattctggttgatgcctgtgcatccagacacttctgtcaaaaagaggttgaccaactcattgacgtcaccaacttcccagtctttgtcactccaatgggtaaaggtggtgttgacgaacaaaagccacagtttggtggtgcttatgtgggttctctgtctaacccagacattacagagttcgtggagaaggctgatcttgtcatctctgttggtgctcttctgtctgacttcaacactggatctttctcttactcccactccaagaacattgttgagttccactctgactacactcaaatccgtagtgcagtgttccaaggcgttcagatgaaggccctattgcaaaagctgttaccacttgtcggtaaggcatctaagcacattactgctcaagttcctccaaagattgctcctcctatcgaaaagggtgccagcgaagatttgacccaggactggttgtggagcaacatcagcaagttcctcagagctggtgacgtcgtcatcacagagaccggaacctctgctttcggtatcgttcaatcaagattcccaacccacgtatctggtatttcccaggtcctgtggggttccattggtttctccgtcggtgctaccctaggagctgtctgtgctactgaggagctcgaccccaacagaagagtcatcctgtttgttggtgatggttctttgcaactgaccgtccaggagatttccactatggctcgctggaacttgaagccatacctgttcatccttaataacgatggttacactatcgagagattgattcacggtgagaaggcttcttataacgatattcaaccatgggaccaccttaagctgctagacacctttaaggccaagaactctgaaagtactagagtctctactgtcggagagttgaccaaattgttcaaggaccaaggtttcaacaagcctgacaagatccgtgtcatcgagatcatgttggagactatggatgctccaatttccttagtcaagcaagctgaaatcactgccaagaccaacgcagcttaa

SEQ ID NO: 895 - DNA, 909 bp, Pichia pastoris
atgcatagaacttactccctacgttcaggccgtgctcctacggctgctgatgtcaacaaccctccaccacctacctctactaccaagagcaagttctttggtaaaaactccattgcttcttctcttcgaaaaaacgccgctggcgcttttggacctgaattgtccaagaagttggctcaattgatcaaaattgagaagaacttggagcgatccatcgagcttgttgccagagagagaagaactgttgctaagcagttgtctctgtggggtgaggaaaacgatgatgacgtgtctgatgttaccgacaaattgggtgttctcatttacgagattggtgaattagaagatcaatttgttgacaagtacgatcaatacagaatcactctgaaatccatccgtaacatagaatcttctgtccaaccatccagagacagaaagcaaaaaatcaccgatgagattgcccacctcaagtacaaagaccctcaatctccaaagattccagtcttggagcaagagctcgtccgtgctgaggccgaatctttggttgctgaggctcaattgtccaacattaccagagagaaactgaaggctgctttcaactaccaattcgacgcccttgctgaattgtctgagaagctagcattgattgctggttatggtaaggctttgctagagttgttggatgactctccagtcactcctggtgaaaccagacctgcctatgatggttacgaggcttccaaacaaattattatcgatgctgagaatgctctttcctcttggactcaggacaatgctgctgtcagaccgtcactttctatcagaaatagtgaatatgatgaggagcccaacgaagagtgggaagaaaaggaagagggtgacgaaactcgtgacgaaactcaagcctaa

SEQ ID NO: 896 - DNA, 1974 bp, Pichia pastoris
atgggtaaatcaattggaattgatttgggtaccacatactcttgtgtggcacattttgctaatgatcgtgttgagatcatagctaacgaccaaggtaacaggacgactccatcgttcgtcgcctttaccgacactgaaagattgattggtgatgctgcaaagaaccaagctgccatgaatccagctaacactgttttcgatgccaaacgtttaatcggtagaaaattcgacgacccggaaactcaggccgatattaagcacttccctttcaaagttatcaacaaggggggaaagcctaatatccaagtcgaatttaagggtgagactaaggttttcagccccgaagagatttcctccatggttctaacaaaaatgaaggatactgctgagcagtatttgggtgagaaaatcaacgatgcagttgtcactgttcctgcttacttcaatgactctcaaagacaagccaccaaggatgctggtttgattgctggtttgaacgttcaaagaatcattaatgagcccaccgctgccgcaattgcttacgggttggacaagaaggatgcaggccacggtgagcacaacattctaatcttcgatctaggtggaggaactttcgatgtttctctactatctattgatgagggtattttcgaagtcaaggccaccgcaggtgacacccacttgggtggtgaggacttcgataacagattagtcaaccactttatcgccgagttcaagagaaagaccaagaaagatctttctacaaaccagagatcccttagaagactaagaaccgcttgtgagcgtgcaaagagaactttgtcttcttctgctcagacctccatcgagattgattctttgttcgagggtatcgacttctacacctcgatcactagagctagattcgaggagctctgtgccgacttgttcagatccaccatcgagcctgttgagagagtcttgaaagactccaagttggacaaatctcaagttcatgagattgttttggttggtggttctaccagaattccaaaggttcagaaattagtttctgactttttcaatggtaaggagccaaacaagtccatcaacccagacgaagccgttgcatatggtgctgctgtccaagcagctattttgtctggagatacttcttccaagacacaagacttgttattgctggatgttgctcctctatctttgggtattgaaaccgctggtggtatcatgaccaagctgatcccaagaaactccacaatcccagccaaaaagtcagaaatcttttcgacatatgctgacaaccaaccaggtgttttgattcaagtctttgaaggtgagagaactagaaccaaggacaacaacctgttgggtaagtttgaactttctggtattcctcctgctccaagaggtgttcctcaaattgaggtcaccttcgatatggatgccaacggtattttgaatgtatctgctgttgagaagggtaccggtaagactcaaaagattactattaccaacgataagggaagattgtccaaggaagacatcgagagaatggtttctgaagctgaaaaattcaaggatgaagacgagaaggaagccgagagagttgctgccaagaatggcttggaatcatatgcttactctctgaagaactctgcagctgaatctggattcaaggacaaggttggagaggatgatcttgccaagttgaacaagtcagttgaagagacaatatcttggttagatgagtcacaatctgcttccacagacgagtacaaggacaggcaaaaggaattggaagaagttgctaacccaataatgagcaagttctatggagctgctggtggagctcctggtggagctcctggtggcttccctggaggtttccctggcggagctggcgcagctggcggtgccccaggtggtgctgccccaggcggagacagcggaccaaccgtggaagaagtcgattaa

SEQ ID NO: 897 - DNA, 1479 bp, Pichia pastoris
atggttgaagcaacaggagatattggccttattggattggccgtcatgggtcaaaacctgattttgaacgccgctgatcacggtttcaccgtcgtcgcttacaacagaaccgtgcagaaagtcgaccattttttggccaacgaagccaagggaaaatcaatcatcggtgctcactccattgaggaattggttgccaatttgaagagacctagaagaatcataatattggtcaaggctggtaatcccgttgatgccttcatccaacaattgctacctcacttggaccaaggagatatcatcattgatggtggtaactcccatttccctgacaccaaccgtcgttacgaggaattaaagcagaaaggtatccattttgttggatccggtgtctctggaggtgaggaaggtgccagatatggtccttctttgatgccaggtggtgctaaagaggcatggccacacatcaaggaaatctttcaatctattgcagccaaaactgatggtgagccatgctgtgactgggttggtgatgccggtgcaggccattatgtcaagatggtccacaatggtatcgaatacggtgacatgcaattgatttgtgaagcctacgacttgttgaagcgtgttgcccgtctgccagacagtgagatctctaaggtatttgccaagtggaataagggagtcttggactctttcttggtcgagattaccagagatattttggcttacaacgacgatgatggaaagccacttgttgagaagattctggactctgctggtcaaaagggtaccggtaagtggaccgctatcaacgctttggaccttggtatgccagttaccttgatcggtgaggccgtctttgccagatgcttgtcagcaatcaaggacgagagagtcagagcttctaagatcctctctggtccttctgttcctgagaacgctattactgataaagccaagttcattgacgacttagaacaggctttgtacgcttccaagattatttcctacgcccaaggtttccaattgatcagagaggctgccaaggagtacaaatgggacttaaacttcccatccattgctcttatgtggagaggtggatgtatcatcagatccgttttcttgggtgagatcactgctgcttaccgtgagaacccagacttggagaatttgctgttccacccattcttcaacaatgccatttctaaggctcaaagcggatggagagcaactttgggtaaggctattgagtttggtattccaacccctgccttctccactgctctgtctttctatgacggttacagatcggagaagcttccagccaacttgttgcaagctcaaagagattacttcggtgcccacactttcaaggttcttccagaagaggcaaatgagagactcaaagttggtgactggatccacatcaactggactggaaagggaggtaatgtttctgccagtacctacgatgcttaa

SEQ ID NO: 898 - DNA, 840 bp, Pichia pastoris
atgggacagctttttcgcaaaattattcagtggattcccctcttgttttttgcgggatccgtgctactgcaattcttcgtgatcctaagtggagcacgaacaactggagttctaaaggacttctattggctagaggtggagggtaccggtgccattgacccccagtttggaaccacccgctggacgaactacagaatgtgcaactgggagaatgacgagttgagtaactgtgaaggtcctcagccagcttatcctttctccccagataacaattttagcgatggtgaaaacagagcgctcattccgagcgactttatcaatcaccgagacacctattactaccttagtagggtcggttggtcaatgcttcttgtgggtctggtctttaccgtgttttccttcttcagtactctactcagaatttttctcaagtggaaactggtttcgggacttaattggctcaattcggtgtttgccgtgtttttcgtcgctttgggcgcaagtttaatgacagctgcatacgtcaaaggtcgcaattcgtttaatgacgcttcagagttcgatgccagtttgggagtgaaaatgtttgcgttcctatggacttcattagctttgctgctcctgagcttgccgatattctgtttcaagaagcctctttcgtccttccacggtggtaccggaaccgccagccacgacgatagtatcgaatacaaggaggattacatccctccagctacaggtgacgcctacaacccggaaccagccggcgactacccccctactcagaagcgtaagttgaatttcttcaagatcaaccgaaaaacgaccattgaggattag

SEQ ID NO: 899 - DNA, 660 bp, Pichia pastoris
atgagcaaatcggcactacttattattgatttacagaacgactttctagaaggggggtcattggctgttcctgacggaaatgagatcatcgatccaatcattgagctagctcagaagaaggattgggatttagtcattgccactaaggattggcatccccaggaccatacgtcatttgcctctaaccacggagtcaagccgtataccgagctagagttcacaaacccagaaaatgaagcggaaaagaaaattcaggtggtgtggccggatcattgtgttcaaaactccaatggaagtgaatttccacctaagttcaaggccttttgggaacagtttacagggcctaaagagctagtgaagaaggggtatctttccgatagggagtactattctgcatttagtgacgtttggaagctgcacaaaaccgaactggattcgcttttgaaagggcatggtattcgaaatgttacaattgtaggtcttgctcttgatttctgcgtatttcacactgccagtgatgctctccgagagaactattcggtaacattggtgactaacctcaccaggagtgttgccgatcgcgaaggtccgccctccaagctacaatccctgggagcacatctcgcagagtacaacggcagcgaaattattatcaaatag

SEQ ID NO: 900 - DNA, 858 bp, Pichia pastoris
atgagcagattgatcgttgccctccacactgtgctaaaaagattcaaagaaatgggattgtttacagactcagacaaagacaactcagataaattatcggaaagcagttcatccacgtcaagcaattggcttgacagatatctttccattgccagggaggccaaacattcccttgcaagcaagatcgaagatgtcgctctacctggagaagacggaacattgtttaacaagaatatcgacacaaatcgaccagattcaattttcagggccgtctttggagacgattttgagacgacttttaataaagttgactctttggtcaatgctattgccccagtttttgatcaagatgtatggtcagaacttttcacaggttccaagttggtgtcttctaaatatggtttgtgggcctacccaattccttcgcatcagctttacaaagactgcaactccaaacaaggtttgtccgtttgggacgaacatgggtattggagatgtttgtttccaaaggctcaattgcctgagaactataagagcattgattccaatattataagtaaggaagacgtggagcaggatgattctcataagttaggaaggttttttactaatttctctgactacttgaactggagatcggttatggaggagaacatcaaaaaacagagagtttcgttctctaaacctcaaaagtcttcgggttcttcaacttcctactccgaaagaactctacctaatggagaaattgagaaaattgaaaagaagcatgaatggtttgtggatggaacagaacgctccaaagaaactaagaccatcatccatcctgatggatccgtcacaacagaaaacatcaagtaa

SEQ ID NO: 901 - DNA, 909 bp, Pichia pastoris
atggcagtggtcacattaaagaatgcgattctatcactttttccagcaaacacgtcggattcccaaaacgagcctctactaggggaggattccactggtaatgccggctatgctgctcgggatgtgcagggattagagagtgaaatagagtcgaattcaacaaagacacaaaacatcagcgaggataatcaaaaccagactgtcctttggggtttatttgagaaggtagacccaagagtcatgtcagatattattattgggctttcagacggattaacagtaccgttcgctcttacagcaggattgtcttctttaggggactccaagttggtgattactggtggtatggccgagttagtttccggttccatctctatgggtcttggtggtttccttgcggctaggtctgaatctgagttttacaaatctcaagttcgaaaggagaaacaattatttttcaataacaaggaactgctggaagaagaattagaagacattttccttgatataggtatgtccgaaaccacaacagaatcagcaatcagggatttgtcaaagtctccaaaggcaatgattgatttcattattagacacggaaaaggtttagaggaacctgctgacggaaggcaggttaccagtgctctaacgattggattgtcatacttcttggggggcttcgtaccgttggtcccgtattttttcacggctattgtgcaaactggattgatcatttcagttcttgttatgggagtcacattgttttggtttggataccttaaaacagctatatcaatgggagaggactgttctctgtggatgagagtcagcgagggtctgcagatggtacttattggttcgatagctgctgggtctgcttggggattggtgagagtaattgacactaattga

SEQ ID NO: 902 - DNA, 1890 bp, Pichia pastoris
atgaccgtagagaccaaccaatttacatatctacagggtagcacattcgataagaaaatgacgacattatcgttgaagcaaactgcatatgaattcgtcgaaggcatgacaggtgactaccactacttaaagaaccttgatgcttcagattcaaatctacgataccttaaagattatagttttccaaccttgcaagagttgaatctttccaatttatcctacctgaagaaacttgtgtctgatggagatcaattgagcgggttggaaaagttaactgctgatgggtccaatatcgaacttatcgatattaagggagatgtcctggcaagtatctcctgttcgaacacaaaagagctaaaagcaatcaaaggtgaactgccggcgattaactatatctatgcagacaactccagcttggaatcggtatccttattgccatatgaagacgaaaaatttcagttcaagagaatgttctttctatatttggtcaactgtcccaatctcatatcctttcaaagagggcagtatcccaagcttcggactgtcgatttaagtaattccacgatacaagttcttcattcatctcttataaagcatcttggtgctttatacttgggcaacgcaactattaaagagtttgtaattgacgacaacgacaatgaagatgagctcacccttcggcaactaaaaactttgaatttatcaaattccaggatcccaacaaatatgacagattttcttttaagacatatttttagaaagaagagcaatccctgggataaagaatggtcgtcattgatttggcaatcagtcaatacagatcaagaggtgcaagaggtccagagttttattaagagaattccacagctcaaaaaactggatatatccaattcatcaaaagcaaactcattgctgtccaatctagtgtctgacattccagagttttggaacagcttagaagatttggatgtcttcaattccaacactgagggttttaacttttcaaacagcaaatcattgattcacctgggttgcagcgatcccgatgcaactgttttgaaagttgacgacatgcccgccttgaaggcgctggatgtcttgggaccctctaacattgaaactgtaaagttatccaactgcattagactcgaaaaggttgacttcactggctgctacgctttgaaacgctttgagtcagactctttgagtcttctgcaattgaagttttcaaataactcattggaaacatggtcccttaatgactcctctatcagaagcatcacgttagagaacaatacaggtttcagaaggctagaaggaaatttcccgaatttggaaacgttagatatcagtaatagcgctgttgaagttatcaatattcatgatggtagcaaattgaagaagctcagcattttgagaactcgaagtgttgaagagattcaaattgataatctttcaacactacaagaattgcgctatgacaccaaagacgaaaagaatacgaaagcagtaaaggagtttgcagataagattttatcaaagagggaaccaagttttacagccaaggtactccaaagagtccgctttgaacacaggggcttattcacaggtgggttcaggttttttgatagaagaactgaggaactggtttgctgctttaaagatatcaacatttccgaaaataagatcaatgcaaaatgtggcatctgtgaggaaaactacgaggaaggtcagaaatgtcagattctctattgcaagcatgcttttcatactgattgcgtagaacagatgctacaaatgggtaacgataggtgcaggcattgcaacgatgaaattgacattgcctcagtaggtctaagtagcgatccattgccctttagatggttgtaa

SEQ ID NO: 903 - DNA, 1812 bp, Pichia pastoris
atgtcaagtattttcataagtttcttcaaacttgtgcaactgcggtttcgatattactggaatgtgctagcgtcttttttccccttactcactttactgtctgatgggctaaatcatgtgttgccacctaccagaaaaatctcgtcagacagtgaggaatcacacgagttggatgacaaaaaatctttatttccagaaagtcaacaacgtatcacccaaataaaggttttcaagaacgttcatccatgttccttgactttcaacaccaagttagttcccttcaaaaactcaaacggagaaatggaatggaaatttgttgaggataacgaaagtgcagagaagtctcccagtttgatggaggatggtttaagtgagtcgttatcgccatttatggccgatagtactcaggactctgatgttcacctaatgtttggcaccccgtttttagttaaagaagaacaacaacaacacaaacaagaacaacaacaactacaggaacaagagcaagaacaccagcatcagcaacatcaacaaaaccttccaagctcaagtaattcgaaggatggtagtcaggatcacagttctttggccgaatcgtccaaggagcttaacattcataaaaggaacagaagaaagcgtgtctctagtgtagtgacttcagttaccaatggagaaacctactaccattgctccgaatgtccttctaaatttaagtttcgtggatacttaacgcggcattccaagaagcattcacaacgtaaggcttatcattgtcctttctatgaatcaggccatggcaaatgcagtttaggtgagggtttttccagacgtgatacctacaaggtacatttgaaagctatgcacttcaagtaccctaaaggtgtgaaatgcgctgatcgaactggtatgatggggtggtgtggatcatgtggtcagagctttcagaacaatgaaatctgggttgagaggcatatcgagaagggtgtctgtcgaggtcttccagaaggttacagtagtcgtatcatgacacgaaatcgaaagaaaacaggaaagcagtcatctctattgaatgtcgctaacaacggtgtcaacgaaaatccaatgctcaaactagttatggatggagaagtagtttcagcccccaagttggaggatgtgacacatctacttggtgagtctggctccacgaacacatggactgaaaactcagaaaatgcaagccgaacttcttcgatacacgacttaagtgatcactcctctgctagtgactctttaagcggacatacgagtggggaatcgcttgcaggctcaactaacgattctagctctcagtctttagatgaagcgataaatcccattggacacccagtggatcggtcgttattcgcccatccaaattccaatggggaaatgtttgggaggtcttggacggcaagagagtcaagtttgcactcagttgttgatccttttggtggacaggtgcaagcacaggtgcaggcacagatttacatgaagtcccaggcagattcacaggtgtctcagagcgactcccagaaacaggtaaactttcaaactaactttcagcagattccccaaaactttgagaattctgtaccactagctatgccaataggcgatgatgattttcctgcattggatggagaaaatgcgtatattgccctattacaacaacatcggcagctccctgattcaaggccagagcgcgccaagcctgctcacttaggccaagatccattatttcatccaaacatgcatgtttcgtggcttagccaacctgatcttacattttag

SEQ ID NO: 904 - DNA, 1089 bp, Pichia pastoris
atgttaaaactgtacgcaataaggccaattaggccaatcaagccatgccttgtggcttccactttcaggcactattcggtgaaagtcgacacgtccaacaaagccgatgtgataaaagactcacaaacagataccacctccaaaccaggagctgagcacggacacacgttggggcaatacatcacaaagaaactgatggttcggcagagactgcccacagagaaaagagatgattccttcttgactcctccggctatgccacatcatggctatcgtcaagatctaatggagaaaatccactacgaacacagggaacccactttgatcagagataagcttgcgttcggattgatgcgtagtctcagggtttgcttcgacttcttttcgggctacaaacacccaaagactaaagaggggcttgaaaaactcactcctgcgacttatcagatgaccccagagaaatggttgactagattcataattcttgaaagtattgctggggtgccagggtcagttgcatcgtttctgcgccacctgcagagcttgcggttgttgaaacgtgataaggctttcattcaaacattacaagatgaagcatacaacgaaagaatgcatctcttaacgtttttagaaattggaaaaccaggaccgtttatgaaagttctactgtacgcaagtcaaggtgtgttttgtaatctgttctttttcacatacatgcttgcaccaaatgcatgtcaccgattcgttggttacttagaggaggaagctgtgtatacttacactacctgtcttgaagacattgagagaggtctattgcccgacattgaacatttcaaagtccctaagattgctaaagattactggcatctgtcggaagacgccaaaatgagagatttgatcagctacatccgtgcagatgaggcaaagcatcgtgaagtcaaccacacctttgccaacttaaagttggatggaactgaccgtaacccttttgcattgcaggttgattcagttcccgaatcggcacagccgaataacagattgagcacccacaaagctgtcggatgggaaagagatgagctcgttttatga

SEQ ID NO: 905 - DNA, 1683 bp, Pichia pastoris
atgccgtctctattgcaagaggacaatgctactttcaagctcgcatccgaactaccagctttcgaagagctaaaagagctttataagtcaaagggaaagaacttttctgccaaacaggctttccaaaaggatccagccagatcttccaagttcagccacactttcaagaacttcgacgggactgaggtgtttttcgacttttccaagaacttgatcgatgatgagattctcgccaaactgttcgacttggccagacaggcaaacgtcgagaaactccgaaacgagatgtttgccggagaacatattaatgtcacagaggacagggctgttttccacgtcgctctgagaaacagagctaaccgcccaatgtacgttgacggcaagaacgtcgccccagaagttgatagtgttttgcaacatatgaaggagttctctacgcaggttcgcgatggtacctggaagggatacactggtaagcagatcactgatgtggtcaacattggtatcggaggctctgacttgggtccagtcatggtgacagaggcattgaagccttacgcccaggaaggactgcatgttcacttcgtatccaacgtggacggtacccatattgctgagactctaaaatacttggatcctgagtctactcttttcttgattgcatccaagactttcacaaccgctgaaaccatccgtaacgccaatactgctaaggactggttcctttcgaaaactggtaacaaaagtgaggcaattgccaagcattttgctgctttatccacaaatgccgaggaggtcgcaaagttcggtatcgacactaagaatatgttcggttttgaaaactgggttggtggacgttactctgtgtggtctgctatcggtctttcagttgccatctacattggttttgacaactttgaggacttcttgaagggtgccgaagccgtggacagacatttcctggaaactcctctggagcaaaacatcccagttattggtggactactctccgtttggtatactaacttctttggaagtcagacacatttggtcactccatttgaccaatatatgcacagattccctgcctacttacaacaattgtccatggaatccaacggtaaatctgttaccaagggcaatgttttcgccaactacagcaccggccctgtcgtctttggtgagccaacaacaaatgctcaacattcattcttccaattggtgcatcaaggtactcatttgatccctgccgatttcattttggctgcaaaatcccacaaccctgttgcaaacaacgctcaccaaatcttgttggcatctaacttcttggctcaagccgagtctttattgctaggaaagactgaagaggaagtagctgctgctggtgctactggtggtctaattccacacaaagtattttcaggtaacagaccaactacatctattctgacacagaaaatcactcccgcaaccttaggttctttgatcgcttattatgagcacgtcacattcaccgaaggagctatatggaacatcaactcatttgatcaatggggtgttgagctaggaaaggttctagccaaggctgtccagaaagatctgcaggatgacagtgccaacgttgaagaaagccacgactcatccactgctcaattgatcaagaagttcaaagcttgggcttaa

SEQ ID NO: 906 - DNA, 768 bp, Pichia pastoris
atggctctaactaaaaagccggtgataaaacctatttttatctctaaccttgaccagatcgagaaggtagagaaggtagagaaaacgagagaacaggctctgaatgacatcagggaaaagctaaaatccaacaaactgaaacaagaggaaaaggcaagagaggaaaaggagaagcaggcaaccgtcatgtcttggtctccttcaccaattgtcgcaaagaaaagttccagttggggttcacagagttctgggagtagtggcagtggtactgagtctcctgcgataagagactttaggcgaaaacagtcacgagaattgtttggggacttcaagttgaacatccctttaaaacaatccaaatctgctcagagtatcatggtgctaaactcagataactctagtaattcatctaaacgaccatcgtttaacaaaggtcgctcagagagtgttcttcagtttacggcttcaaacaacaaactggattctatttggttacacaagatgaccaccatctcaagacagcattcagttgtttcgtcccttgatggacaagatccgaacgaggaggacgacatcatggaagatgttgaacaatttcatgtggtatcagggaccactaccccattggacatccccagcagctgccatcattcaccaggggactctgagtatttggatgacgcagatttcgtcgccgtctctccgaagtcgcaaccccccagtatgagtgacttagcagactactacaatcagaaccagttcctttga

SEQ ID NO: 907 - DNA, 1074 bp, Pichia pastoris
atggacagtattttgaccaatcggtgtttaacgccggtaagcaatcacgagaccttcaatttggttggtggttctaaatcattgacctctgcagagaccaggaaaaactctgacgaaaggtcttctatatcaattccttcaccacccttgtctccttaccagaggtcgttagacgtcgaaagagaccacaagatctttgacgttgtgggaagaagcaatgatcaaattgttggtgattttgaagaaccagcaacaaagactcaaacggaacaattagaggaaggcaaacctgacgatgctccaaaaatttcttcttcagtgctgttgtctaaccagacatttcctatcaaggatttgacgaatgcaaagcttaccgtcaatgcctgggcctccattaacagtggagattcttctttcaaggaaaatcaattagtttttcttgacagctattataacatcatcgataccagaaaaaagagagctcccaggaggaaatatccaactgctcaaccaagaagaagagtcttcttctcagcatcagaaagtgagactccaaacgagagagtcagaaccagaagagtcattagagacaacgttaagtattctgactatgaatcagaggtggaaatatcaaggccttccacgccaaagagatctacgaagagagtcagtaaaccttccactccacaaccgcaattttactctgattatgagtcgattcctgattattcaccaccattgtcaactcttcccccgaataacaccaaagctttaaaagcagagtggaagggacaacctatgaatctatcagatgatcctttagttggcaaacttcatccagctgaggtcactctagcttccgtattgagactcccttgcaatgtctatctggattccaagaggagactattttctgagaaagttagtcgattccgccttggtcttccattcagaagaactgacgctcaaaaagcttgcaagattgacgtgaataaagcaagtcgtttatttgctgcttttgaaaaagttggctggttggacgactatcatttcagaaagtttctcgatatgtga

SEQ ID NO: 908 - DNA, 1335 bp, Pichia pastoris
atggtcaaacaagtactcttattaggatccggctttgttgccaaaccaactgttgatattctctccgccaacaaggacattgaagtcaccgttgcatgcagaaccttagagaaggccaaggagttagctggctccgttgcaaaggctatttccttggacgtcaccgatgaagctgctttggatgctgctgtatctcaggttgatttggtcatctctttgattccttatatttaccatgccactgtcgtgaagtctgccatcaagaacaagaagaacgttgttactacgtcctacatcaaccctcaattgaaggctctggagcagcagatcaaggatgctggaattgtggtaatgaatgaaatcggtctggaccctggtattgaccatttgtacgctgtaaagactattgatgaagtccaccgtgccggtggaaagatcaagtctttcttgtcttactgtggaggtttaccttctccagaagactcagacaatccattgggctacaagttctcttggtcatctcgtggagtgttgttagctcttaccaaccaggccaaatactggaaagatggcaaaatcgaggaggtctcttctgaggaattgatggcatctgccaaaccatacttcatctacccaggatttgctttcgtctgttaccctaaccgtgattcaaccacttacaaggaactctacaacattccagaggctgaaaccgtcatcagaggtactttgagattccaaggtttcccagagtttgtcaaggttcttgttgacttgggattcctgaaggaagacgccaatgaaattttctccaagcctattgcttggaaagatgccttggcacagtacattggtgctccttcttcttctgaagctgaccttgtgtctactatcgcttccaaagctactttcaagaatgaggctgatcaacagagaattatcaacggattgagatggttgggtcttttctctgacaatgccattactccaagaggtaacccattagacacactctgtgccactctagaagagctgatgcaatttgaggagcacgagcgtgacttagtctgcctgcaacacaagtttggcatcgaatgggccgatggctcctctgaaactagaacttcaactttggttgagtatggtgaccctaagggatactctgctatggccaaattggttggtgtgccttgtgctgttgctgtcgagcaagtcctggacggtactttaagcactccaggtttgtgggctcctatgactcctgagatcaacaatccattgatgaagactttgaaggagaagtacggtatcttcttgactgagaagactttatag

SEQ ID NO: 909 - DNA, 1152 bp, Pichia pastoris
atgacttcaaataggccattaccgctctttgcctctgctgatgttcagaaacacgtgagtccaaaggattgttgggttacgctatatcataggaaggtttacaacgttacagagtttttggaggagcatccggctggagacgacttgattttggagtatgctgggaaggatatcacacagattatgggtgatcagctaagtcatattcactccgaatctgcttatgaaatgttggatgaagacatgttggtcggatatttggcaacaccggaagaagaaagggaattactttccaataaagatcatgaggtcgaagtgcagctagactccaagggaaatgtagttgaagtcgatattgacctaactgagtttggtgaacttccggctgagggtttactctcgttgaaaacagactatgaacacgacttggttaaacaccaatttttggacttgaacaggcctttgttgatgcaagttttacgtggatcatggactaaggagttttatttggaccaagttcatcgtcctagacattacggaaagggttctgctcctctttttggaaactttttggaacctctgagtatgacagcttggtggattgtacccatggtatggcttcctgtgaatttctattttttctacattggattcaccaatcaaaacaaattagtcgccatggctttttggcttttgggtctatttgtttggaccttcttggaatatgctttgcatagatttttgttccacttggactactatcttccagagaatcaaattgcatttaccattcatttcttattgcatgggatacaccactatttaccaatggataaatacagattggtgatgccacctacacttttcattgtactttgctacccaatcaagacgctcgtcttttctgttctaccatattacatggcttgttctggatttgcaggtggattcctgggctatatcatgtatgatgtcactcattacgttctgcatcactccaagctgcctcgttatttccaagagttgaagaaatatcatttggaacatcactacaagaattacgagttaggctttggtgtcacttccaaattctgggacaaagtctttgggacttatctgggtccagacgatgtgtatcaaaagacaaattag

SEQ ID NO: 910 - DNA, 1086 bp, Pichia pastoris
atgactccccgttctcatattttctttgacatctccatcaacaaccagccagctggcagaataatctttgagctcttcaatgacattgttcctaagacagcagagaattttagagctttatctactggtgagaaaggtataggtaagtctgggaaaccattgcactacaagggttctactttccataggatcattaaggattttatggtacaaggtggtgactttaccaacggtaacggtactggaggcgaatccatatatggagaaaaatttgaagatgaaaatttccaattgactcatgacaaaccgttccttctctctatggcaaacgctggaccaggaactaatggatcccagttttttatcaccaccgttcctactcctcatctggataacaagcatgtagtgtttggaaaagtaattgctggtaaagccacagttagaaagattgaaagaaactccgaaggtgaagctccaattgaacccgttgtcattgaggactgtggtgaacttccagaagacgcagatttgaccatctccgacgagactggagacaagtatgaggaagttctgaaagataatgagaacatagacatcgatgactttgaacaggtctaccaggccatcactgaaatcaaagaattgggtacaaagtatttcaaaaatggtgacaccaaaatcgccttcgaaaagtatcaaaaggctgctaattatttgctggaatacataccatcagatttatcagaggaacagagctctaagttggagctgctaaaaacatctgtcttctccaacgtggcattggctggactgaaagtttccaagttcaaagacacgattaagtatgccacattggtcattgaggatgaatctgcggatgcaaaggccaagtccaaaggctactaccgtagaggaagtgcttacagctcactgaaagacgaagattcagccatctcagatttccagaaagcacttgaattatccccaggtgatcctgcaattagccaatctctacaaagaaccacgaaggccagaaaagaccgtcttgccaaagagaaagctgctttgtctaagttctttgagtag

SEQ ID NO: 911 - DNA, 1641 bp, Pichia pastoris
atgctttcagcacgccccgtcattagaagagctgctcgttctgctgtcgccatcaatgtcgcccgctctgttcctcgcgtggtccgcccattagtttctagaggttacgctgccgccaaggctgctccaaccgaagtttcttccattttggaagagaagatcagaggtgtttctgccgaggctgacttgaacgagactggtagagtcttgtctgttggtgatggtattgcccgtgtcttcggattgaacaactgtcaggctgaagagttggttgaattctcctcaggagtcaagggtatggccctgaacttggagccaggtcaagtcggtattgtcttgttcggttccgacagaggtgtcaaggagggtgataccgtcaagcgtaccggtaagattgttgatgtcccagttggtcctgaactgttgggccgtgtcattgatgctttgggtaaccctatcgatggtaagggaccaattaactctaaggttacttccagagctcaattaaaggctccaggtatcttgccaagaacatccgttttcgagccaatgcagactggtctgaagtctgtcgatgccctggtgccagttggtagaggtcagagagagcttatcattggtgaccgtcaaaccggtaagactgctgtcgctcttgacaccattttgaaccaaaagagatggaacaatggttccgacgagtccaagaaattgtactgtgtctacgtcgctgtcggtcaaaaacgttccactgtcgcccagctggttcaaactttggagcaaaatgatgctcttaagtactctatcattgttgctgccaccgcttccgaggccgctccactgcaatacttggctcccttcaccgcctgtgctgtcggtgaatggttccgtgacaacggaaagcatgctttgatcatctacgatgatttgtccaagcaagctgttgcttaccgtcaattgtctctgttgctgagacgtcctcctggacgtgaggcttacccaggtgatgttttctacctgcactcccgtctgttggagagagccgctaagatgtccgacaaattgggtggtggttctttgaccgctttgccagtcattgagacccaaggtggtgatgtctctgcttatattccaaccaacgtcatttctattactgatggtcaaattttcttggaggctgagctgttctacaagggtatcagacctgccattaacgtcggtctgtccgtttctcgtgtcggttccgccgcccaagttaaggctatgaagcaagttgctggttccttgaagctgttcttggctcaatacagagaagttgctgccttcgcccaattcggttccgacttggatgcttctaccaagcaaactttgaacagaggtgagagattgactcaactgttaaagcagaagcaatatgctcctttggctgctgaggaacaggttccagttatttacgccggtgtcaacggtttcttagactccgtcccattggagagaatcggacaattcgaggaggaattcctggcttacttgaagtccaacgagaccgaggtcttggaggctatcagagtaaagggtcaattgtccgatgaattgttggccaagttgaaatctgctaccgagtccttcgttgctactttctaa

SEQ ID NO: 912 - DNA, 1212 bp, Pichia pastoris
atgtctgaaggtattattgaaatcgacactaacttaatcgagaccaactacgaccaggttgtcagcaccttcgatgagctgaacctgaaggagcaaatcctgagagccgtttttgcttacggttacgagttcccatctgccattcaatctcgtgccattttgccaattgttgctggtcgtgatgtcttggcccaagcccagtccggtaccggtaagactgctacctttgccatctccgctttgcagagattggatgagaagctgaaggctgcccaagttttgatcttggccccaaccagagagttggccctgcagatcaagaaggttgttttggccctcggtatgcacttgaacatctctgtccatgcctgtatcggtggtgttgacccagctttggatgtcaaggccttcaactccggtgttcaaatcgtcgttggtaccccaggtagagtccaagacatgatcgaacgtggagctttcagaactgagaacgtcaagatggtcattttggatgaggccgatgagatgttgtccactggattcaaggagcaaatctacaccttgttcacattgttaccatccactacacaggttgttcttctatccgccaccatgcctcaagaggtgttggaggttaccaccaagttcatgaacaaccctattcgtatcttggtcaagaaggaccaattgaccttggaaggtattaagcaattctacgtcgacgtcggtgaagaacaatacaagttcgactgtctgtgtgatctgtacgactccatctccgtcacccaggccgttatcttctgtaacaccagacgaaaggtcgaggagttgactgagcgtttgaccgcccagaagttcaccgtctctgctatccactctgagctgtcacaaaccgagagagacaccatcatgcaagagttcagaaccggttcttccagaatcttaatctccaccgacttgctggccagaggtatcgatgtccaacaagtctcattggttatcaactacgacttaccatctaacaaggaaaactacatccacagaatcggtagaggtggtcgtttcggtagaaagggtgttgctatcaacttcgtcaccagcaaggacgttgagatgatgaaggagatcgagaagttctactctacccaaatcgacgagttgccatcttccatcactgacttgtttgagactgaggaagttaatgagtcttag

SEQ ID NO: 913 - DNA, 801 bp, Pichia pastoris
atgttattgggatttcaaagattcccaaaattccatacacttactagaaagagtccaatcaattccatcagatccctccgctacaagtttcaacgacctttgcttacccccctatttctttctccaattattaaacagagcatgaaccttgtcaccatttcagactcaatcagagaaaacctcatcaaacacgaggtcattccggatgttatcaaggacaaatcttttgttcctaaaggtctgttgatcatttcctatggaagtccagataaggaagtcgtattgggcaacactcttaaagttgaggatgctcaatcaattcctaagataactttcaccgttaatctcaatgaggaacaggagattgctagtttctttgacgaaaagttcactcttgttgttacggaccctgacgctccatctcgtactgataacaagtggtccgaattctgtcattatgtcgtctccgacttgtcattgagtacaaagtccggaactactgacgctgaggatcaggtgaattttactaccgacttgaaggttgataccattccagaatcggattctaaaacactggttccctacctcggaccaggtccgcctccaaagacaggactgcatcgttatgttttcctcttatataagcagaaacctggtgtttctctagaaggccctgatccaaagaacagacccaattggggtacaggaattccgggctctggtgtctcagactgggctgccaaaaattccttgagtcttcttgctgtgaactttttctttgcccagaacaaggacaattag

SEQ ID NO: 914 - DNA, 1038 bp, Pichia pastoris
atgacgctttccttattattgagaagtactaacatttttagggctcctaccgcaattgaaactcaaactcaaaccactccagctttcaccgaaccccaggttctgaagctcaagcagaatgttagaaacccagactctctggttgctaacgctgttaccccagcttttgactggaacacctttgagttcgctcccatccgtgagtcaaccgtttctcgcgctatgaccaagcgttactttgctgatttggacaagtacgctgaatcggatgttgtgattgtcggtgctggttctgctggtttgtctgctgcttatactttgggtaaggctagacctgatttgaagattgccatcattgaatcaaacgtcgccgttggtggtggatgcttccttggtggtcagttgttctctgctatggtcttgagaaagcctgctcatttgttcttaaacgatcttggattggagtacgaggacgagggagattatgttgttgttaagcacgcagcttactttatcactactctttgttccaaggttcttgctcttcctaacgtcaagctgttcaatgccaccgctgttgaggacttgcttaccagaaaggacgagaacggccagattcgtattgctggtgttgttaccaactggactttggtcacaatgcaccaccacgaccaatcttgtatggaccccaacactatcaacgctaatgttgttttgtcagctactggccacgatggtccgttcggtgctttctgcatcaagcgtggtgtcgagattggtgccgttaaaaaaatggacggtatgcgtggtcttgacatgaacaaagctgaggatgctgttgttaagggtgccagtgaaattgctccaggattggttgttgccggtatggaggttgctgagcactctggttccaacagaatgggtcccactttcggtgccatggctctttctggagtcaaggccgcagaggaagttctgaaggtcttcgatgagagaaagaagcagaaccagcaatgctatggtggactttccgcttaa

SEQ ID NO: 915 - DNA, 4503 bp, Pichia pastoris
atgtacaatccatatggaaatgggggttacgggaatggaatcccacaattccagcagaatgtttatcaaggacagcagcagccccagcagcagcctcaacaacaggctcagcaacaggcccagttccaacaaccgcagcccactggttttcaaccctcttcctcctttggtgtaggcttggtggctcaacaaactggaattcagcctcagggtttgcaaaacaatccagctatgtttcaacagcagcaatttcagccgggtctgcagtctcaacaaaccggatttaacgctcaagttattcaaagtcagccaacaggttattctcaaccaacctcatcggctgctccaactcaaaaagggcatgaactgaagattcctgctattagactgtctttcattactcaacaggaccaagagaaatttgaacaattgttcaagtcttctgttcctcctggtgaaaatgccattgatggctcaacagcaagggacatcctcctccgatccaacattccttcctcgcaattggccgagatttggacattatctgatactactcgttcaggtaaactgctctttccagaatttgctctggcgctgcatctttgtaatgttgtcttgcgaggtgagaacttaccgtttgagttgccaacgacactgaaaaatgaagtttcaagttttgtggatgttatcagttttggtgtaggtgaagaagatgacactcagaataacaatacaccttttagtaacgatctactgtcttcagcgcaaacgagccaacagaatcaacaaaaccaaccattgtcttttcagcaaactggatttcaatcatctaatcaagtgccacaacttccacaaacaagttttggaaatataggaatacaatcccagcctactggactacagcccgtgcctgcgcagaaaacgggtagtttagtacctgtagtaactggggggctatcagcacaacaaactggatttcgaccacttcaatctcaatcaactggctatcagccaccattacagaaccagacaactggttaccaactaccattacagaaccaaacgactggctatcagccaccattgcagaaccaaacgactggctatcagccaccattgcagaaccagacaactggatatcagcaaccactgcagaaccaaacaactggatatcaggcaccgcttcaatctcaaacaaccggctataagccactacaggcccaaacaactgggtttcagcctccattgcagaaccaaaccacaggttatcaacagcctctacaaagtcagaacacaggcttccaacagcctctacagtcccagacaacaggctatcagccattgcaatctcaaaccaccggatatcagcagcccctacagtctcagcttaccggctttcaacagtctctgcaatcccaaccaacaggtttgcaaccgatgccgaccggaaaaccaggtcaatggggatttgttgccacaccaactggtgggctcccaggcctagatatgatgcagtcgcatttcatgcctaactcttccactcagctttcgcaactccaacaaccaatgaatgctcaaagtaacacaaatgttccatgggcaatcacaaagaatgagaagcaaatatatgataagattttcaaagaatgggatcaagatcataaaggctacattgatggtcctagtgcaatttcgatttttggcaagtcaggccttgcgagacaagatttggagaagatttggaatttagcagaccaaaataacaggggaaagttgaataaggacgaatttgcagttgcaatgcacttagtttatagaagattgaacggattagacattcctaatgttcttccgcctgagctaatccctccctcatccaagatcttgaaggagagtctaaatgatatgaaaagtaaatttagacaatcaaactttggaagctcttctaataatttatcaaaatctggaagagatggaacccgattcaagaacaatgatgacgattttgggtataaactctcaatcccggaattaaagaagctggttcatgagaaacaaatcatcctggatgcttacgactcgcaagatactgatgtacagaagcaatctgatcaacttacccaaaagacaggccatgatatagagattcttaaagctaagatcaagaacatacaatctgaactgaatgaaaagcagccatttgactcgaatgctcctggtttatcgaagcgtgatttgaggcaaagaatcgattcactttctgataaagtttcgcacataatggaccagatatttaatgtggaagaacaaattcagaacgctaaaattgaacaagctaggctacgcattgaggaggaaaacccatctggagtcgaacttaaaggtacaggaccaaatggtataattacggagtcagataagcgccatgcaaagtcccgcgccatattgaaatctcgtatggcttcacttacgggtaagacagctccagatatcaatgcgtttgaagcaaatgaggagaagttggctgaggaagttgtacgcattaaggctcaaaccacagaaggcaggtctttgattgaagatgtgcaaaactcgatcaaggatctgaaagattctgcattgaactccctggaggaatctgtcagctcagaagttggctttgagaaatgggaaaaaggacaaggtgtatcttcgaaggaagtcaaagaactgatcaagctactcaatgactcgaaacctaaggtggcaccagtttctgttaagcaggatgttgttgctgagcaagcaccatccaaggtggcctcagtgccagtctcccaagaatctactggatccagcagtgttgcctctgaaccacatgggactccggattcttattcttcctacaagaaccctgcagatagagcaaagtatattaaagagcaagctgagaaaagaatgaatgaaaggctgcaaaagctcggaatttcaagaaaagcaaagagttcttcatctccaccagtgaaccaatcttccccacacgacaaagctgcccagtcacctatccgttccccagtaggtaatgctcaaacttcagaagttatcaagaaaccaactgcgaccagttcagacaacaacgcggagcgtcttcccgaaaaagagaccccggcaaaggaaactgtatcggcaaagaatcctgaatacaaagaggaatctagcgatgacgacaatgacgaagaattgaggaaactaatggaggagaaggcaagactggaagaacagcataagcagaagaagttgaaaaagaaacaggagagagaagcaaaactggctgaacttaggaaacaaatggaagaaatgaggaaggctgaagaatcagatgatagttgggatgaaaagaccccctctcaagttccaacccaacctcctcctcgtgaaactccggcgcaagtccctgtagtgaatattgactcagttaaatcagtacccgagaagcccaaagaaatagttagggaaccagtccctgtcgtacgttctgctacttcaagcgagcataatccattttccaaaccatcaacagacactgcaactccaattcaagtggcctcttcaaatccatttttcaagccccaacaatcagaaccagttgtggatccagttaagattgaggcccaacgattggctcaacgaggtgcagttgctaatgacgacgatgacgattggggtgattcagatggcaacgattctagtgagggtgaagcacctactagaaattcaggaccagcacatttagcaagtttattgttccgaaatggtagccttcctaaagttcctaccacagaaagctcttctgaaaagagagaggttcctgcttcatcacaatcctcgacactaaatttgcaaccagaatcacaagcacagcctactaaaattgagacatcaaaagctggaagctctgattccgattctgactctcagtttggaacgccaacttctggagcagcagatgacactttctcacctcctcctatcccggaagcaccaccagttccccaagcgccaccaattcctcaaggcatcgcacctcctcctgtccctcaaacttcggcaggttcatttagtccccagattgaagcttcaccagctcaacctggaatagtgactaaccattctggaagtagtgtgcctcctgttccgcaaacaagcgttccagcagcacccccttcggcacctcctctgccacagacgagtgcacctccagcacctcctgctccgcccataccacagacgagtgcgcctccagcgcctccagcacctcctgctccgcccataccacagatgagtgcacctccagcacctccaacaccacaaattgctgctccatctgctcccactccaccggccactcttggaggtggactgtctgctcttttgggggaaatccaaggaggaaaagccctcaggaaagttgaccccagtagtcagcacatcagcgaaggcacaactgttggtagggtattatag

SEQ ID NO: 916 - DNA, 453 bp, Pichia pastoris
atgcaaattttcgtaaagacccttaccggtaagactatcaccttggaggtggagtcttccgacactattgacaacgtcaagtccaagattcaggacaaggagggaattcctcctgaccaacagcgtctgatctttgctggtaagcaattggaggatggtagaactttgtctgactacaacatccaaaaggagtctactttgcacttggtccttagattgagaggtggtggtaagaagaagaagaagaagaactacaccaccccaaagaagatcaagcacaagcacagaaaggtcaagttggctgtcttgaactactacaaggttgatgacgatggaaagatcgagagattgagaagagagtgcgacacctgtggtgctggtatcttcatggccaacatgagtgacagacagtactgtggtaagtgccacaccaccatcaagctttctaaataa

SEQ ID NO: 917 - DNA, 1842 bp, Pichia pastoris
atggctgacggtgttttccaaggtgctattggtatcgatttaggtaccacctattcatgtgttgctacttacgactccgcagtggagatcattgccaacgagcaaggtaaccgtgttactccttccttcgttgctttcactcctgaagagagattgattggtgacgctgctaagaaccaagctgctttaaacccaaagaacactgtttttgacgctaagcgtttgattggtagagcctttgatgacgagtctgtccaaaaggacatcaagtcttggccattcaaggttgtcaacgacaacggtaacccattgattgaggttgagtacttgggtgagaccaagcaattctctcctcaggaaatttcgtccatggttttgaccaagatgaaggaggtcgctgaggctaagatcggtcaaaaggtcgagaaggctgttgtcaccgtcccagcttacttcaacgatgctcaaagacaagctactaaagacgctggtgccatttctggtctgaacgttttgcgtatcatcaacgaacctactgccgccgccattgcttacggtcttggtgctggtaagtctgaggaggagaagcacgttttgattttcgatttgggtggaggaactttcgatgtttccctgttgcacattgctggtggtgtcttcactgttaaggccactgctggtgacacccacttgggtggtcaggactttgacaccaacttgttggagttcttcaagaaggaattccagaagaagaccggtaaggacatctccgacgatgccagagccttgagaagattgagaactgcttgtgagcgtgctaagagaactttgtcttctgttgctcagaccacggttgaagtcgactccttgttcgatggtgaagacttcactgctgaaatctccagagctaaattcgaggctatcaacgctgatttgttcaagtctactttggagcctgttgaacaagttttgaaggactcaaagatcgagaaatccaaggtcgatgacgtcgtcttggttggtggttccaccagaattccaaaggtccaaaagctgttgtctgacttcttcgatggtaagcaattggagaaatccatcaaccctgatgaggctgtcgcttacggtgccgccgttcaaggtgctattttgaccggtcaatctacctctgaagagaccaaggacttgttgttgttggatgttatccctctttctttgggtgttgccatgcaaggtaacgtctttgccccagttgttccaagaaacaccactgtcccaactatcaagagaagaactttcaccactgttgacgaccaccaaaccactgttcaattcccagtttaccagggtgagcgtgtcaactgttctgagaacaccttgttgggtgagttcgacttgaagaacattcctcctatgtctgctggtgagccagtgttggaggctatctttgagattgatgccaacggtatcttgaaggttaccgctgtcgagaagtctaccggaagatctgccaacatcactatttctaactctattggtagattgtcttcttccgagatcgaaaagatgatcaacgatgctgacaagttcaagaaggctgacgaggacttcgctaaccgtcacgaatccaaacagaagttggaggcttacgtttcctccattgagtctaccatcactgacccaattttgtcttccaagctaaagagaagtgctaaggacaagatcgagtctgctttgtctgacgctttggctgctttggagctagaagatgcttccggtgatgacttcagaaaagctgaattggcattgaaacgtgtggttaccaaggctatggcaacccgttaa

SEQ ID NO: 918 - DNA, 960 bp, Pichia pastoris
atggctactctattaaaattgaacaatggtctcaaacttccccaagtaggactgggtgtctggaagattcccaacgagttgacagctgagactgtatacaatgccattaagcaaggctaccgtctttttgatggtgcggaagattatggtaatgaaaaggaagtaggacagggtgtccgaagggcaattgatgaaggactggtcaaaagagaagatcttttcatcgtatccaaattgtggaacaactaccatcaccctgacaacgtcggaaaagctcttgacagaactctttccgatttgggtttagattatctggatctattctacatccatttcccaattgctttcaagttcgtaccattagaggagaagtatcctcctgcattttactgtggtgatgggaacaatttccattatgaagatgtgccactgctcgacacttaccgtgcgctagagaggttggtggatgctggcaggatcaaatccctgggtgtttcgaatttcaatggtgccttgttgcaggatcttttaagaggtgctcgtatcaagcctgtcgcattgcagattgaacatcatccttatctagtgcaacagaaactgattgagtacgctcaatctgaagacattgttgttgtggcttactcgtcatttggaccccagtcgtttttggaactgaaggtcaacaaggccttgacggctgtatctttgtttgagcacgatgtcatcaagaagatcgcccaagctcataacagatctgctggtgaagtgttgttgagatgggcaactcaaagaggtctggctatcattcccaagtccagtaaaccagagcgtttgagcagtaacctgcatatcaattcctttgatcttacgaaggaagatttagaaaccatttcgtcgcttgacctcggcttgagattcaacgatccatgggactgggacaagatccctatatttgcctag

SEQ ID NO: 919 - DNA, 666 bp, Pichia pastoris
atgtctgaaacttacgacgaacaagttgttgccgagccagttgaggtccaatacgtggaactgtccaccaagatccctgccgatatcagagagggagctgaggagatcaagctgttcaacaaatggtctttccaggatgtcaccgtcaaggacatctctttgaccgactacattcaaatcagacagccagtctttgtttcccacactgccggaaagtacgccgccaagagattcagaaaggctcagtgcccaatcattgagagattgactaactctttgatgatgaacggtagaaacaacggtaagaagctgttggccgttagaatcgtcaagcatgccttggaaatcattcacgttttgactgaccagaaccctctgcaagttctggttgacgccattgtcaacactggtgctagagaagactccaccagagttggatctgctggtgccgttagaagacaagctgttgatgtttctcctttgagaagagtcaaccaagctattgctctgttgaccattggtgctagagagtctgctttcagaaacatcaagtctattgctgaatgtttggctgaggagttgatcaacgctgctaagggatcatctacttcatacgctattaagaagaaggatgagttggaacgtgttgccaagtccaaccgttag

SEQ ID NO: 920 - DNA, 1449 bp, Pichia pastoris
atgtttgccagactacacgcaaaaagaggttggaagtctcttgcaagagcccgcgttggatcacgatttctgtcgaactccagcattgcccgtgccgctcaaacgaaggacaacaatgatttctacgacgtaaaaaccaagaagaatgacttctttccagtacaggttgacggcattgaatcttccctcggcaagtacgaggagtttgcaaaggatgcccatgaatgggagtcttggaacttacagaacgaggatcatcctgaatatcctgtcaaaaggactaagattcgtcattttaccctgaatttcggtcctcaacatccagctgcccacggtgtgctgagattgattctggaattgcacggtgaagagattctaaggtccgatcctcatgttggtttgttgcatcgtggtacggaaaaattgattgaatccaagacctacatgcaagcattaccatactttgatcgtctggactatgtgtccatgatgaccaatgaacaggttttctctcttgctgtggagaagttactcaacttggaagtaccagagagaggacaatatatccgtacacttttcggagagatcacccgtgttttgaaccatttgatgtctgtgctttcgcatgcgatggatgtgggtgcccttactccattcttgtggggtttcgaagagagagaaaagttgatggaattttacgagcgtgtgtccggagctcgtttacacagtgcttacgttagaccaggaggagtgtcgcaggatttacctgcaggactgttggacgacatttacatgtgggccacacagtttggtgataggttggatgaaacagaagaattgctgactgattcaagaatttggaagcaaagaactattggaattggtgaagtgaccgccgaggatgcccttaactatggtctgtctggagtcatgttgaggggctcaggtgtaccatttgatataagaaaatctcaaccttacgatgcatatgacaaagtggatttcgacattgcagtcggaactaagggtgattgttacgacagatatttgatccgtatgactgagtttagacagtctttgagaatcattgaacagtgctgtaaccagatgccccctggacctgttaaagttgaagattttaaggtagctcctcccccaagagctctcatgaaggaagatatggaggccttaattcatcacttcttgctatacactaagggatacgctgttcccgctggagaaacctacacagccattgaggctccaaagggagagatggctgtttacgtggtctccgatggttctgagagaccttacagatgtaagattagagcacctggatttgcacatttgggagcatttgaccacattgcccgtggtcactttctgccagacgccgttgccattattggtaccatggatttggtgtttggtgaggttgaccgatag

SEQ ID NO: 921 - DNA, 2517 bp, Pichia pastoris
atgattgatgagaagcaattgaatcaacccaaaaggagcgtcttaagacgtctccatatgctgtttctgccattactagctatctcctttttcctgatatatttaagtgatatcacacagcctctcttccgtgcccgaaaggaagacgaaaacccgttggaaatttacttgaaggcattggaaacgaatgaagctcacaaatggtcaaaggtgtacacttcgcagcctcatttggccggaaccaactacggattggttgagtttactaagtccaaatttgaagaatatggatttgaggccagtgtcgatgactacgatgtgtacctgagttaccctattgatcatagtttggaattgtatgagcattctgaggataaaaatgacaagctcttgtataaggcttcgctgcaagaggacgttctctctgaagacccaactacttcaggcgacgacctgatccctaccttccttggttacggtgctaacggcaatgtatctgcagaatacatctacgctaactatggaaccaaagaggactttgaggatttggtggcccgtggtgttccaatcaaggggaagatcgcagtcattagatatggtcaaatatttagaggcttaaaggtgaaatttgcccaagaatatggcgcaatcggtgctgtcatatacagtgacccaggcgacgattatggtatcacccctgaaaatggttacaagccttaccctcatggtaaagccagaaacccaagctctgtgcaaagaggttctgcccaatttttgtctgtttatcccggtgacccaaccacgccaggagttggatcgaagaagggagtagaaagagttgatcctcatgctacaaccccttccattccagtcttgcctttgagtttcaaagatgccttgccaattttgaagaaacttaataaggaaggattgtctgttcctgactcctggaagggaggtctcgagggagttgattacagtaccggcccagctaaaaacattcatttgaacctttatagcgaacaaaactttactattacacctatttacaatgtctatggagagatcaaaggtgagaatgctgacgaagttatcattattggtaaccatcgtgacgcttggattaagggaggtgcttctgaccctaacagtggatctgctgctttgattgaacttagtagaggtttgcacgccctaaccaaaacaggatggaagccacaccgtactattgtactagcttcctgggatgctgaggaatatggcttgattggatctactgagtttggagaacagtttgagaagttccttcagaagaaggtcgttgcctatttgaacgttgacgttgctgtagctggaactcatcttcatttgggtgcctcgccatctttgttcaaactattgaaggataatgccaaagaaatcactttcaagaattcaaccgagactttgtatgacaactatgttaaagatcatggcaacgacattatttcgaccttaggaagtggaagtgactacactgtctttttggatcatttgggaattccttcgcttgatattggtttcattgctggaaaaggtgacccagtatatcactatcattcaaactatgattcgtaccactggatcagtactagtggtgatcctggatttgagtatcataatgtactggccaaatatttgggttcgttggttttgaatctctctgagagagaggtgttgtacctgaagcttcatgattatgctaccgaattgctcaagtacctcttggaagcctacgcccaaatgccagaggaatgggacgatgaagtaattggtttcagatcttcctcgtgtcatcgtgcgaaagcatctcatcatggtaaggatcctcatcatgagggaagacgccatcacggaaaaggattccattctaaaggagggcctcatcatggggaacgccatcacggaaaaggattccacgctgaagggggaccccaccatgagaaaggaccgcatcacgaaaaagggctccacgtcgaaggagagccccatcatcagaaaggacctcactttgaaaaaggattccatcatgacatggagatgtaccataagaaattggctcatcacggtaaagaacccaagacgaagctaaagcacttgaagaaacaagttgagagtttaatcatcgatttcgccaataccactcaaacatatgacgcttacactgacttccttcagaagcaacatgagattagggattctctttcattctgggagaaaatcaagctacattttaagatcaaggcagctaacttcaaacttaaatattttgagcgagttttccttcatgaaaatggcttaaagaacagagaatggttcaaacatattgtatatgctgcaggaaggaacactggttacgccggacaaagactgcctggtcttgtggaagccattgaagacaagaatctgcatgatgcagtaaaatggcttcacatcctttccaagaagattgatagtctacagaagtcattagagtag

SEQ ID NO: 922 - DNA, 2667 bp, Pichia pastoris
atgagtaccgcagccccaatcaaggaagaaagccaatttgcccatttgaccctaatgaacaaggatataccttcgaacgcaaaacaggcaaagtcgaaagtttcagcggcccctgctaagacgggctccaaatctgctggtggatctggcaacaacaacgctgcacctgtgaaaaaaagagtccgcacgggctgtttgacctgccgaaagaagcacaagaaatgtgacgagaacagaaacccaaaatgtgacttttgcactttgaaaggcttggaatgtgtctggccagagaacaataagaagaatatcttcgttaacaactccatgaaggatttcttaggcaagaaaacggtggatggagctgatagtctcaatttggccgtgaatctgcaacaacagcagagttcaaacacaattgccaatcaatcgctttcctcaattggattggaaagttttggttacggctctggtatcaaaaacgagtttaacttccaagacttgataggttcaaactctggcagttcagatccgacattttcagtagacgctgacgaggcccaaaaactcgacatttccaacaagaacagtcgtaagagacagaaactaggtttgctgccggtcagcaatgcaacttcccatttgaacggtttcaatggaatgtccaatggaaagtcacactctttctcttcaccgtctgggactaatgacgatgaactaagtggcttgatgttcaactcaccaagcttcaaccccctcacagttaacgattctaccaacaacagcaaccacaatataggtttgtctccgatgtcatgcttattttctacagttcaagaagcatctcaaaaaaagcatggaaattccagtagacacttttcatacccatctgggccggaggacctttggttcaatgagttccaaaaacaggccctcacagccaatggagaaaatgctgtccaacagggagatgatgcttctaagaacaacacagccattcctaaggaccagtcttcgaactcatcgattttcagttcacgttctagtgcagcttctagcaactcaggagacgatattggaaggatgggcccattctccaaaggaccagagattgagttcaactacgattcttttttggaatcgttgaaggcagagtcaccctcttcttcaaagtacaatctgccggaaactttgaaagagtacatgacccttagttcgtctcatctgaatagtcaacactccgacactttggcaaatggcactaacggtaactattctagcaccgtttccaacaacttgagcttaagtttgaactccttctctttctctgacaagttctcattgagtccaccaacaatcactgacgccgaaaagttttcattgatgagaaacttcattgacaacatctcgccatggtttgacacttttgacaataccaaacagtttggaacaaaaattccagttctggccaaaaaatgttcttcattgtactatgccattctggctatatcttctcgtcaaagagaaaggataaagaaagagcacaatgaaaaaacattgcaatgctaccaatactcactacaacagctcatccctactgttcaaagctcaaataatattgagtacattatcacatgtattctcctgagtgtgttccacatcatgtctagtgaaccttcaacccagagggacatcattgtgtcattggcaaaatacattcaagcatgcaacataaacggatttacatctaatgacaaactggaaaagagtattttctggaactatgtcaatttggatttggctacttgtgcaatcggtgaagagtcaatggtcattccttttagctactgggttaaagagacaactgactacaagaccattcaagatgtgaagccatttttcaccaagaagactagcacgacaactgacgatgacttggacgatatgtatgccatctacatgctgtacattagtggtagaatcattaacctgttgaactgcagagatgcgaagctcaattttgagcccaagtgggagtttttgtggaatgaactcaatgaatgggaattgaacaaacccttgacctttcaaagtattgttcagttcaaggccaatgacgaatcgcagggcggatcaacttttccaactgttctattctccaactctcgaagctgttacagtaaccagctgtatcatatgagctacatcatcttagtgcagaataaaccacgattatacaaaatcccctttactacagtttctgcttcaatgtcatctccatcggacaacaaagctgggatgtctgcttccagcacacctgcttcagaccaccacgcttctggtgatcatttgtctccaagaagtgtagagccctctctttcgacaacgttgagccctccgcctaatgcaaacggtgcaggtaacaagttccgctctacgctctggcatgccaagcagatctgtgggatttctatcaacaacaaccacaacagcaatctagcagccaaagtgaactcattgcaaccattgtggcacgctggaaagctaattagttccaagtctgaacatacacagttgctgaaactgttgaacaaccttgagtgtgcaacaggctggcctatgaactggaagggcaaggagttaattgactactggaatgttgaagaatag

SEQ ID NO: 923 - DNA, 315 bp, Pichia pastoris
atggcccttttcgactctatctcaaacgttgtcaaagatcaactcaaagacaaggaagcttcatccaaggatacctcagctaccgaagcctcaactaagggggaagagcccaagaaaactgaggaggccaagaagcaggagatcgagggatacacccaagacctgaaagacattgccgctgctgtccagaagggtgacttcaagggaattcaaaaggaagtctctgaacttgccggcaacaagcagtttcaagccgatgccaaggagtacgcctccaaggcatttagcaagaaggagggaggttcaagtgcctaa

SEQ ID NO: 924 - DNA, 1827 bp, Pichia pastoris
atgtctagtaaacattgggattacaagaaagatctggtactcagccatctggctggattatgtcagtccaacccccatgtaaggctaattgagtccgaaagagtcgtcatctccgccgagaaccaggaggacaagattaccttgatctctggtggaggttcaggacacgagcctctacatgctggctttgtcaccaaggacggtcttttggatgccgctgtggccgggttcatctttgcctcgccatctactaaacagatatttagcgcaatcaaagccaaaccttcgaagaagggaactttgatcatcgtcaagaactatacaggagacattcttcacttcggtcttgccgccgaaaaggccaaggccgaaggtctcaacgcagaactgctgattgttcaggacgatgtctctgttggtaaagccaagaatggcctggtagggcgtagaggtttggctggaacttctttagtgcacaagattttgggtgccaaagcttatttacaaaaggacaacctggaattgcatcagctggtcactttcggtgagaaggtcgttgccaacctggttacaattggtgcttccttggaccatgtcaccattccagccagagcaaacaaacaggaggaagatgattcagatgacgagcacggctacgaagtgctaaagcacgatgaatttgaaatcggaatgggtattcacaacgaaccaggtatcaagaagtcgtcgccaattccaacagtagacgaattggtggctgagctactggagtaccttctttcgactaccgataaggaccgaaattacgtccaatttgacaagaatgatgaagttgtgctactgatcaataacttgggaggaacctcagtgttggaattgtacgctattcagaacattgttgtcgaccaactggcctccaaatattccattaaaccagtccgcattttcactggcactttcaccacatcactggatgggcccggtttttctatcactttattgaatgctaccaagacaggagataaagatatcctaaagtttttagaccacaagactagtgcccctggctggaactccaacatatcagactggtctggcagggttgacaattttattgtggctgccccagaaatagacgaaggagacagttcatctaaggtatctgttgatgctaagctgtatgctgaccttctggagtctggtgtgaagaaggtcatttcaaaagagccaaagatcacattgtatgacactgttgcaggagatggtgattgtggtgaaacgttggcgaatggttccaatgccattttaaaggctctggctgaaggaaagcttgatctcaaagacggtgttaaatcactggtgcaaattacagacatcgtggaaactgccatgggtggaacatctggaggtctgtactccattttcatcagcgctttagcaaagtctttgaaagagaaggaactttccgagggtgcctacacactgacccttgaaacgatctctggatccttacaggcagcacttcagtctctattcaaatacacaagagcacgtactggagacagaactcttattgacgctttggagccatttgtaaaggaattcgccaagtctaaggatctgaaacttgcaaacaaagctgcccatgatggtgctgaagccacaagaaagctcgaagccaagtttggaagagcatcttatgttgccgaagaagagttcaaacaattcgaaagtgaaggtggactacctgatcctggtgctattggtcttgccgctttgatttcaggaattactgatgcatacttcaaatctgaaaccaagttgtag

SEQ ID NO: 925 - DNA, 1062 bp, Pichia pastoris
atgtccaataacaccacccaaaacttggctgaacagaagggtattcagaccgacttggtcactctgactcgtttcatcttggacgagcagaagaaatctgccccaaacgctaccggtgagctgactttgcttctgaactccctgcaatttgccttcaaattcattgctcacaccatcagaagatccgaattggtcaacttaattggattggccggtgtgaccaacgccactggtgacgatcagaaaaagctggatgttattggagatgagatcttcatcaatgccatgaagggatccggtaacgttaagttacttgtttccgaagagcaagaagaccttattgtgtttgagtcctccaagggaaactatgctgttgtctgcgacccaattgacggttcatccaacttggacgctggtgtctcagttggtaccatttttggtgtatacaaactgttgccaggctcagctggttctattaaggatgttttgagatcaggaacagagatggtggctgccggttacaccatgtacggtgcatcttctcacttgatgcttactaccggaaatggagtcaacggtttcaccttggacaccgacttgggagagttcattctcacgtatccatccttaaaaattccgcacaccagggctatctactctatcaatgaaggtaactcgcactactggaccgatggagtcaatgagtacattgcttctttgaagaaaccccaagcaaacggaaaaccatacagtgcccgttatatcggatcaatggttgctgatgtccacagaactctgttatatggaggtatctttggctatccagcagactccaagtctaagtccggtaaactgagagtcttgtacgagtgtttcccaatggccctcctgttggagcaggctggtggtgaggcagtcaacgataagggtgagagaattctaaacttggagccaaaacaagtgcatgagagatctggtatctggttgggttccaagggagaagtagagagattactaccctatctaacaaaaaaaattaagatccaatctgtgaatctctag

SEQ ID NO: 926 - DNA, 1095 bp, Pichia pastoris
atgaaagcacttattctagtaggaggttacggtactcgtctgagacctttgaccttgtctgttcccaagccactcgttgagtttgccaacaagcccatgatttttcaccaagtcaaggctctcgccgaagctggtgtcacggacattgttttggccgttaattacaagcctgaggtgatggtcggtgctctgagagagtacgagaaggagtgtggggtaaacatcactttctctgtcgaagaggaacctttgggaactgctggtcctctgaagcttgctgagagtgttctgaccaagaatgacgaacctatttttgttctgaactcggacgtgatctgtgattaccctttcaaagatcttgctgctttccacaaggcccacggtgctgaagccaccattgtggccactaaggtcgacgaaccatccaagtatggtgttattgttcatgacagagacattccaaacttaattgaccgattcgtcgagaaaccagttgaattcgtcggaaacagaattaatgctggtatctacatcatcaacccatcagtcatcagtttgatcgagatgagacccacctctatcgagaaggagaccttccctcttttggttgagaagaagcaactgtactcttacgatcttgaaggatactggatggacgttgggcagccaaaggatttcctgtcaggaacctgtctttatctctcatccctagctaagaaggaacgtagtgcactcactcccacttctgagcctttcatcaacggtggaaacgtcttaatcgaccctactgccaaggttggtaaggactgtaagataggtcctaatgtcgtgattggaccaaactgtgtaattggagacggtgtcagaattcagagatctgttattctcaagaactccaatatcaaagaccacgcctgggttaagtccactattgtcggatggaactctactgttggtaaatgggctagacttgagggtgttactgtcttgggagaagatgttactgtcaaggacgagatctacgtcaacggtggtaaagttcttcctcacaagtctattagcgccaacgttgacactccacagattatcatgtaa

SEQ ID NO: 927 - DNA, 1098 bp, Pichia pastoris
atgaaaatcgttctcgttttgtactccgctggtaagcacgccgccgatgaaccaaagttgtatggttgtatcgaaaatgaattgggtattagacaatggcttgagaagggcggccatgaattggttactacatcagacaaagagggtgaaaactctgagttagaaaagcacattcctgacgctgatgtgattatttccactccattccatccagcctacatcacgaaggagagaatccaaaaagccaagaagctgaagttgttggtcgttgctggtgtcggttccgaccacattgacttggactacattgaacaaaatggcctagatatttcggtcctagaggttactggttccaacgttgtttcagtggctgagcatgtcgttatgactatattgaacttggtgagaaactttgttccagctcacgagcaaattgttaaccacggctgggacgttgctgccatcgccaaggacgcctacgatatcgaaggtaagaccatcgcaacaattggtgctggaagaattggttacagagtcttagagagacttgtggctttcaaccctaaggaattgttgtactacgactaccaaggtcttccaaaagaggccgaggaaaaagttggtgccagaagagtcgacactgtcgaggagctggttgctcaagccgatgttgttaccgtcaatgccccactgcacgcaggtactaagggtttagttaacaaggagcttctgtccaagttcaagaagggtgcttggttggttaacacagccagaggtgccatctgcaatgctcaagatgtcgctgatgccgttgcatctggtcaattgagaggttacggtggtgacgtctggttccctcagccagctccaaaggaccatccatggagagatatgagaaacaagtacggatacggaaacgccatgactcctcattactcaggtaccactttggacgcccaggtcagatatgccgaaggtaccaagaacatcttgaactcattccttaccaagaagtttgactacagacctcaagatgtcattcttttgaacggtaagtacaagaccaaggcttatggtaatgacaaaaaggtcgcataa

SEQ ID NO: 928 - DNA, 747 bp, Pichia pastoris
atggctagaacatttttcgtaggaggaaacttcaaaatgaatggctccaagaagtcaattcacgagattatcgagagattgaacaacaccaagttaccagagaacgtagaggttgtgattgctcctcctgctccctacttgcagcaggctgtcaccgagaacaagcagaagactgtttacgtctccgcacaaaacagtttcgacaaagcttctggtgcctacacaggtgaagtttctgtcgaggctttgaaggacttgggtgtcccttacgttatcttgggtcactccgaacgtagaactattaacaaggaagacgatgctttcattgcttccaagaccaaatttgctcttgaccagggtttgaaggttatcctctgtattggtgagacactcgaggagaagcaagccaacatcacgctagacgttgttaaaagacaactgcaagctgttgtcgatgttgtttccgactggactaacattgtcgttgcttacgagcctgtctgggctatcggtactggtcttgctgccactccaagcgatgcccaagacgttcacaagcaaattagagatttccttgctactgtcattggtaaggaccaagctgaaaaagtccgtatcttgtacggtggatccgtcaacggcaagaacgctgtcgagttccgtgacaaggccgatgttgatggattcttggttggtggagcttctctgaaacctgaattcgtggacattattaattccagaaactag

SEQ ID NO: 929 - DNA, 1029 bp, Pichia pastoris
atgattgttcactcccccatcgttacgagaaggttagccacctcagcaagggttcctatcaggactctggctacatcttctaatggactcaatttttttcagaaaactcaattaccagcaaatacaattattcgctttgttccacagcaaacagcctggattgttgaaagaatgggaaagtttcaccgaatcctgcaacctggactagctattctgttaccctttcttgataagatccaatatgttcaaagtctgaaggaaaatgcgattgaagttcccagccagagtgccattacttcggataatgtcacgctggagatggatggtgtgctctatatccgagtagttgatgcatacaaggcatcctacggagtggagaatgctgaatatgctattagtcaactggctcaaactactatgcgttccgaaattggtcaacttacgttggaccatgttctgagagaacgtcagtccttgaatgtcaatatcactgctgtcttgaatgacgccgccaaagattggggtattcaatgtctccgttacgagatcagagacatccatccaccatcgaatgttttggaagctatgcacaggcaagtctctgctgaaagatccaagagagcggagatattggactctgaaggtcatagacaatctgccataaatattgccgaaggtgagagacaatcccaaatcttagcgtccgaggctactaaattcaagcagataaatttagctgaaggtgaagccagagctattttactgaaggccgaagcaacttccaaaggaattgaacaaattgccaacgctattcgtaacactccgggaggaggagacgcagtatctctgcaagtagctgaaaagtatgtggatgcgtttggaaaactggctaaggagtctaacaccattgtcatccctgctgggttaggtgatgtttcttcgtggatggcttctggcctgagtatctaccagaatcttcaaaaatccaacgctacaaaggaccaaaataagattgaggagacgaaatga

SEQ ID NO: 930 - DNA, 1548 bp, Pichia pastoris
atgagtctggtccaggagttgattcaaaagataagctctttggagctcaccttggtggaaaagctttccatcctgttcgtagctcccttcttgttgaacgcgctatggcagtttatctacagtttcagaaaggacagagttcctttggtattccactgggttccatgggtaggctcagcagtcacatatggaatgcaaccatatgaattttttgcagactgtcaaagaaaatacggagacgtgtttgcctttgttttgttgggtaaagttatgacagtgtacctcggaccaaaaggccatgagtttattttaaatgctaaactaaacgacgtttgtgctgaagatgcctacaagcacctgaccactcctgtatttggtgaaggtgttatttacgattgtcccaactggaagttgatggaccagaagaagtttgttaaaggatctttaaccaaggagtccttcagatcttatgtccctaagattagagatgaagtcctggattacatcaataatgaccctaacttcatgggaggtgattctaaaaagaaaactggaaagaccaatgtcctgaactctcagtccgagcttacgatcttgaccgcttccagatctctactgggagatgatatgagaaaactactgactaagaaatgggctaaactgtttagtgacctagacaaaggatttactcctttaaacttcattttctctcatcttcctctaccaagttactggactcgtgatcatgctcaaaagaccatttctgagacttatttatctttgattaacaagagaagagctacaaacgacattggtgacagagatttgatcgattcattaatgaaatcttctacatacaaagatggtagcaagatgaccgacgaggagatttcccacttgttaatcggagttcttatgggtggccagcacacttctgcctccacttcatcgtggtttttgttgcatctcggagagaaaccagagctgcaggaggaattatttgaagaacaggaaagggtacttcaagggcgtgagttgacttatgacgatcttgctaatatgcctttacacaatcaagtcatcaaggaaactttgcgcatgcacatgcctctacactcaatctttagaaaggtcactcgtcctcttcccgttcctaactcaaagtatgtggttcctaagggtcattatgtattggtttcacctggatttgccatgaccaacgatgcgtacttcccaaacgctagtgacttccagccacacagatgggatgaaactgttgaaccagtctcagctgacgcaaaggaaactgttgactacggatttggtaaagtctccaaaggtgtttcttctccttacttaccatttggaggaggaagacatagatgtattggcgaacattttgcgtactgtcagttaggaaccatcttgaacacattcgttagaaccttcaagtggaaggccgtagtccctcagccggactatacctcaatggttactcttcctgaacctaatttgtctactattacatgggaaagacgcgataattag

SEQ ID NO: 931 - DNA, 1671 bp, Pichia pastoris
atgaccctatcaaacaacaccaagagaagagaaagttccattactccagatcaacagaagcttattgaaaagtacctcgaaaagaagaatgtacatcatcagaagaaactgcagcatgtaacgcacacttctaccaatgtcaacctatcatccatcaaatggaagagtttgcgattggaggactgcggtgtttcaatccctgattcaggattaccagccaagattgcttatgaatcaatccacgatagtttgaacctcgatggaaaccccactttgaacttggcctcgtttgttaacactggttacatcaacgattatagtgagccattgattcatgagaacttggtgaaaaacttggctgacaatgatgagtatccagtcatgctggagttacacgaaagatgtctccaaatgcttactgaattgtggaacggtgattctaagaagagcattggttctgccactacaggctcttctgaagccattatgcttgggggactggctatgaagaaaaattggcaaaccaagaggcgtgctgctggtaaaagcaccgagaagcctaacattatcatggcttcctgttgccaagttgcgttagagaagtttgcccgatactttgaagtagacgctcgtatcatttcgtgtgacaacaatgactacattctggactatgatttgatatatgatgcttgtgacgagaataccataggtatttttgttattcttggatcgacctatactggtgcttttgaggacgttgctttagtcaataaaattttagaccgtgttgaaaaggagaagggattcgacattccaatccatgtggacggcgcctccggggcttttgttgccccttttatctatccagacctggaatgggattttagagttcctcgtgtcaaatcaatcaacacttcaggccacaagtttggactcgtcacagcaggtttaggttggattgttttcaaagacaaggaatggcttcctaaagaccttgtttttgaattacgctatttgggtggtctagaatacagttttactctaaacttctcccgtccgggacaccaagtcatccaccaatatttcaattttgtcgctttaggaaagaatggatactcgtctatttttgatacatgcttaacaaatgccaggcttctttcatcctttttggaagagacgaactacttcaaggtggtatcgaacgttcatcgtcctgtggaagcgggcacaacgcctcacgctgatgatcaccttgcttttcatcccagtttgccagtggtttctttccagttcaacgaagagttttccaagcaatatcctgaaattcctcaatcaatcatatccactttaatgagaaacaagggttggatcattcctaattatcctctgccaagaacaactaaaccagtgaaggatgatgagagagaaattcttcgtgtggtggttagatacaacttaaccctagagctacttcagaagctgatgagtgacatagtgtccacattaactgttttgactaactcatgcaagttgattagagagtctttgaataacgatgctttggaggatacagacattatttacgatatgcttctaagtattgctttggacggtagcgagaatttggtcaagtcgtcaatcaaagatcataaacacgcgggagcttgttaa

SEQ ID NO: 932 - DNA, 1140 bp, Pichia pastoris
atgtctaccgaaggtcaaatcatcaaatgtaaggcagctgttgcctgggaggcaggaaaggatctctctattgaggagattgaggttcttcctccaagagcccatgaagttagagtgaaagtggaattcactggtgtatgccacactgatgcttacacgctttctggtgcagatgcagagggaagtttccctgttgtgttcggccatgaaggtgctggtgttgtcgagtcagttggagaaggtgttgagtccgtgaaggttggggattctgtagtgcttctgtacactcctgagtgcagagagtgcaagttctgtctgtctggtaagacgaacctctgtggtaaaatcagagccacccagggtaaaggtttgttaccagacgggacttctcgtttccgttgtaagggcaaggatttgtttcactatatgggatgttcttccttttctcaatacactgtggtggctgacatctcagtggttaaagtccaagacgaagctcctaaggacaagacatgtctgttgggttgtggtgttaccacagggtacggtgctgctatcaacactgctaagatctctaagggtgacaagatcggtgtgtttggtgctggatgtattggattatctgtcatccaaggtgcagtttccaaaggtgcaagcgagattattgtaattgacatcaatgattcaaagaaggcatgggcggaccaatttggtgcaactaagtttgtcaatcctacaaccttaccagaaggtaccaatattgttgactacttgattgatatcactgacggaggctttgactataccttcgactgtaccggtaatgttcaagtaatgagaaatgcacttgaatcttgccacaagggttggggtgagtcgatcatcatcggtgtcgctgctgctggtaaagaaatctctacccgtcctttccagttggttactggcagagtctggagaggatgcgcctttggaggtatcaagggacgtactcaaatgccatctttggttcaggactatcttgatggtaagattaaagttgacgagtttatcacacacagacatgacctggacaacatcaacaaagcatttcatgacatgcatgctggaaactgtattcgtgctgtgattactatgcactaa

SEQ ID NO: 933 - DNA, 399 bp, Pichia pastoris
atgtctgaaacttcagccccacgtccaacgattgttaagaagtacacaaagaagttcaagcgtcatcattctgaccgttaccaccgtgttggtgagagctggagaaagcagaagggtattgactcttgtgttagaagacgtttcagaggaactatccgtcaaccaaagattggttacggatccgacaagagaaccaagtatatgttaaaatctggacacaaggcctttgttgttaacaacgccaaggaattggatgttcttctgttacacaaccagcaatacgctgctgaaatcgctcatgccgtttcttccaagaacagagttcacattttggccagagccaaggagcttggtatcaaggtaaccaaccctcaaggtcgtctcaacttggaggcctag

SEQ ID NO: 934 - DNA, 651 bp, Pichia pastoris
atgtcacaaggaacaatttacttagtactcgcctccccaagatcatctttattcaaggatctgattgaatattacggtctcgatatcaagatctctgacacttccgacccagagtttgcgaagacatttcccttgaagagaactccctccttcaaaggtcctgatttcgtactacatgaagctttggcaatatttgtgtatatcacttcgttgattcctcaaaaccatgggctgtacggttcttccaacttggattacgcccaaaccatcaagtggctatccttcactgcgtctgagatcatatctggcttagttcaagcactgtatccgctcatcggaaacctgccatactccaaagatggcgttgaccaggcactcaaagatttggagtcgtatgttgctgtttatgaaacccagttaaagcaaacgaagtatcttgttggcgataagattactttggctgatctgtttgctgttcagtctatcaggtggggattacaatatatttgggacgtcaattggttgaaacaacatccattgattgatgcctggttcaaggatgttactcaacatccaatcatcgtcaaatctcttggagatttcaagccgttgcagaaggctcttcctaatgctcctcctaagggcaattag

SEQ ID NO: 935 - DNA, 1233 bp, Pichia pastoris
atgatatttgacggtactacgatgtcaattgccattggtttgctctctactctaggtattggtgctgaagccaaagttcattctgctaagatacacaagcatccagtctcagaaactttaaaagaggccaattttgggcagtatgtctctgctctggaacataaatatgtttctctgttcaacgaacaaaatgctttgtccaagtcgaattttatgtctcagcaagatggttttgccgttgaagcttcgcatgatgctccacttacaaactatcttaacgctcagtattttactgaggtatcattaggtacccctccacaatcgttcaaggtgattcttgacacaggatcctccaatttatgggttcctagcaaagattgtggatcattagcttgcttcttgcatgctaagtatgaccatgatgagtcttctacttataagaagaatggtagtagctttgaaattaggtatggatccggttccatggaagggtatgtttctcaggatgtgttgcaaattggggatttgaccattcccaaagttgattttgctgaggccacatcggagccggggttggccttcgcttttggcaaatttgacggaattttggggcttgcttatgattcaatatcagtaaataagattgttcctccaatttacaaggctttggaattagatctccttgacgaaccaaaatttgccttctacttgggggatacggacaaagatgaatccgatggcggtttggccacatttggtggtgtggacaaatctaagtatgaaggaaagatcacctggttgcctgtcagaagaaaggcttactgggaggtctcttttgatggtgtaggtttgggatccgaatatgctgaattgcaaaaaactggtgcagccatcgacactggaacctcattgattgctttgcccagtggcctagctgaaattctcaatgcagaaattggtgctaccaagggttggtctggtcaatacgctgtggactgtgacactagagactctttgccagacttaactttaaccttcgccggttacaactttaccattactccatatgactatactttggaggtttctgggtcatgtattagtgctttcacccccatggactttcctgaaccaataggtcctttggcaatcattggtgactcgttcttgagaaaatattactcagtttatgacctaggcaaagatgcagtaggtttagccaagtctatttag

SEQ ID NO: 936 - DNA, 804 bp, Pichia pastoris
atgcttactcacacagtattgagagctggaactaagagaacctgctctaccctttctgtcgtcagagggttggccacggtctcgcagaatcaacccaggctgaagtcattcaaagtgtatcgttggtctcctgatacgccggaaattaagccacatatgcaagaatacaagattgatctgaacgaatgtggtcccatggttttggatgctttgctcaagatcaagaacgaacaggatgctacacttaccttccgtagatcgtgtcgtgagggtatttgtggatcatgtgctatgaacattggtggtagaaacactttggcatgtttatgcaagatcgaccagaatgagagcacggaactcaaaatttatcctcttcctcacatgtttgtagtccgagacctagtgcctgatttaacacacttttacaagcaatacaaatcgatccaaccatttttacaaagagattcggtgcctagcgatggcaaagaaaatttacaatctattgaggatcgtaagaagttggatggattgtacgagtgtatcttgtgtgcctgctgttctacgtcttgcccgtcttattggtggaatcaacaggaatatttaggccccgcggttttaatgcaagcctatagatggttgatcgattcccgtgatcaagcttctgtggcaagaaaagaaatgttgcagaattcaatgtcactataccgctgtcacacaatcatgaactgtgctcgtacttgtccgaaaggcttgaatccaggtaaagccattgcggaaatcaaaaaacagcttgcctttgactaa

SEQ ID NO: 937 - DNA, 1212 bp, Pichia pastoris
atggcaggtgcaactaggatcaattcacgagtagttcggtttgctattttcgcatcaatcctggtactgttaggattcatcctatcaagagggtctgccacatcgtactctcttccctcagggttgactagtgacacgtcacaatcaactggctcatctcccaaatctgagtctaaaccttcttcccaaggcagcagtggtgcaactgaactgaagaagacttataccacggacggaaaggaaaaggctactttcgtttctcttgctagaaatagtgacgtatggagtttggctagctctatcagacacgtcgaagatagattcaaccacaagttccactatgattgggtcttcttgaatgacgaggaattcagtgacgagttcaagcgtgtcacctctgctttaacttctggaaaagctaaatacggtctgattccaaaggaacattggtcgttcccggagtggatcgacaaggagcgtgctgctaagaccaggaaggaaatggctgctaagaaggtcatctacggtgactccatttcttacagacatatgtgtcgttttgaatcgggtttcttctttagacacgaattgatgcaagagtatgaatggtactggcgtgtggagcctgatatcaagatttactgtgatatcgactacgatgtgttcaagttcatgaaggataataataagatgtacggttttactgtttctttgcctgaatacgttgctaccattgagactttatgggacactactcgtgcattcattaaggagaaccctcaatacttacctgaggataacatgatggactttatttctgatgacgatggcttgtcttataatggatgccatttctggtccaattttgaagttggttccctcagcttatggcgttctgaggcttacctcaagtattttgaccacttggataaagctggtggattcttctatgagcgttggggtgatgctccagtacactcaattgcggctgctttgtttttacatcgtgatcaaattcacttctttgatgacgttggatacttccacaatccattcaacaattgtccagtagacgccgatctcagagaggaaaggagatgtatgtgtaatcctaaggacgatttcacttggaagggatactcttgtgtgccagagttcttcactgtgaataacatgaagaggcccaagggttgggaagctttcagtgggtaa

SEQ ID NO: 938 - DNA, 612 bp, Pichia pastoris
atgaacagcgagtacgactacttattcaagttgctgcttattggggactctggagtgggaaaatcttgtctcttgctgagatttgccgaggatacttacacccaggactatatttcgacgatcggagttgatttcaagattagaactatagagctagatggtaagacaatcaagttacaaatctgggacacggctggtcaagaaagattccgcactattacatcctcctattatcgaggagctcatggtatcatcatcgtatatgatgttaccgaccaagagtcatttaataacgtcaaccagtggttgcaagagattgaccgatacgccactggcggagtgatgaagttgttggttgggaacaagtccgatctcaaggataagaaggttgtggattacactgttgccaaggagtttgcagatgctctggagatcccattaatagagacatcagccttggactctacaaatgttgagcaagcattcttcaacatggctcgtcaaatcaaatctcagatggtgaacaaccaagctggtagtggtaccgagaaggcatcaatcaacctgaggggtcaatccgttggaggcagtcaaaactctagttgctgttag

SEQ ID NO: 939 - DNA, 1131 bp, Pichia pastoris
atggacggagaagacgttgcagcattagttatcgacaatggttccggtatgtgtaaggccggatacgccggagacgacgccccacacacagtgttcccatcggtcgtaggtagaccaagacaccaaggtgtcatggtcggtatgggtcaaaaggactccttcgtcggtgacgaggctcaatccaagagaggtatcttgaccttgagatacccaatcgagcacggtatcgtcactaactgggacgatatggaaaagatctggcaccacaccttctacaacgagttgcgtctggccccagaagagcacccagttcttttgactgaggctccaatgaacccaaagtccaacagagagaagatgacccaaatcatgttcgagactttcaacgttccagccttctacgtttctattcaggccgttttgtccctgtacgcttccggtagaaccactggtatcgttttggactctggtgacggtgttacccacgttgtcccaatttatgccggtttctccttaccacacgctattttgcgtatcgacttggccggtagagatttgaccgactacttgatgaagatcttgtctgagcgtggttacactttttctacctctgctgagagagaaatcgtccgtgacatcaaggagaagctttgttacgttgctcttgactttgaccaggaattgcaaacttcttctcaatcttcatccattgagaagtcttacgagttgccagatggccaagttatcactatcggtaacgagagattcagagctcctgaggctttgttccacccatctgtacttggccttgaggcttctggtatcgaccaaaccacttacaactccatcatgaagtgtgatgttgatgttcgtaaggaactctacagtaacatcgttatgtccggtggtactactatgttcccaggtattgctgagcgtatgcaaaaggagcttactgccttggctccatcttcgatgaaggtcaagatttctgctccaccagaaagaaagtactccgtatggatcggtggttctatcctcgcttctttgggtactttccaacaaatgtggatctcaaagcaagagtacgacgaatctggaccatccattgtgcacctcaagtgtttctaa

SEQ ID NO: 940 - DNA, 549 bp, Pichia pastoris
atgtcaggtggaccagttccagtgttcaaaaagtacactacgggatccaaggggatctgggagaaaatcagacagttgctcactttggttcctaaccgttccactggtaatccattggtaaagaattacagagttcctcctccaggatcccaaaccttgaagtacaaagacccagttactatcccagctggcgacatagtgaaaaaccaatattatgacagagatcacagaagaaactatcctcgtcttgttgctttcgatcagactaaggttagcggcctgttgactttgggatccgctcagaaccctcgtatttctgttggagaaaagggccagaaggagcttgcagtattcgaccagagtgtgtcgttgtcatcaactttggctacgattgaccccaaagttgtaaaatctgaacttcttgctgagggaggctctccagtggttgctcccagtttaaacaaaaagatgaagtttagattgacggaagaatctgagcatggtatgtatcctgaggactacccaatccgcatttttgctcagaactag

SEQ ID NO: 941 - DNA, 435 bp, Pichia pastoris
atgtctgacgttgaacaacaagtcgttgaagaggttgaggttgccgttgaggaaacctcagcatccatctccattgaagatgccgtcaagaaggtcttgagaatttctttggtccacgatggtttggccagaggtttgagagaggcttccaaggctctgtcttctggtgctgcccaactgtgtgtcctgtgtgactctgtcactgacgaggccatcatcaagctggttgaagctctttgtaacgagccagaggagaagatccctctgatcaaggtctctgacgccaagcagttaggtgaatgggctggtctatgtactttagaccgtgagggtaacgccagaaaggttgttggtgcttcttgtgttgtcatcaaggactggggtcaagactccgaggagcgtcacgttcttttggactacttttccagcaactaa

SEQ ID NO: 942 - DNA, 2271 bp, Pichia pastoris
atggttaatgtgaagtttgaagactacagctctttgctggagagtcttgatcagaacatagatcaggcaaaccgccgagaggacccgttcgccaaacagatgcagggagtcaaacctaggctttcaacgatgagctactcatcggctggttcatacacccctgactcatcccctgatatgatcttcaatcaagagcagtataatgagaaccagttcaatgagaacatgttcaacaatgatctatacagcactttatcggagcttccagagctctccaacatgagtagcagcatgagcggtacgagtgaaaacaactcaccccactctaccgagttaaacgacttgggaatgctaaatgggatcaattttggatcctctgcagacaccaacaacaccgttggttcttctgttaacacaaccattggggaccaagtcttgcttcccgtggtggatatggaaagaaatgacgcaattgcagcctcggctgcgcatcaatcgataaaggactcaaaagtggccaaaccaagaaagaagatgaagtcgtctcacaatttgattgaaaagaaatacaggaccaacatcaattcgaaaatcttggaattaaggaattgtgtcccaacgttgagaatagttatttcgaggaatggaggaggtaacagtggtgatgaatttagtaaagattacgagggacttggctactctgatgatgaatcaaaattggatggactccagcccgctcgcaagttgaacaaagccaccatcttggccaagtctgttgaatacatcaaacacttggaatacagaaacagcctcttaactacagagaatgagaaactgaaagagataattcaaaacagcggtgctgcgacagactctggttcgggtaacatgatgaacaagctgataattggttctttggcctgcttagctggtggttccacgttaaacgatatgtccaacgatagtaggtcgttgatgactatgcccatatttatatttaactcaaacgaaaccacgctggcgttgaaaccattacttggaatagtgaagggattcctagctatttatgttctttatttggttatcgcgccactattccatagctcaactgtgtgcatagagaaagatgaaaagacaattgccaatgaaaacaatgaatcacctgactggccacaaggtaaacaaggaggattcttttctttactggtgaatattgcaaccagcggcctttcggttgcgttaaacagggacccatatgcccccatgatgcaagcgttttactttaagcagctatcattgtatggaaatggatcgtctctagcatcctatattgctgcatcatactggagatgtgctcgccagtcccgcaaccaaattccagcaactgactcaaagtcacaatatctattggagaactttgaatacgctcaagtgtttgaaatcaaatcaatgaacacattgttggccaagtatccaaatttgaagttgaatagaacacattttgtggaacaagtctctaaattgttatgtgattccttgcttgagaattgcattcataagatgattgaattggaagcactcaaattgcagaagaaggagcaactagctgctgacgataccgagcaggaggagcaaacagaacgaacaatttctgaattccaagaacaaagagatcaatatcttaaacatgcttcacagctctcatccactaatgagcaattgctgaaatgcaaattgatcaagtgtatgattgacacatctttggaaaacttgcaggaatgtggtcgactgattcaaacttttacatccaacaagctatccaaggatctggtagcatgctttacttgttgtatcatttgtgcattatccgaaggctctcctagcattgaacaagtcaatttgtttattgacagactcaatcttcctaactataccaacgtttacgtgaagaacacaaaggtgtcattgctgctttacgtttccctgttaacaatggttaactccctacctgacagcacatatagtcaacgtttcgtacaggttgactccgatagtgacgaggaagacgcattagattcagattctgtgggatctgggtcctatgacaaccacttggtcagagataagctaacgaatattcttagtaacctgagaatcattacgggtacacctaaatctaagaacgatttggctattatcgagtcgactactctgaagagtattctcatagatgggttggtcagtaggataaaccttctagatcatgcctga

SEQ ID NO: 943 - DNA, 333 bp, Pichia pastoris
atgccagctccatacgaaaaaggttcagagaagaaaggtgctactttgttcaagaccagatgtctgcaatgtcacactgtcgaggctggtggaccacacaaagttggtcctaacttgcatggtgtcttcggaagaaagtctggtttggctgagggatactcttacaccgatgccaacaagagaaagggagttgaatggtccgagcaaaccatgtccgactacttggagaacccaaagaagtacattccaggaaccaagatggctttcggtggtctaaagaaggccaaggacagaaacgacttgattacctacttggccaaggccaccaaatag

SEQ ID NO: 944 - DNA, 1506 bp, Pichia pastoris
atgacatttgctcctcccttagaattcgagattgaccttcctaacggattgaagtacactcaaccattgggactcttcatcaacaatgagtttgttgaaggtgtagagggaaagctcttaccagtgatcaatccttgtgatgagactaaaataacccaagtttgggaagcttctgcagcggatgttgaccgtgctgttgatgccgctgaagatgctttcaacaactccgtatgggctactcaggacccattagagaggggaaagctgatgaacaaattggcagaccttatcgatcgtgacttcaacatcttggctggtatcgaatccatcgacaatggtaaggcctatacctctgcccagggtgatgttactcttgctgtcaactacatcagatcctgtgctggatgggccgacaagattttgggaaacgttgttgattccggaaacacccaccttaacttggttaaaagagagccattgggtgttgtgggacaaattatcccatggaactttcctctcctgatgttggcttggaagttgggacctgcgctggccacaggtaacactgttgttttgaagactgccgagtctacccctctgtcgggtttatacgttgccaaattgatcaaggaggccggtttcccacctggtgtggttaacattctcagtggtttcggtaacccagctggagctgccatcgctgctcatcccagaatcaagaagattgctttcaccggatccactgcaacaggccgtaagatcatggaagcagccgctaaatctaacctgaaaaaagtcactttggaactaggtggtaaatctccaaacattgtgtttgaagatgctgatatccagaagactatccataacattattttgggaatcttcttcaattctggtgaagtctgttgtgcaggttccagagtctacattcaagacactgtgtatgaagaagtgcttgaagccttcaagaaggagactgataacgttaaggttggtggaccattcgaagaaggtgtcttccaagggcctcagacctctgagttgcaacttaacagaatccttagttacatcaaacacggtaaggatgaaggtgctcgtgtaattaccggtggttcaagataccgtaaccgaggttactacattaagcccacaatttttgctgacgttactgaagacatgaagattgtcaaggaggagatttttggtcctgtggttactatcactaagttctctaccgtggatgaggttgttggatatgccaacaacaccaactatggtctagctgctggtattcacacaaacaacttgaacaaagccattgatgttgccagtagaatcaaggcgggtgtcgtttggattaacacctacaacgatttccaccacatggttcctttcggaggttatggagaatctggtattggcagagagcttggtgctgaggctttggataactacactcaagccaaggctatcagaattgcttacactcctgaacataagtag

SEQ ID NO: 945 - DNA, 1179 bp, Pichia pastoris
atgatatcatttcaaccaagctactacgtgagcacaccagctttgctcagcccttcaaggcacgagtatggctatcagtcatctgcagttactccatgtttctttgaaaataacttggacacggtcttgagcgcattacaaagacataattacacaagtccaccgccaccaaagataaaaccaactgaagatcagcgttcatactacgtgaaaatgtccaaaaagtctggagattttagtgattatggtgtcaaagtctaccaggatcaaaagttcacccatgtttgggtttactcaacatcagataatgtaaagagacacttcaagtaccccaacagtgcagttcaatatgaaggtatccgggcgaaggtcgctcgcaatgggcgattcttgctgattcagatcccaaagatctctagacctgacgttgtactgaacattgtgcaaaagcgtctccaatctattgcaaaccaggagagaaaagagagagaagagctggaaagaagagaacttcaaagaaaagctgccatggaacgtaatagaagactacgagccctggaagagcagcagctcgcagctcaaagggaatactttgaaaaatcactgcaatctgcattctcgcctttcttcacctatcgactggaaagcaagcagaaggacgagcaggaatccaacgctgaatctgctactaaccaggtaactgccaaacctaatgtgatacgaattccagtgaatcatgtcgatgaaagtaatgaagtcattcccaccaaggcacccaaggcatccaagactgatgttgaagaacagccaaatgtgaacgacgttgaaaaagaggcagacatgcaggatgttgaagaaaacccgaatacgcaggatgctgaatatgaaacagaacagttttctgattttgagggtttctctgatgatggtgatatcgaggaagcaatagaaccaatggatgaagacgaagaggattcggataattctcagtttatggaagaacctgaaattttaaagagacgtccatctccatattccatctcattccctgcaacactatctgctgaatcatcctcaacgaaagctcccaaaataaaaaaaccaaataagataccaatcgaagaggtagaagatgaagagttcaaacggttttccagttcctctgacaatgacagttga

SEQ ID NO: 946 - DNA, 1230 bp, Pichia pastoris
atgtctcaaggaacccttttcattactgaacaaacccgtggagttgttccaaagggattagttcaatacttcaagttggacgttaagatctccaacaaagaagacgagcaattcaagaagtacttcccattgaactatatccctgccttcgttggtcctaagggattgaagttgacagaggtttctgctgtcattgagcacttactgaacttggccggtgagaagaaattgaagggaactaccgaacttgagcaggttcaagtcaacaagtggatttcctttttcaacactgaggtcatttcaaccagtgctagaatcttcctacctttgttgggtaaggctccatacaacaagaaggacattgatgctgccactgagagattggatactattattcaaataattgaggcaagattgtctgaatttacttacttggtcggtgaaagaatcaccgttgctgatctgttcgccgctactgttattggaagaagtctggagactattttcgacaaggcatggatttccaagcaccaggacatcttcagatggttcagcactgtgtcagcccacccagttctgtcttggagatacgttgacttcaagccaagagacaagcctgtcgaatacgtccctcctaagaaggaaaagaaagaaaagaagaaggaggagaaaccaaagcaagagaagaagcctgctcctgctgctgctgagcaatctgatgagccacctgttgagaagaaggcaaaacacccattggaagctcttggaaaaccaaagttggccattgacgaatggaagagattctactccaatgaggagaccagagagtctgcaattccatggttctgggaacactttgacgccgatgaatggtccttgtggaaggtcacttacaaatacaatgatgaattgaccttgaccttcatgtcaaacaacttgattggaggtttctttgccagattgaccggttcgatcaagtacatgttcggatgtgctgtagtgtacggagagaacaacaacaacggtatcatcggtggtttcatggtcagaggacaagactacaagccagcttttgaggtcgctccagactgggagtcttactcttacgagaagttggaccctaacagtgaggaagaccgtgagttcttcaacaacatgttggcttgggataagccaattgttgtcaacggtgaagagaaggagattgctgatggtaaggttttgaaatag

SEQ ID NO: 947 - DNA, 1167 bp, Pichia pastoris
atgtctcacagaaagtttgaagctccacgtcacggttcccttggtttcttgccaaagaagagagcctcttctccaagagccagatgtaaggctttccctaaggacgacaagtccaagccagtcgctttgaccgccttcatgggttacaaggctggtatgtccaccatcgtgagagacttggaccgtccaggttccaagatgcacaagcgtgaggttgttgaggccgtctccattgttgacactccacctctcgttgttgtcggtgtcgttggttacgttgagaccaccagcggtcttaagtctttgaccaccgtctgggctgagcacttgtctgatgatgttagaagaagattctacaagaactggtacaagtccaagaaggtcgctttcagcaagtactctgccaagtacgccaacgacccagcctctatcgagactgagttggccagaatcaagaagtacgcttctgttgtcagagtcctcgtccacacccagatcagaaagacccctttgaaccaaaagagagctcacttggctgagatccaaatcaacggtggttccatttctgagaaggtcgactgggccagagaccacttcgagcagaccattgctgttgacaccgtctttgagcagaacgagaacattgacgttatcgctgtcaccaagggtcacggtttcgaaggtgtcacccacagatggggaaccaagaagcttccaagaaagacccacagaggtttgagaaaggttgcttgtattggtgcttggcatccagcccacgttatgtggactgttgccagagccggtcaaaacggtttccaccacagaacctctatcaaccacaagatttacagagttggtaagggtgatgatgagtccaacggttctaccgagtatgacagaaccaagaagaccgttactcctcttggtggttttgtcagatacggtgagatcagaaacgacttcgtcatgatcaagggttccatcccaggtccagtcaagagagttgtcaccttgagaaagtctttgtacactcaaacctccagaaaggccaccgagcaagtcacccttaagtggatcgacactgcttccaaattcggtaagggtagattccaaaccccagccgagaaggccgccttcttgggtacccttaagaaggacttgcagtaa

SEQ ID NO: 948 - DNA, 1230 bp, Pichia pastoris
atgctaaccaaggttatttcactcgctattttaactgcttcagcctttgctgattctggagagttcactctttggaacttgtcacccggtgacccttacgactcaactttctggggggtatctgaaggtttaatcgtccctgtagaacctggtgtgacttttgttatcactgatgacctacagcttaagactactgatgatcaattcgttactgttggtgaggactccgctctaggtttaggagctgaaggttcggtagaattcagcatcatcaacgaggatggcattacctctctttactacaacggtgagcttgttactgcttacatttgtgagggtgcagaaccccagatttatctcacaggttcagaggaggaccccgaatgtgtttcttacactgtcgctgtgataggcgtagacggcgaagccccaccaactttcccagaggaagacgacgagacaacaacaaccgatgatccaaccgatgagccaaccgatgagccaactgatgagccaactgatgagccaactgatgagccaaccgatgagccaactgatgagccaaccgatgagccaactgatgaaccaactgatgagccaactgatgagccaactgatgagccaaccgatgagccaactgatgagccaaccgatgagccaaccgatgagccaactgaagagccaactgaagagccaactgaagagccaaccgatgaaccaactccacctcctcctcattggggaaatgaaactgtaactgctactaagactgagtatgaaactacaaaagttactatcacttcctgtgaggaaaccaaatgctatgagactacttctgatgcttgggtttctacttgcaccacagaaattggcggaaaggtaactaaaattgttacttggtgcccaatcccatctactccaggtcctaaaccacctaagcctaccaagccaaccgaaactaagccaaccactgttcctgcaccaaccactaagaagccagaaacaccaactactaagaagccagaaacgccagcccctgagaagccagaaaagacaaccactgttattcctccaccaaccactgagaagccatccactttgtctaccagtagtgttactggaagtgttaccattccaactataactgccactggcggtgctggttccaatttcaacttgggtggattaaccgtcggagttgctggtattgcaatggctttgtttgtgtaa

SEQ ID NO: 949 - DNA, 192 bp, Pichia pastoris
atgtctcgtcagggaggaaaggctaagccactaaagaaaccaaagaagaagacccaggagtttgatgaagaggatttagccttcaaggcaaagatgaaagcagatgctgctgctaagaaagcgatggccgagaaagcatcaaagggaggacctctgattggtggaggtattaagaagagcggaaagaaataa

SEQ ID NO: 950 - DNA, 354 bp, Pichia pastoris
atggcttccgcaggtttaaacgacgtggtgacccgtgagtacaccattaacctccacaagagattgtttggtgttcagttcaagaagcgtgctccaaaggccgtcaaggagatcaagaaatttgccaaactacacatgggaactgaagacgtcagactggatcctaagctgaacatggctgtgtggaagagaggtatcaagggagttcctttcagaatgagactcagaatttccagaaagagaaatgaagatgaggatgccaagtacaagttgttctcttacgtcgagcccgtcaacgtcccaaccgtcaagggtttggagactgttgtaattgaggaggacgacgaagagtaa

SEQ ID NO: 951 - DNA, 1089 bp, Pichia pastoris
atggccaaatctagcaaagtttcgtccaagtccgccgctaaggcatcgaagggagagaagaagtccaagaagcaggagtcatcctcttctgaatcttcttctggttcctcatcagagtcttctggttctgaatcagaatctgaagaggaaagtgtgaaagagtctaagaaggaagccaattcgtccgagtccgagtccgagtccgagtctgagtctgaagccgagtccgataagaaagaggaagccgccgagtctggatctgagtccgagtccgagtccgagtctgagtctgagaaggaagatgagaagtccgctaaacgttctgccgaggagtccgaagaagagccagctaagaaagccaagaccgaagagatcactacgctgttcgtcggaagactgtcatggtctattgatgacgaatggttgaagaaggagttcgagcacattggaggagttgtgggagccagagttatgatggagagagctacgggaagatcgcgtggatatggttacgtagactttgacaacaaagccagcgccgagaaagccttagaagagatgcagggtaaggagatcgatggaagacctattaatgtggacatgtccaactcaaagccagccgccccagccgccagaaacaacgatagagccagccaatacggagacaagagatctccaccttcagacacattgtttttgggtaacctttcattccaagccgacagagacactctgttcgagcttttcagtaagcatggaaacgtcactagtgttagaattccaactcacccagagactgagcaaccaaagggtttcggatacgtccaattctcttcagttgacgaggctacgggtgctttggaggccttgaacggtgagtacgttgacaacagaccaatcagattggactactctaccccaagagacccttccgcctccggtggacgtggtggaagaggtggacgtggtggtcgtggaggattccgcggaggacgtggtggattctctggtgaccgttcttttggatctggtgccaacagtgctcctgttaacagtggtttccaaggtcaaaagaagaccttcaactaa

SEQ ID NO: 952 - DNA, 915 bp, Pichia pastoris
atggctgacaacaacaagtctaacttcttcgtcgacttcatgatgggtggtgtttccgccgccgtctccaagaccgctgctgctccaattgagagagtcaagcttcttatccagaaccaagatgagatgcttaagcagggccgtcttgctaagaagtacgatggtatcgctgaatgtttcaagagaaccgctgctgatgagggtattgcttctttctggagaggtaacactgctaacgttattcgttatttcccaactcaagctctgaactttgctttcaaggacaaattcaaggctatgttcggtttcaagaaggatgagggatggtggaagtggttggccggtaaccttgcttccggtggtttggctggtgccacttctttgttcttcgtttactctttggattacgccagaaccagattggctaacgatgccaaggcttccaagggttccggtgagcgtcaattcaacggtttgatcgatgtctacaagaagactttggctactgatggtattgctggtttgtacagaggtttcttgccttccgttgttggtattgttgtttaccgtggtttgtacttcggtttgtacgactctttgaagccaatcgttttggttggtcctcttgaaggttctttcttggcttccttcctgttgggttggaccgttactactggtgcttctactgcttcttacccattggacactgttagaagaagaatgatgatgacctctggtcaagccgttaagtacaacggtgctttcgacgctttcagaaagatcgttgctgctgagggtatcaaatctttgttcaagggttgtggtgctaacatcctgagaggtgtcgctggtgccggtgttatctccatgtacgaccaattgcaaatgattatgttcggaaagaagttcaaataa

SEQ ID NO: 953 - DNA, 849 bp, Pichia pastoris
atggctagaggaccaaagaagcatctaaagcgtctcgcagctccatcccactggatgcttgacaagttgtcgggtacttatgccccaagaccatccccaggtcctcacaagttgcgtgagtccctgccattgattgtgttcttgagaaaccgtcttaagtatgctttgaacggtcgtgaggtcaaggccattttgatgcagagacacgtccaggtcgacggtaaagtcagaaccgatgctacattcccagctggtttcatggacgtcatcactttggaggccaccaacgaaaacttcagattggtctacgacgtcaagggtagatttgctgtccacagaatcaccgacgaggaggccacttacaagttgggtaaggttaagaaggtgcaattaggaaagaagggtatcccatacttggtcacccacgacggtagaaccatcagataccctgacccagatatcaaggttaacgactctatcaagattgacctggctaccggaaagattttggactttgttaagtttgatgttggtaagttagtcatggttaccggtggtcgtaacttgggaagagtcggtgtcattacccaccgtgaaaagcacgagggtggtttcgacttggttcacatcaaggatgctctggaaaaccagttcgttactagattgtccaacgttttcatcattggtgaagctaacgccccaatcatctcccttccaaagggtaagggtatcaagttgtccattgctgaggagcgtgaccagagacgtcaacaacagggtctggatgttgaggccgaagaagaggttgaggaagaggctgacgttgattctgaagttgattttgagtaa

SEQ ID NO: 954 - DNA, 1218 bp, Pichia pastoris
atgcaaacatttgtcaaaagatcaattcgcaatataccaaaaatggccactagtgctcaccagaattttgcaaaatatcttgcaactgaccatatggccagtgacttggttccactggatgcttctaaacttcaggtcactcgtaccactcagccaaaatccaagcttcctaaggaaaagcttgtttttggtcagtctttcaccgaccacatgttgacagttgaattcgaccaagcaagcggttggggcaccccagagattaagccttacggccctctttctttggatccttctgcttgcgtttttcattatgcatttgagttatttgaaggtatgaaggcctacaaagactcccaaggaaaaatacgtctgtttagacccgacatgaacatggcacgtttcaacaaatccgccgctcgtatatgtcttccaactgttgacggcgaggaacttatcaaattaatcagcgagttgctcaaacttgatcaatcatttgtccccgaaggagaaggctactcattgtacattagacccacattgatcggaacttcatctggacttggagtaggtgccccagataaggccttgctctacgtaatttgctccccagtgggcccttactacccaactggatacaaagctatttcattagaggccaccgactacgccactagagcttggccaggaggtgttggtgacaagaaactgggtgccaactacgctccgtgcattaagcctcagctgtctgcagccaagaatggtcatcaacagaacttgtggctgtttggagaagagaagtttatcaccgaggttggaactatgaacgttttctttgtgttcaagaatgcagacactggaaagaaagaacttgtaactgctccattagatggaactattttggagggtgtcaccagagactctatattaaaattagctcgtgataggctggaccctaatgagtgggaagttaacgagagatattacactgcccacgaggttgctgaaaaagctgaaaacggtttgctagtagaggcctttggttcaggaactgctgctgtcgttgctccaatcaagaacattgcctttaacggaaaggattacgacgtgccattggtacctggtgaacaatatggtgagatggccaagactgttgccgactggattgctgacatccaatacggtgttgttgacagtgagtggtcaagagtcataaattag

SEQ ID NO: 955 - DNA, 345 bp, Pichia pastoris
atgggattgggcaatttttggcttgaaaggaatattactaacaaacatttagtcaggagttcaaactttgctgaagatcgtacacaaagactgaaggaagccaaactggatgctgccaaagatatcaaggagtataagcaaaagaaagaaaaagaactaaaggaacatgaggcccaattttcgggatcaaacgatgacttggaaaaggcagctgaatcagaggttcaaactgaattggtggaaattgacaaaagtgctgaagccaagaaggaggatgtggttaaattgctccttgatgcaatcacccatcccaaaccagaacttcacgtcaatgccagagcttag

SEQ ID NO: 956 - DNA, 309 bp, Pichia pastoris
atggttcaagaaattaactctgctgaagaatttgacaaggctatcgcctctggtgtcgtcctcgtggacttttttgccacatggtgtggtccttgtaagatgattgctcctgtcttggacaagttctccaaggagtatgagcaagttaccttctacaaggttgacgttgacaagttgagtgaggttgctgctcgttttgagatctctgccatgccaactttcttgttcttccagaacggagaggttgtctccaaggttactggagccaatgctgctgctatcaagcagaccataaccaagttgatttaa

SEQ ID NO: 957 - DNA, 1779 bp, Pichia pastoris
atgaagaacttcttcaacagctccgactccgaaaagcatgaggagaaagtaaatgatgagaaggtacagagtatctcttattcacagtcaattctgtcactaccggacttagacccaacactttccagacatgctagtgaatatgaggcagatctttccaagattcagccaggtgttgcaggtgagaaaggtcaccaattgaagagggaccttaaggctcgtcatatttccatgattgctcttggtggttctttgggtaccggtcttttgattggaaccgcaaattctctagctactgctggtccgggatcagtcttcatcacatatagtttcgtcggtctcatggtgttcttcgtcatgagtgccttgggtgaaatggcaacctacatcccactagctggtggttttaccggttactctgatcgttatgcccatccagccttaggtttcgccgttggttactcatacttggccaaatatttgattgtcactccaaaccaattggttgctgggtccctagttatgcaatattgggtctcccccgaaaaggttaatccgggcgtgtggatcaccatctttttggtgtctgttgttttgatcaacttgtttggtgtcaaattttttggtgaattggagttctggttgtcttctttgaaagtcattacggttctcggtttgatcattatgctctttgtcttcatgctcggaggtggtccagaccatgagcgtcttggttttagatactggaccaatcctggtgcttttgccccatggaagggaattgcttctattcctaaagccaaattcattgcctttgtttcttcttttgtttacgccgtttttgcctattcaggtactgagttggtgggtgttgttgtggcagaggcttccagaccacgaagaaacgtcccaagggctattaaactgacattttacagaatttgtgttttctacattctatctgtcctgttgttaggatgctgtgttgcctataacgacgcagagttagttgccgcaagagcaaagtcaacttcatccagtgcatctccattcgttgttgctatcaatgcacaaggaatttcaggtcttcctcatttgatgaatgcttgtattttgatcttcgttttctccgcttgtaattcggatctttacattgcaaccagaactttgtatggtctttcagtccagagaaaagctccaaagattctttccagaactaataaaacaggtgttccttacctgtctttggccgttgccttctgtttctcatgcttagcctacatggcctgctcttctggttctgcttcaattttcggttatttcgtcaacgtcgtttccattatgggtttgcttacatggatttctctgctaatcacccacatttgtttcatgaatgccatgaaggctcaaggtatccccagaaaaagtcttccttacagagctcctttccagccatacgcttcttggattacactatttttctgcattcttgttgctttgatcaagaacttcacagttttccttaacggatttaactacaaggacttcattaccggctatattggaattccttactatttcatttgtttctttggatacaagtttatcactggagcaaagcgtcacaagtctgctgaagtcgacttgctaacacacaaggacgtcattgatgccgaagaagaggaatatgcatttgcagaggccgaacttaaggcagaaagaggtaataagaaagacgcccagtggctgtacgacaggatttttggatggattttttaa

SEQ ID NO: 958 - DNA, 408 bp, Pichia pastoris
atgagtgacgccgttactattagaaccagaaaggtcatcaagaaccctcttcttgctagaattcagtttgtcattgacgtacaccacccaggtaaggctaacgtctccaaggatgagctccgtgagagactggccgagatctacaaggctgacaaagatgccgtctccgtgttcggtttcagaacccacttcggtggaggaaagtcctctggtttcggtctggtgtaccagtccgtctctgatgctaagagatttgagccaacctaccgtttgatcagatacggattggcccagaaggtggagaagccatccagacaacagagaaagcaaaaaaagaacagagacaagaagatttttggtactcaagagaagtttgccaaaaaggctgccaagcgtgctgccgaatag

SEQ ID NO: 959 - DNA, 1329 bp, Pichia pastoris
atgccttctcacttcgacactttgcagctgcacgccggtcagaccgctgaagctccacacaatgccagagctgttcctatctacgctacctcgtcttacgttttcagagactctgagcacggtgccaagctgttcggtttggaggagccaggttacatctactctcgtttgatgaaccctactcagaacgtctttgaagagagaattgccgctttggagggtggtgccgctgctttggctgttggatccggtcaagctgctcaattcctggctattgctggtttggctcacactggtgacaacgtcatctccacctctttcttgtacggtggaacttacaaccaattcaaggtcgccttcaagagactgggaattgaatccagatttgtccatggtgatgacccagctgaattcgagagactgatcgatgataagaccaaggccatctacgttgagtccattggtaacccaaagtacaatattccagattttgaggctctcgcagagcttgcccacaagcacggtatcccattagttgttgacaacacctttggtgccggtggttactacgttagaccaatcgagcttggtgctgacatcgtcacccactccaccactaagtggatcaatggtcacggtaacaccatcggtggtgttgtcgttgactctggtaagttcccatggaaagactacccagagaagtaccctcaattctccaagccatctgagggttaccacggtttgatcttgaatgacgcctttggaccagctgccttcattggtcacttgagaactgaactgctaagagatttgggtcctgcttcaagtccattcggtaacttcttgaacataatcggtttggagaccttatctctgagagctgagagacacgctgagaatgctttgaagctggccaaatacttggaaacctctccatacgtcagctgggtctcttaccctggtttggagtctcacgactaccacgaggccgctaagaagtacttgaagaacggtttcggtgctgtattgtcttttggagtcaaggatcatggcaagccagcgctcactcccttcgaagaggctggtcctaaggttgtagactccctgaaggttttctccaacttggctaacgttggtgactccaagtctttgatcattgctccttactacactactcaccaacagttgtctcacgaggagaagctggcttccggtgtcaccaaggactctatccgtgtttctgtcggaacagagttcatcgatgatcttattgcagaccttgaacaggcctttgcccttgtttacgaggaggcaaacacaaagttgtga

SEQ ID NO: 960 - DNA, 3051 bp, Pichia pastoris
atgctgaatagagtgttgttggttgccctttcttgtgtggttttctttcacttggttacaacctttcctgttggcacttcaagtgattccttgcagattaggaatcttctgagtcacaacttcaccagagctaatatctctgaaggtctcagttcaggagccacttattttgtcgatgaagacactgagacatattacgacaaagagctaaaggtcctgagaactacaagattccctcgctataacaattaccagctgcaaccttatgttgccaacggttatattggttcccgaatcccccgagttgggtcaggatttacctacgacactagcgataataagacttccgagaatctgaaaaacggctggcccttattcaacaagaggtactcaggggcctttattgctggatttttcaactctcaaccgaccgtacctgagaccaacttcgaagagttggaaaaagacggttatgagagtattattgcctctattcctcaatggactagcctagagttaaccgttaatgtgaatggaaccaaccaaactctcaaagcagatgatgtcgatataacccacatcagtgactattctcaacagttatcgttgttagatggaattgtcactactaattacacatggttgggactggtcaatgtttcaatctctgtcctagcccatagagacattgtaagtttgggattcgtgtctctggagctatcatcgcagaagaatataactgtttccgtcactgatattcttgatttcgcaaccagcaccaggtgttcttatttggactcaggagtaaatgaacagagtattttcatgaaggttcaaccgtcaaatgttccgacgaatgctacgatttactcttcattgatgagctctaattcgacctcgtcccttttaaagcaaaatcaaacggtatctcaaacacttcgggtaaatctatcgaagaaccaagctgcatcgtttcaaaaatacgtcggcgttgtctctgacgactatctagatagcattgaaactaacttgacctcttaccaatttgctagagaaactgctaagtttgctgaaataaaagggcgttcgtggatcttgaaatctcataaagaggcatggaacgaattgttaaatggaaagtctattgtctttcacgacaatgattttttgacattggcttccgattcaagcatttaccacttgatggccaatacaagatcagaagccaatggaggcacttctgctttaggggtttccgggctgtcttcggattcatacggaggaatggtgttttgggacactgacttttggatgctaccgagtgtccaagcctttagtccccgacatgccgtttctttatccaaatttagagaccatacccatgatcaagctaagaagaatgcccaaactcgtgacatgaatggggcagtctacccctggactagtggtagatttggaaattgtacctcaactggtccgtgttatgattacgagtatcatatcaatatagacattgccttcatgttctggaaattatatttgggaggtgcaattgatgatgattatatgaaggaatttggatacccaataattgaagatgttgcctcttttttcgtggattacgttgactacaattcaactttagataaatatacgaccagaaatctgacagacccagatgagtatgctgagttcaaaaataacgcagcatttaccaacgtcggtatttctcagctcatgaaatgggctctcatccttggaaagcatcttaaagtcggaaatgaaaggagttacgacaaatgggaagatatcatgaccaaaatgtatttacctgtcaaccatgcaggagatgttacgttggaatatacagggatgaacaactctatcgaagtcaaacaagctgatgtggttcttatttcttatcctttagatgatgaggatggtgccttacaggaatatttcgattacgatgaggatagggctatcagcgacgttagatattactctgataaacaaacagatgaaggcccggctatgactttctctgtttactctgcggtcaatgcgaagtttaacaaagaaggatgctcttctcaaacctatctcttgaaatctgtagaaccttatttcaggtttccatttggacagatgagtgaacagtcaacggatcagtatgataccaatggaggaactcaccctgccttcccatttttaaccggtcatggagctttcttgcaaagttctatttatggtttgaccggattaagatttagctatatttacaacgatacagacaaatctatcaagagaaggctggccttcgatccccttcaactaccgtgtttaccgggcggattctctataaatggatttgtctatatgaaccagacgttggacatcactgtgaacgatacgtatgctacaattgcacatcggggaaatgctaccaccatcaatgtttatgtggattctagaaatgaaatgggaggtaaggaacacaagatccaaccaggaaagagcctttccatcccattataccaaacagagcagaatattccaggatcattcattgaatgcacggtaaagaatgtcactgcattgcaacctggcgtggtaggagaccctatccaggcagttgctgacggagataactccactatctggaaaattgaatctcgtgaagaaccgactcatctgatatttgatcttggagatgagcttgacattgaaggaggcttggttgtatggggaacatatcctgcagagagcttttcagtctcggttttgagagattttaattcaacgaactacagagtcatcaacaacgttgaaaactacgatttgatctacgaatctgggaatgtcacagcatccagcccttttgacgaatctcacatcaagaaagtccaaatcttgcctcacaattgtacgaattttacgttttccgaactgacagcctctaggtatgtcttatttgagttcacagatgttctaggttacccccaagattattcatatggagcccaagtagccgaagttgttctctactaa

SEQ ID NO: 961 - DNA, 438 bp, Pichia pastoris
atgggtaaaggtaagccaagaggattgaacgccgccagaaagttgagagtgcaccgcagaaacaacagatgggccgacctgcaatacaagtccaagttgttgggaactgccttcaagtcttctccattcggtggttcttctcacgctaagggaatcgtgttggaaaagattggtattgcttccaagcaacctaactccgctattagaaagtgtgtcagagttcagttgatcaagaacggtaagaaggttaccgctttcgttccaaatgatggttgtctgaacttcgtcgatgagaacgacgaagttttgttggccggtttcggtaagagaggtaaggctaagggtgatattccaggtgtcagattcaaggtcgtcaaggtctctggtgtttctttgctgtccttgtggaaggagaagagagagaagccaagatcataa

SEQ ID NO: 962 - DNA, 1035 bp, Pichia pastoris
atggatattgaggcagagccaagtttgcgatcaattgtgaaccacgaatcgctgaagtggatctttgttggaggtaaggggggtgtcggtaaaaccacgacatcttcttctatatctatccagcttgcccttcacaatcctaacaagaaatacctgcttatttccaccgatcctgctcataatttaagcgatgccttcaaccaaaaatttggaaaggacgccagacaagtggagggcttgcctaatttgtcttgtatggagatcgatccagattcaacactggaaaatcttcaaaagaacaacgaatccactttcggtagtgctggaggaaacgatcctttgaagagtatgatgggagatatcacaggctcgattccaggtattgacgaagcattttctttcatggaagttttgaagcatatcggagagacaaaggagaatcagatcaaatacgacaccgtcattttcgacacagcacccactggccatactcttagattcttacagttgccatccactttagaaaaacttctaggaaaggttaacgaattaagcggcagatttggccctatgctcaacaacttattgggaagtcaaggtggacaaagcatcgattttgcttctaagatcaaagaaatccaggtgcaggtcacagaagtgaacaaacagtttcaagatcccgaactcactacctttgtctgtgtatgtatctccgagtttttgtcgttgtatgagactgaaagattgattcaagaattaatgtcatacaacatggatgtcaactccattgtcatcaaccaactgttattctcagacgactctgagtgcagaagatgtaacgccagatggcgtatgcaaaagaaatacctcgatcagatggatgagttatatgaggattaccacctggtcaagatgcctctgctggctatggaagtaagaggcttggaaaatttgaagaaattctccaagtacttaatagagccgtacaacagtgagacagatgggcatgtggttttcgacttagaagagcagtaa

SEQ ID NO: 963 - DNA, 321 bp, Pichia pastoris
atggctaccgaaaccgctttatcatacgccgcccttattttggctgattctgagattgagatctcctccgacaacttgttggctttgaccaccaaggctgacgttaaggttgacaagatttacgctgaccttttttccaaggctttggacggtaagaacttgaaggatttgttctttaacatttcctctgcccctgcctccggtgctgctgctggtggtgctgccgcttcttctgctgatgctgaggaggctgctgaggagaaggaggaagaggccaaggaagagtccgacgacgacatgggcttcggtctattcgactag

SEQ ID NO: 964 - DNA, 444 bp, Pichia pastoris
atgtctcaagaagctaagtccgtacaaagtgttcagacctttggtaagaagaagtccgctactgccgttgcccacgttaaacagggttccggtcttatcaaggttaacggttcacctatcactctggtgcaacctgagatcttgagacacaaagtttacgagccactattattagttggtttggacaaatttgccaacattgacatcagaattaaggttaccggtggtggtcacgtttcccaagtttacgccatcagacaagctcttgctaagggcttgatcgcttacactcaaaagttcgttgacgagtctaccaagaacgagttgaagaagattttccagtcatacgacagaaccctgttgattgctgattccagaagaaaggagccaaagaagttcggtggtcgtggtgcccgtgccagattccagaaatcttaccgttaa

SEQ ID NO: 965 - DNA, 5937 bp, Pichia pastoris
atgtcatttaaacagtccctcttatcacaaacaccttccagcataaccccatctcagttcttggctgacttgatttcgcagcatagtaatgaacagaaaaatgtgcttgcattgttatttgccgaaatcttggttccaggatcccaacacatttcatcttccacatccacaaaaacaactgcattaactccttccaccctaccagaggctacggccagaggttcacaatttagaagtttgctgaaaggtttaaatattgaacagtctacgtgggatcaaattattgagctcatctttgaaacagatgactacttttctgacgcaacatcaatttctcaggtaaccgttgcctccatttcacaattcttagcttcattagaacccgagaatattgacaaatttttaagatacgttgctcatcataagctcaaagatcatccatttttgtttcaaaagaaccttcttgtatccttgtattccttgaacccacaacatggtgctatagatttattgtcctgcccattacaaccagtgctcgccaatgaaccaaactcacgaagaactattatatggttcaaatacattgctgagctggaagtatcacttttggtcgaactgaaatctagaccagcaactgcagatgagaatcaaatcaatgagatcattgaggattcttacaagactgccccagaatacttaggtttggcggcactacacttgtggaaagaaaataaggacaataatgccgatccaggaactaccttggcatatttgaatctttgtcatcactttatcgttcagttacttgatatcaattcaccatatttgataattttgctgactgagttcaaagaaattagcgaggatgaactttcgtcgttacttgcaaactacgtttcattgagacctaatggtgcgatcactgtggcaacttatgctctccgtgacggtgtactttcttccgtacttaacaaattatcaaagtttaatgattgtttaagtgttgctattgaagccagtaatcttggttggaatggtctagaaaaatttgttcagaatttgttaagtaacaatccaaagcaagtccagagtcagctggttgattttttggaagagcagtccagctttgaataccaaagttctaacaatgaatccaatgctcaaatcaagtctcataggtcgttgtcaattcctgttgtctacactttactcaaggcaatcgaaggacaaaagctgtctggagatttggttgacaaattcaagaatgtccaagtttctgttattcaagcttatcccagactgatcaactttggccgtggtcatgacgaagccattctggcgaatggaaattcacactcattcccaccttcagtcgagcaagaaatgaagagttattaccagaaaatgtacctgaaacagttggagattaaatccgttattaattcattgaaggcattcaaggattcggataatcctcatgaacaagacatttttgcttgcatgatccactctttactcgacgaatatagattctttccagagtatccaatcgatgcgttggcaaccacttcggtactttttggttcaacgatatattttcagttgattgaaggtactactttaacaatcgctttgcgatacattttggagagttgtcgccagccaccagaagacaacatgtttaagtttgctgttcaggccttatacacctttagggaaaagctgggcgattacaagtcatattgcgcacttctctcggaggtcccttctttgaagcaacaaccacaaatttatgagattcttcaacaagtcatgaatggaacttttagagctcctccctcaatcccttcccagggaattgggtctggcgaaagacaaccttcacagggaaagcagccgtcaaatgattcgttggtagtgtcaaagttcaagtctcttaatttggctgtagaactccagcgtagagaccaagagacaccagatgaaaacgtttctgatcatgtcctgttcctcgtgaacaatataactgaagaaaatctttctgctaaagtagaagaaatgaataaggttttggagcctcaatattttgaatggttttctaactatttggtcacccaaagagtgaaaacagaacctaattaccattcactttattgttctttgatttctcgattggataatctgctattggatgcatacattcttaacctcacattcaaagagattattctcattttgaataagtgttatgatgtcaatgatgaaattagtggtcctgagagaactcatctcaagaatttaggttcttggttaggactgatcacccttaccagaaacagaccactcaagcacaggaacttagctctgaaaatgttggtcctggaagcttacgataagaacaagttagaagttgttttaccattagtttgtaagattctagatcaggccaagaattcaaaggttttcttacctcccaatccgtggacagtgggaaatctgaaactgctaaaagagctttacgacgttggtaatttgccattaaaattgaagtttgagattgaagtactgtataattcattgaacacgaagttgggagatattgaagcagccaacataattagaacacatcaaccggccgatattgaccagtttgcggtagctacgaacatgatgaaagaattgacactatctaatgttaatcaaatgaagcaacaacaacagcagcagcagcagcagcaacaacaacaacaacatcagcaacagcaacaacagcaacagcaacaacaacagcaattctttttgcaacaacaggctgctttgcaagctcaacaagttcaacagccccaaataccatttgatcctcaagccaatcctggagttagtacagctaccccagcagatgagagtaaccaattgaaagtgttctccaatttgttgggaacgacgtcttttgttacaattccaactctaaagtatttgtttcaggcagctttagcccgagctgtaaaggagattttaccccttgtagttgacaggacaaacttaattgctctggttaccactaaggcactggtttcgaaggattttgctctagaatcggatgaagctaaattccgaacggcctatattaaccaggtcagctatctgacggagtcattaagtttggcttcttgtcgtgatccactaagggagagcatccaaatgaacgcgctccagatcgccaacaccatgcccaatattgatagcacactttttgaagaactgcctcaagcaattacggataatatcgatttggcctcaacgattattcagaaagctgctgtggaacgtgcaattcaggacattgacgaattaatggcacctcagctggctattcgtcgccagcatagggagttaaaacctaatcaacaattcattgatcctactatgaggtcaagatacccaatgcttctgcctgtacctttgggactgaaatccgatggtgtcattccaaaacagttcatgatatacgaaaactttggtaagaacagaattgtttctcctatgcaacagcctgaacatttgcaaaacataaacagccaactaaatccttccttacgtcaaggagcccaacagcctttggttccacctggagttgctgagcaaatgaaacagcaaatgcccccggcattaccaggccaaggaggcgccgtttcactggagcaaacctttatgtttttgcaacaattagttgactctgtgattaacctgacccgtgatgctcctgaaaagcttatttcagaagtcaacaccgatagtgttgtggtaacagtactaggagaaatattgcagacttgtattggagctactgtaacagattcactcattctcaagatatctcagtacgtcatgaacatgctgtttgtccggaccaactcatcattgactcaaaacacgttggtgtttttgttggacaagttgtgtgagttatcgccttttacagccaaggatattagttggtggttagtccatgctgaggatgaaagaaagtataacaagaatgtcatgagagatttgattctgttgggattggttccgttagctgaacttgatcggtcgttggcaattcaaatagaaaagaaaaatgttaaggccgttctctttacaatctatttgattcatgactccatcctcagtgaggacccaattgcattacgtgcagaccttataaacagtatagaggcccttcaagtccttgctcatgaaccatcagagatcggcagaaaggcctacatgtctatctcaaggctaaaagcaatcgtcaaaagcaattcaattcagattttcaagatgttcggaacctccacaatatctaaaaaacaatacatgagctatgtatttgctgaatgggttaagttggttcaatattcgagagtgaacagagtattagaagacttcatatggcaattagttgatgacggtattgtgaacaacagtgaaaatctatctctcttgatcacgactgccaccgaaatgtctgttgctgctttttccaaagaagcagacccaagtaagaagttgcacattgagacgtatgctcccgcggacgcactcgctttgttgttggttaaacttttgcttatgcaagaggattctactggagttgagagaaagacctttttcaattctatgttagctgttatagttcttgcctttgcaagcgaccataacaataacagtactagtttcaatgaaagaccttatttcagaattttctcatcgctgttttcgtactggctaagcgctagacacgaattcgaagatggtgacgatgaatcgctgaagacatttaattcggagctctatctcattttagctcagaacttgatggtaatgcagccaagttcatttccgggcttcacttttgcatggatttctttgatttctcatagaatgttcatgccgatgatcttggaagtacctgaaaataagggatggggtcgatttgtgaatctgttacaatgtttactatcatttcaacttcattatgtcgatagtgagaagatcagtgacgtagtgaatgttgtttacaaaggaactctgcgaatcattgccctgttgtcgcacgattttcctgatctattggttcaatatcattaccaattgataagttcaactcctgaatcttatgtccaattaaaaaatattatatcatcagcctatcctaagggaataactgtacccaatccatttcaacaaggattaaaagttgacaggctagaagaaatcaagcaagaacctccaattggctatcaccccgagtcagatttaacagccaaaggcctcaagaagcccgtcgaaagctacctgcgtattccttcgcagtcattattgaaaaccatctcaactggcctaagcgttgctgagcccagaaatgggaaaagtaagtatgatgctggtctagtcaatgctgtagtattctttgtgggaatcgcagcagttgaagaacaaaagtcattccgcgatggttcttcctttgattctacctccaatcatgtgatgctgttgtcatctttgatcaaggacggggatgttgagttacagaatttaatcttaacagcaattgccaaccaattgaggtatcccaactcgcacacgcattggtttagttgcattttgttgcattttgtgggatcagctactctatggggagatcaaagagaggctataaagttcaatattagctgtgtattgacaaagagagcaatgtcatataaccccatcccatggggtatattagtgacgttcctggagttggtcagcaacagtgagtatgagatattctcttccccatttatcaaaggtgatgccacgctggaaagattgtttggcacactgcaacaccatgtgaggaaccaaaaacccattgatgaacaaccggaaccgctgaagttgtag

SEQ ID NO: 966 - DNA, 900 bp, Pichia pastoris
atggcattggcaattcctcaaattggcttcggaaccggtaccacatggtacaaatacggtagagaatcagaaatcgaccagactttggttgacgctttggtgtccgctttgcaagttggaatcacccatctcgacggtgccgaatgttatggtacagcattggaaaccagggatgccattaagaaggccaacattccaagagagaagttgtggattactgaaaaatactatgctggagattcaagtcacaaaagtaaatccaaagctgccaacccactagcggctctgaaggagattttgaggttggaagaactggaatatgttgacttgtacttgctacattctccttacataacaaaggaaacccacggttttaccttagaagaagcctggggttacctagaagaagcacaaagtcttggattggccaaaaatatcggagtctctaacttcacagtggctgacctggagaagatcctgaaagttgccaaggtcaagcctcaggtgaatcagatcgaatacaatgccttcttgcaagaccagactcctggagttgtggagttttctcagaagaatggcatcctcattgaagcttactctcctttggctccattgtacaagggcgataagtcaattaaggaagtcaaggaatttttagattacgtttatgaattgggcaagaagtacggtaagtctgatacccaagttctgctaaagtgggttctacagaagggaataattccaattaccacaagcaccaaaaccgaacgagtcaaggaatttttgaagattgacgacttccagttggagccttctgaggtcgaaaagattactactcttggtgccaaagccccagtggtcagacagtattgggttcctgaatacagcaagtttgattag

SEQ ID NO: 967 - DNA, 456 bp, Pichia pastoris
atgggtcgtatgcacagcagcggaaaaggtatctcagcctcagctcttccttactcaagaaaccctccttcttggttcaagttgactcctgatgatgtcgttcaacaggttatcaagtacgccagaaagggtttgactccttctcaaatcggtgttcttctgagagatgctcacggtgttgctcagactagattcatcactggtaacaagattctcagaattttgaagtctaacggtttggctcctgctattccagaggacttgtactacctgatcaagaaggctgtctccgttagaaagcacttggagagaaacagaaaggacaaggactccaagttcagattgattttgattgagtccagaatccacagactggctcgttactacagaactgtttctgtcttgccacctaactggaagtacgagtctgccaccgcctctactttggttaactag

SEQ ID NO: 968 - DNA, 855 bp, Pichia pastoris
atgcgtaacgataagatatccctatactcaccggactactatttggcttgcaccgtgggtggagccctagcatgtgcaccaacacacggtggaataacaccactggatcttgttaaatgccgtcgtcaagtcaattcttcattatactcctctaattggaaaggaatcaccagcattatcaaaaatgagggattccccgctctctacactggtgtcttacccacgtttattggatatggtcttcaaggagctgccaagtatggtggttatgagtacttcaaaaaacagtacactgatttgaatggaggcaaggcaaacactttcaccttccttgcagctagtgctacagctgagtttattgctgatattttcctgtgtcccttggaagccatgaaggtgaaaattcagactactctaccaccggataagcccaatcttagagagttgagcctgtataaagggctggttcccctatggtgcagacaaatcccctataccatggtcaagttcaccagttttgagaaaattgtggatcttatctatagcaaggctatcaaaaagccaaaggaccagctgtcgaatttgcaacagacagcagtgtcattcacgggagggtacattgcaggtattttctgtgctgcagtatcccatccagctgacgtgatggtgagtctaatgaacaacaataaagaaggactcagtgttgcccaattgtaccaaaagataggtttcagcggtctttggaacggtctaggcatcagaatcgtcatgatcggaaccctgaccggattccaatggctgatctatgactcatttaaggtttattcagggctccctacgacaggaggtcattaa

SEQ ID NO: 969 - DNA, 1089 bp, Pichia pastoris
atgttattccctagagaaaccacatgctcaactgagagtgattttaatggtgaacacatgggtgccagaatttcatcagtgtttgtgattctggttacctccatgtttggtgcctttttccccatcctgtcatcaagatactcgttcataaggttgccagactggtgctttttcatagcaaagttctttggctctggtgttattatcgcaactgcctttattcatttgctccaacctgcaaatgaagctctttcagatgaatgtttgggtgagggattcgaagactacccatacgctttcgccattgcattggtatccatttttgtgatgtgttttggtgaattgatgacatttagattcatggaccataagttagaagttgctgaagaaaaacagataaatgcggacaagatctcaaagcttgaaaatgaagaggatgatgaagttggaacgggtcttgacttgaatacacaaccagctcctgaaccccaacaaatgaacccagaaaacactctagagaaccactttgctcatcagaatgaacaccaagatattgagaatgttggaacattagtagacaataacttggaaagctacaagagccagttcatttccgttctcgttctggaatttggtatcatcttccattctgtgttcgtcggtttaactttggctacatcaggtgatgagtttaccacgttgtatccagtgatagtattccatcagatgtttgaaggtctgggtttgggaactagaatcgccgcaactccatggccacataaccgcaggctcactccatggttctttgctcttgcctatggtcttactaccccgattgcaattgccatcggacttggtgttcgtcactcttatgctgcaggttcgagtactgctcttatcaccaacggatgctttgatgctgtgtctgctggtattctgatatacacgggtttggttgaactcatggcgcatgagtttattttcagtacccaattcaatggtaagggaggactgaaacgtcttttgtgggcatatgctatcatgtgtcttggtactgggttgatggctctacttggaaaatgggcctaa

SEQ ID NO: 970 - DNA, 771 bp, Pichia pastoris
atggctgtcggtaagaacaagagactttccaagggtaagaaaggtttgaagaagaaggttgtcgacccattccagagaaaggaatggtacgacatcaaggctcctaccacttttgaaaacagaaacgttggtaagactttgatcaacaagtcgactggtttgaagaacgccgttgatggtttgaagggccgtgtcgtcgaagtctctcttgctgacttgcaaggatccgaggaccactctttcaagaagattaagttgagagtcgatgaggttcaaggtaagaacttgctgaccaacttccacggattcgacttcacctctgacaaagttagatctttggtcagaaaatggcaatccctggttgaggccaacgtcaccgtcaagactgccgatgactacgtgctgagaatcttctgcattgctttcaccagaagacaccaaaaccagatcaagaagaccacctacgctcaatcatcccaactgtccgccatccgtaagaagatggttgagatcatgcaaagagaggtatccaacgtcacattggctcagttgacctccaagctgattcctgaggttattggccgtgagatcgagaaggctgctgaaggtatctacccattgcagaacgttcacatcagaaaagttaaggtgctgaagcaagctaagtttgacttgggtgctttgttggctcttcacggtgagtctgtcactgaggagaacggtaagaaggttggatctgagttccaagatgttgttttggagaccgtctaa

SEQ ID NO: 971 - DNA, 987 bp, Pichia pastoris
atggtagttgcaatcgaaggtggtacaggcttaggccttatgaatcttacttggaaaccaactccaaccccaattgatgatgcaattgagacaattagatatgctgttgaggaagctggtgtcagatacttgaacggaggagagttctacaactttcctcttgattcaaacctgaatttgcagtacattcaggaatttgcaaaaaggtaccccgagctatataaaaaggtgagtctgtcggtaaaaggtgctgtcagtttggtcgatgtgagccccgattcttccccggagaaccttgaaaaatcgatttcaaacataaccaaacatttgccgaacaacttcctgccaatttttgagcctgctagaatcgataaacgttactccattgaggagacaataaagaatctctctaagttcgtcgaagatggcagaattggaggtatttcacttagtgaagttggtgctgacactatcagaagagctgcgaaagtggctcccatcgcctgtgtggaagtggagttttctctattgactagagatattcttcataatggagttcttgctgcttgtgaggatttgaacattcctattattgcctacagtcccttgggaagaggatttttgactggaacgataaacagcaaagctgacattcctgaaggtgatatcaggttaagtttggaaagattcaatgacgatgaagttattgaacacaatttgaaacttgttcacggtttgaaaaagatagccgacaaaaaaggagtcacattggctcaattgtctcttgcgtggttacgaaagtttggagataaacacgtcaaggtgcttcctattccaagctgctcatctcctcgtagagttgcagaaaacacaaaagagatttccttgactgatagcgagttccaggagattactgactttgcagagtcggttccaatcaaaggtggtcgttacaacaaagcaagtgaggctgttcttaacggttag

SEQ ID NO: 972 - DNA, 1938 bp, Pichia pastoris
atgccagctgtcggtattgatttaggaactacatactcatgtgtggcacatttcgccaatgatcgtgttgagatcattgcaaatgaccagggtaacagaactaccccatcattcgtcgctttcactgacaccgagagactgattggtgacgctgctaagaaccaagctgctatgaacccagccaacaccgttttcgacgccaagcgtttgatcggtagaaagttctcagatgctgagacccaagctgatatcaagcacttcccattcaaggtcgttgacaagggtggaaagccaaacattcaagttgaattcaaaggtgagactaaggtcttcactccagaagagatctcttccatggttttgaccaagatgaaggacactgctgagcaattccttggtgacaaggttaacgatgccgttgtcactgtcccagcttacttcaacgactctcagagacaggccactaaggatgctggtctcattgccggtttgaacgttatgagaatcatcaacgagccaaccgctgctgccattgcctacggtttggacaaaaaagctgagggtgagaagaacgttctgatcttcgacttgggtggaggaactttcgatgtttctttgctgtccattgaagacggtattttcgaggtcaaggctactgctggtgacactcacttaggtggtgaggactttgacaacagattggtcaaccacttcatcgctgaattcaagagaaagaacaagaaggacttgtcttcaaaccaaagagctttgagaagattgagaaccgcctgtgagcgtgctaagagaactttgtcttcttctgctcaaacttccatcgagatcgactctttgtttgaaggtgttgacttttacacttctttgaccagagccagattcgaggaactgtgtggtgatctattcagatctaccattgagcctgtggagaaggttttgaaggacgctaagttggacaagtcccaagtcaacgagattgtcttggttggtggttccaccagaattccaaaggtccaaaagttggtgtctgacttcttcaacggtaaggaaccaaacagatctatcaacccagatgaggctgttgcctacggtgccgctgtgcaagctgctattctttccggtgacacttcctccaagacccaagatttgttgctgttggacgttgctcctctgtccctgggtattgagactgctggtggtatcatgaccaagctgatcccaagaaactctaccatcccaaccaagaagtccgagactttctccacttacgctgacaaccaaccaggtgtgttgattcaggtatacgagggtgagagagccaagactgccgacaacaacttattgggtaagttcgagctgtctggtattcctccagctccaagaggtgttcctcagatcgaggtcactttcgacatggatgccaatggtatcttgaacgtctctgccgttgagaagggtaccggtaaggctcaacagatcactatcaccaacgacaagggtagattgtccaaggaagacattgaggccatgatctctgaggctgagaagtacaaggatgaagatgagaaggaggctgccagaatccaagctagaaacgctctggagtcttactcattctctctgaagaacaccttgaacgagaaggaagtcggtgagaaattggatgctgccgacaaggagtctttgaccaaggctattgacgagactacctcatggatcgacgagaaccaaactgctaccaccgaagagttcgaggctaagcaaaaggaattggagggtgttgctaacccaatcatgactaagttctaccaggccaacggaggtgccccaggtggtgctgctccaggtggcttcccaggtgctgccggtgctggtgccgaggccccaggtgctgacggaccaactgttgaggaagtcgattag

SEQ ID NO: 973 - DNA, 906 bp, Pichia pastoris
atgggtggtttatcatttgaacgtcaaagcacaagcatcttaaaaaacttagacaatccaattgaacaagaagaaattagaaccccagaacccgaaatggaagtgaaggaaactgtcgaaggcgttccgatggcattgtctggttcaacttccagcacaaagtcaaacccagacattaataatacggtcgttaatccggagtcattggttcccccaccacctccggtggactctgttcctttcaagctcaacaagcagtcggtcctttcggatttcttgaaacagaacagattggctactgagcgtatcaacgagtattctccggcaatcattgagtccaacggtacaggtcagcaaccacacacattgtggattggctgctctgactccagaatcagtgaggcatgcttgggagtaatgccgggtgaagttttcacccatagaaacatttgcaatatcgttaattcgaacgatttctccgtaactggagccattcaatttgccgttgatgtaattaaggtgaagaagatcattgtttgtggtcacaccgactgcggaggagtctgggctgccctttcttccaagagaattggaggagtattggatctttggttgaaccctgtacgtcatgtcagagcgcaaaatcgtaaagagctgagtttaatcaaggaccccaaagaaaagtgtgccacacttgcacgtctgaatctgatcaactcggtccaacagttgaaacgtcatccatcgtgtcttgcagctttaaagaaccaagacgtggagatttacggacttatgtatgacgttggtactgggctgttgagcgaggttgagatcccatgcgacgatgagttcgacgatgtgttccatgttggtgaccacgatgatactgaagccggtggacattaa

SEQ ID NO: 974 - DNA, 1440 bp, Pichia pastoris
atgtctttgcaagaagctgtaaaggagattcagtcctccttcgacgtcagtcaggaggttcttcaacgttctgttgacaaattcattgaacttgccaaaaaaggtcttgcttctaacgaagataagttgggtatgccaatgcttcccgcctacgtgacccaagttccatctggtaaagaaaaaggtacatatctggctgctgatttaggtggaaccaactttagagtctgctccgttcatttgaagggagacaacactttcaacctggtacagcaaaagtccccaattcctgctgatatgatggtaggaactggcgaccaactattcgcatatttggcctccaagataaggaaattcttggaagagcatcacggtgatgctttggaagcggcacatgaaacaaacagtcgtgctaattacctgaaactgggcttcaccttcagtttcccaacagcccagcactccttggattcaggatctttggtacgctggactaaaggtttcaacatccctgacgttgtggaccaagatgtcgtccaattgctgcagaagcacttggatgcagggaaaattccagtccatgttgccgctttggccaatgacaccgtcggtaccttgctttccagagcctactctgccaatgctattgcaggtggtaaacaaggagagaccataatcggcgccattttcggtaccggtaccaatggagcttacttggagaaacttgacaatatcaagaagttacctgaggctgttgtaaaggacctgaaggctaagggtgtgacacacatggtgatcaacacagaatggggttctttcgacaaccgtcttgaggtccttccaaccaccaagtacgatagggatgtggacgcacttactgccaaccctggtatccatctctttgagaaacgtgtttccggtatgttcatgggtgaaattttaagaaatatattggttgattttcacagtcgtggtctagtattcactcagtatccaaactttgaaagtcttccacatcgtctccgaaccccttgggatttggattccgagaatctttctctgtttgaggttgatgattcgaaggacatgaaacccacagaagttaccctgttgcaggcattgagattgcctaccactttggaggaacgtcaagccatccaagctttgactagggcaatttctagacgttctgcctacatctctgctgtcccaattgcagccatcatcatgttgactggcgcattagagggacaccacattgaggtggacattggtgttgatggatctgttgtcgagttttacccaggttaccgtacaatgttgcgtgacgcattagccttaacacagataggcaccaagggtgaacgtcgtacgcacattaacatcgccaaagatggttcaggagtcggtgcagctctttgtgccagtgtatcaatctaa

SEQ ID NO: 975 - DNA, 354 bp, Pichia pastoris
atgtctgaccaaggaagaaaagattttaccgacaaagtttctgaaggacttaaaccagattctcagaagacttacttggagcaaaccaaggagaccctcaccgatgctggtgacaaggctgccaacaaattgaccccagaagagcagaagggattcggccaaagagtcggtgacgctgtcaagaacggtaaggacgaggccgacaaggagacccaacctaccttagttgagcaagttcaaaacaccgctggtgatgcattggaagctggtaaggaggcattggccaacaccagtgagtacatctctggagccttctctggagccaagaatggtgccgactccaccaagaaataa

SEQ ID NO: 976 - DNA, 648 bp, Pichia pastoris
atgtccgaggattacagattagtagtggtgggtcctccgtcggttggtaaatctgctctgacaattcagctgatccgtggagagtttctgactgagtatgacccaacaattgaggattcctataaacatccctgcgagatagacggcgcgccggtaatgctggacatcttggataccgcaggacaggaagactactcatcgatgaaagaattgtatatgaagacgggggaagggtttctgttagtttttgccataaacaaacgatcatctttggaagaattgaagcctttttacgatcaaatagtcagggtgaaagaggggatgcaatcagtcccaatggttctggtgggaaacaagtctgatgttgaagattccaagagagaggtcagtcgagacgaaggagaggctttggcccgtcaattcggttgccagtacatcgagactagtgccaagaccaatactaacgttaaagaggccttctataatgtggtgcgagccaccaaaagtattaaggatacaaaccaaacaggaattgacacaagtgtggatcgttcaaagaaccacgagaaacctactgttcggggcaatgccactgcccctgcgtcttcgtcagactcttcatcatcgggatgttgtatagtgatgtag

SEQ ID NO: 977 - DNA, 981 bp, Pichia pastoris
atgaaaacacagattgattataaattttatcccacaaaggaagttaccatcatcagcgccccttttagcgctggtcaaggtaaaggcggtgttgagaaaggtcctggattactactgaaacatggacttcgggaagatttggaagctttaggctggtcggtttccattaaggaacctctcaagggtaccggtctagatgtacccccatcagagttggaggaggagtttgacagatcgcacggaattgcaaagagaccaacggtggtagcccaagcgacagagagagtctaccgtgcagttaaagaagtttcccatcagaagcgattgcctctgaccataggaggtgatcactcaataggagtatccacgttagcaggttttcttgatgctaatccggatgcttgcgtcttatggatcgatgctcatgctgacatcaatactcctgaaacgtcaccttcgggaaacattcatggcttcccagttgccttagctatggggctcagtagagaagtgtggcccaaacagttttcgtggttggatgaagccaaaaacaagctagctgccgacagaattgcttacattggtctgagagatttggatccctgtgagaagaaacgtgtaagagaactgggcatcgcagcttactctatgtaccatgtcgacaagtacggaattgcgaaagtggttgaaatggcattggctagaatcaaccccacaggaaaatcaccagtgcatatttcttacgatgtggatgctcttgatccattattcactcctgccaccggtacccctgtaagaggagggctgactttccgtgaagggatgtacattgtcgaagctgttgcagagactggaaacctgggagcgttagatatcgtagaatgcaaccctgacttggcatcaactgacgttcacgaaattgataccatcacggctggttgtgccatcgctaagagtgcgtttggagaaaccttagtttaa

SEQ ID NO: 978 - DNA, 969 bp, Pichia pastoris
atgactgacgccgctgccccaaagaagccacagaagaacaccgcagttgatctgctagcaggaggaactgcaggtcttttcgaagccctttgttgtcaccctctggacacgatcaaagtcagaatgcaactgtacagaagaaccagtgccaacgctggcgtcaagcctcctggattcatcaagactggtctgggtattgcagcaaaagaaactccaatggctctttacaaaggtttgggagccgtcgttattggtatcgttccaaagatgggtatcagattctcttcttacgagttttacaagcgtcagcttgcagacaaagaaggaaagaattccacattgaccacatttatttccggtgtaggtgccggtgtcactgaggcttgtctcgttgtgaaccctatggaagttgtgaagatcagactgcaagctcagcatcactccatgtcggacccattggacatccccaagtatcgtaacgctctccacgctggataccttattgttcgtgaagaaggtttcaagaccctttacagaggtgttacattgactgctgctcgtcaagccaccaaccagggtgttaacttcactgtctactcaaagattaaggaacgtttgcaagagtatcaacagctagaagttcttccaagttggcaaacttccctggttggtctgttatctggtgctctgggtccactttccaacgctcctctagataccatcaagactcgtatgcagagagagactggtgtcaccaatgagtctggtgtggcccgtattcttcgtatttccaagagattgatccaagaggaaggtatgcgtgctctgtacaaaggtatcacgccgcgtatcatgcgtgttgctccgggacaagccgtcactttcactgtctacgagttgatgaaggacgtactagttaagttaccaattatcggtaacgaagactcccaggagttggtcattgaatag

SEQ ID NO: 979 - DNA, 456 bp, Pichia pastoris
atgtctgaagactgggactctgttaccgttattggaagaaaagcccgtgtaggaggctccggacctcgtgagaacatcgccagaactaaaggtgccatcaatgaagccagaagaactggtagcgtcatagccgtcgaaaagaaatatggcagcggtaattcaaagtctgatcctgagggccagaagttaaccaagatcgaccgtgaaacagacgttgtacctccaaagaagattgatgccaacgttggtaaggccatctctaaagcgagattggacaagaaattgacccaaaaagaattggccacaaagatcaacgaaaaaccaaatgttgtcaacgactatgaggctggtagagctgtccctaaccagcagttgctggctaagatggagagagttttaggggtcaagttaagaggaaagaacatcggtgatccattatttccaaagaagaactaa

SEQ ID NO: 980 - DNA, 1914 bp, Pichia pastoris
atgctgtcagtccgtcgtcagcttatgagtggccgctcgtggttctcgaccaccagcgtagctcgcaaagtatactcagctcaacaagatgtcaaaggtaccaatgcttctattgccatggcaaaagattatcatatcatcgaccacgaatatgactgtgtagttgttggtgctggtggtgctggtctgagagcagcatttggtttggccaaggagggttttaaaacagcctgtatttccaagcttttccccaccagatctcatacagtcgctgcccaaggtggtatcaacgctgctttaggtaacatgcacaaagatgactggcattggcatatgtacgatacagtcaagggatccgactggttgggtgaccaagatgccatccattacatgacccgtgaggctccagattcgatcattgaattggaacactacggtgtccctttctctcgtactgaggagggaagaatctaccaacgtgcttttggtggacaatccaaagagtacggtaagggtggtcaggcctacagaacttgcgctgtcgcagacagaaccggtcacgctttgttgcacaccttgtatggtcagtctcttcgtcacaacacccacttctttattgagttctttgccatggatctattgatgcatgacggtaagtgtgtgggatgcattgcctacaaccaagaggatggtactattcaccgtttcaaagcacacaaaaccattatcgctactggaggttacggacgtgcctacttctcttgtacatctgctcacacttgtactggtgatggtttcggaatggtttctcgtgcaggtctgccattggaagacttggaattcattcaattccacccatctggtatctatggttctggatgtctgatcaccgaaggtgcccgtggtgagggtggtttcttggtcaattctgagggtgaacgtttcatggaacgttatgcccctactgctaaggatttggcttgtagagatgttgtttcgcgtgccattaccatggaaattaatgagggacgtggtgttggtccattgaaggaccacatgtatttacaattgtctcacttgcctgcctctgtgttacacgaacgtttgccaggtatttctgaaactgctcacatttttgctggtgtcgatgtcactaaggagcctatcccaattctgcctacagttcattacaacatgggtggtgttccaactaaatggagtggtgaagctcttaccctggatgaagatggaaatgataaagttgttgaaggtctactcgcctgtggtgaggctggatgtgcctctgtgcatggtgccaacagattgggtgccaactccttgctggatttggtcgtatttggccgtgctgttgcccatactattagagactgtttgactccaaacactcctcacaaagagctgcctgcagacattggtttcgaatcaattgctaatttggatcgtgtaagaactgctgatggtgatatctctactgctgatctgagattggagatgcaacgtactatgcagaagcatatctctgttttcagaactcaggatataatggacgaaggtgtcaagcaaatcaatgaaattgacaagaagtttgccaacatcaagacaacggacagatctatgatttggaactctgacttagtcgagactttggagcttcagaatcttttgacctgtgccacacagacagctaagtctgcttctgtccgtaaagaatctcgtggtgctcatgccagagacgatttcccagagagagacgatgagaactggatgaaacactccctgtcatggcagcacaagagcggttctcctgttgagcttaattacagaaacgttattactgagactttggatgaggctgagtgtaagccagttcccccaactgtccgtgcctactaa

SEQ ID NO: 981 - DNA, 933 bp, Pichia pastoris
atgcagatttttgttaaaaccctaacaggtaagactatcactcttgaggtggagtcatcagacactattgataatgtcaaatccaagattcaagataaggaaggtattcctcctgaccagcaacgtttaatttttgctggtaagcaactggaagacggtagaactctttctgattacaacatccaaaaggaatccaccctccacttggttctaagattaaggggtggtatgcagatcttcgtcaagaccttgacaggtaagactattacccttgaggtagaatcgtcggataccattgacaacgttaagtctaagattcaagacaaggaaggtattcctcctgaccagcaacgtttgatcttcgctggtaagcaattggaagatggtagaactctttctgactacaacatccaaaaggaatctactctccacttggttttaagactgagaggtggtatgcagatttttgtcaagactttaactggtaagactatcactcttgaagtggagtcatcagacactattgacaacgtaaagtctaagattcaagacaaggaaggtattcctcctgatcagcaacgtctgatctttgctggtaagcaactggaagatggtagaactctttctgactacaacatccagaaggaatccaccctccacttggttctaagattaagaggtggtatgcagattttcgtcaagactctaactggtaagactatcactcttgaggtagagtcatcagatactattgataacgtcaaatctaagattcaagacaaggaaggtattcctcctgaccagcaacgtttgatcttcgctggtaagcaactggaagacggtagaactctttctgattacaatattcaaaaggaatccactcttcacttggtattaagacttagaggtggtgaactttgttcaattgtttag

SEQ ID NO: 982 - DNA, 1866 bp, Pichia pastoris
atgggaaaagactatacaccactagttgctaccatcgatattggtactacctccaccagagctattctttttgactaccacggtcaggaagtggccaagcaccagatcgagtactctacctctgctcaggatgatatcaaaagaaagcgttctcagatcatctcttccgaaggtatttccctgacagtttctgacgacttggaagttgagtccgttgacaataaggctggtccaactttgcaatttcctcagccaggctgggttgaatgtcgtccaagtcacatcttggccaacgccgttcagtgtcttgctgcttgtttagtcaccatggagaacaagaacttggaccgagatgaaaaaaataaatacaagctcatatctatcggtgttgccaacatgagagagaccacggttgtttggtccaagaagacaggaaagcctctttacaacggtattgtgtggaacgataccagaaacaacgatattgttgacgagtacaccgccaagtactctgagaaggagagagaggaaatgcgaaccttgtgtggttgtccaatctccacctacttttctgcaaccaagttcagatggttactgaagcatgttcctgaggtcaaacaggcctatgacaatgctgatggggatctaatgtttggtactattgactcttggttgatttaccacttgactaacgaaaaatcccacgtcactgatgttaccaatgcctccagaaccaacttcatgaacattgaaaccaacaaatatgacgacagacttttgaaattctgggacgtcgatacttccaaagtcatccttccagaaatcagatcttccgcagaagtctacggacacttcaaggtcccacacttggagtctattggatatgttgagtcttaccttactgatgacgcccttgctcttctggaaactattgaaggtgctcctttggctggatgtctgggtgaccaatctgcctctttggttggacagttggctgtcagaaagggtgatgccaaatgtacatatggtaccggtgctttcttgctgtacaacactggtgatcagactttgatttctgagcacggtgctttgaccactgtgggatattggttcccaggtttggatgagtccgaagatggcaaacactcttctaagccacagtatgctttggagggatcgattgctgtcgctggatctgtcgtgcaatggttaagagataaccttcgtttgatttccaaggctcaggacgtcggaccattggcttctcaagttgacaactctggaggtgtggtatttgttccagcattttcaggattgtttgccccttactgggattccaactccagaggaaccattttcggtctgacccaatacacctcagcttctcatattgctagagctgctttggaaggtgtctgtttccaaactagagccattttgaaggccatgatcagcgatgcaggagcttctgctgactttttggaggaatcatccaaggccactggccacaaccctctgtcagttcttgccgtggacggaggtatgtccaaatcagacgagatgatgcagatccaagctgatattttgggtccatgtgtcactgttagacgttccatcaaccctgaatgtactgcactgggagctgccattgctgccggttttggtgtccctaaggaagatagaatttggggttccttgaaggaatgtaccgaggccattcttgagggtaacaagatgtacttggctgcagggaacacttctttggacttcaaggccacattgagcgacgaggtcagaagaaaggaatggagattgtgggaaaatgccattgcaaaggcaaagggctggcttaaggacactgcttaa

SEQ ID NO: 983 - DNA, 1116 bp, Pichia pastoris
atgtcttcatccgaaatcattgaaaacactgctttgctgcagaaatatcagtccttagaccagagaggtaagatcattgccgagtacatctggattgatgccagtggaggaatcagatccaagggtagaaccttgagcaagaagccttcttccattgatgaccttccagaatggaacttcgacggttcttccactggacaggctccaggtcacgactctgacgtctacctgagaccagtctcctactacgccgaccctttcagaagaggtgacaacattgttgttctggccgagtgctggaacaacgatggtactccaaacaagttcaaccacagacatgagtgtgccaagctgatgaaggcccacaaggaccaggaggtttggttcggtctggaacaggagtacaccctgctcgacaagtatgacaatgtctacgcttggccaaagggcggtttcccagctcctcagggtccatactactgtggtgttggtaccggtaaggtctacgctagagacatgattgaagctcattacagagcttgtattcacgccggaattaacatctccggtatcaatgctgaggtcatgccttcccagtgggagttccaggtcggtccttgcaatggtatcgacatgggagaccagctctgggttgcccgttacctgttgcagcgtgttgccgaggagttcggtatcaagatctcattccatcctaagccactgaagggtgactggaatggtgctggttgccataccaatgtttcgacttccgccatgagagttccaggtggtatgaaatacattgaggccgctgtcgagaagctggccaagagacatttggagcacattgctctatatggttctgacaacgaacagagattgactggaagacatgaaactgcttccatgacttctttctcttccggtgtcgccaacagaggtgcttctatcagaattccaagatctgttgccaaggagggatacggttactttgaggaccgtagacctgcttccaacattgatccatacttggtcactggtatcatggttgagaccatctgtggtgccatccctgatgctgacatgaccaaggagtacaagagagaatctgattaa

SEQ ID NO: 984 - DNA, 465 bp, Pichia pastoris
atggtcaaagcagttgcagtcttaagaggcgattctaccgtcggcggtaccgttgtcttcgaacaatcctccgaaagcagccctaccactatcacttacgacatcaaaggtaactccccaaacgctgagagaggtttccacattcaccagttcggtgacaataccaatggttgtacttcagctggtcctcacttcaacccatttggtaagacccacggtgctccaactgacgaagctagacacgtcggtgacttgggtaacgtcaagaccgacgctgaaggtgttgccaagggtgttataaccgataaccaggttaagctgatcggtgagacctcaattctaggtagaactgttgttattcacgacggaactgacgatctaggaaagggtggtcacgccgactctttgaagaccggtaacgctggtggaagaccagcttgtggtgtcatcggtttggcagcttaa

SEQ ID NO: 985 - DNA, 1029 bp, Pichia pastoris
atggttaaagtcacagtttgcggagcagccggaggtattgggcagccattatctctgatgttcaaattgaacccatatgttaccactttggcactttacgatgtcgtaaatgttccaggagtcggtaaggatctatcccacattgacacagacactaaacttgagtcttacttgcccgagaacgacggactggagaaggccttgacgggttctgacttggtcatcatcccagctggtgttccaagaaagcctggtatgaccagagacgatttgtttgccattaacgctggtatcatcagagacttggctaatggaatcgctcagtttgccccatcggctttcgttcttgtcatttctaaccctgtcaactccacggttcctattgtcgcagagattcttaagaagaacaatgttttcaacccacaaaaattattcggagtcactacgttagattgtgttcgtgccaacacctttgtcgccgagctttcaaaggacaaggaggcatctgctttcgacacccgtgttctcggaggtcactcaggagagactattgttcctgttttttcacaatctgctccagaagtttacaaagaattgtcagatgagcagaaagctgcattagtccaccgtgttcaatttggtggtgacgaagttgttaaagccaaaaacggggctggatctgccactctttccatggcttatgctggctacaagttgggtcacgcattgttggctgctattaatgacactccaaatatcattgagtctaccttcgtttatttgaaggattccaagatcaagggagctgctgaggctttcaaatacatcaacgagaagctgaaggattctgattcttcggatgttgacttcttcgctcttcctgttgttctttcttcaaacggtattgaggagatcaaatgggatatccttgaaaaagtggatgctaaagagactgagctgttgaagattgccactggacagttatccaagaacattgctaagggaactgccttcattgctggcaactaa

SEQ ID NO: 986 - DNA, 1878 bp, Pichia pastoris
atgtctaacactaaagaaacaggtttgtttgaaaccggttcaacatcatcagaaaacgaaaagcaatccatttcagacaatgaaatagcagaaagcttagatcagcaaaatatcttgacacagtacagtgaagaagacgttatgtctatggggagaaactatgctatcaaacatggtttggaccccgatctgtttgcaaaaggagctgcgattgctagaaatcccataggttacaacagaatggagttcctttctcaggaagaaaaggagattttatatcaggaagagcaccaaaagtggaaacttcccaagaagctttattatctgatcataatggcttccatgggtgcatgtgtccagggtatggatgagtctgtcatcaatggtgcaaatttgacttatcctgcaggtttgggaattggtagcgacagtgaaagggactcttggctgcaaggtttagtaaactcagcaccgtacatatgctgtggtctcatatcgtgttggatgactgatgcctggaacgctaggctggggcgaaagtggaccatcttttggacatgcttcatctcagctattacctgtttctggcaaggattctgtaatacatggtaccatttgtttatcgcccgtttcatgctagggttcggaattggaccaaagtctgcaactattcctgtttacgcagcagaatgtgtccctcataaaatcaggggagcactggtaatgatgtggcaaatgtggacagcttttgggatcatgctgggctacgtgttctctctggcatttcataaagttcctgaccatggaattggaggaggtggtttagcctggaggttgatgcttggttctgccatgcttccagcaatcgtggtatgtctccaggtttggtcctgtccagaatctccaaggtggctaatgggtaaagaaagacatgccgaagcctacgaatctttaaaagttttaagaaaccatcctgttcaagccgctagagataccttctaccaaaatgttttattgatggaagaaaactcttacacatctatgggtttctttggcaagttgaaggaaatggttgtcgtcagaaggaatagaaatggagccatgggcgctggtattgtcatgtttatgcagcaattctgcggaataaacgtcattgcctactattcttcgtctattttcgttgaatcaggattcactgaaacgtcggcgttattggcctcttggggattcggtatgatcaactggctttttgcgcttccagctgttttcactattgatcttgctggtaggaggacgcttcttctgattacctttccattaatgtcaatgatgctgcttctggcagggttctctttctggatccctgaagaaaatgaaaaagcaagagttggtgttgtttctcttggtatttatctattcgcagccatctactcttctggagaaggtccggttcctttcacatactcagctgagtgtgccccgttatatatccgtgatgttgtgatgtcatttgctactgcaacttgttggttcttcaacagtgtcttagcactcacttggccttctttgaaaaatgctttcaaggtgcaaggtgcatttggtttctatgctgcatggaatatagtaggattctttctggtattgatgttcctaccagagacaaagggtttgacgctagaagaactagatgacgttttcgatgtgcctacatggcagcatgcttcatatcagttgaaaaagatgtggattaacattcagagaaatatcatcaggaaggacgtcgaacctatgcccccgttgtacaaacatcacagaatggctcttactaatgctcaatgggaagaaaaacacgaagtggaacttgttgaaaacgtctag

SEQ ID NO: 987 - DNA, 4512 bp, Pichia pastoris
atgtcttcgacttcttcgtcaattaatgacaaagacaaggagagctccaatattgactctccgaaagatacggtgccatatgagcccactagatttgtaggagatttggaaaatcagaatgaagatgacatctactctgaacagttgtcccggattttgacacagagcgaagctgttcagaaaattcagtctttggctagaacaatgagtcgaatgaccaagaaagagcttgcagcctttgaggtcaaccaggatgattttgatttgaagatcctcctgcattatttaagagctaaaagtgaagagcaaggaattgagtcttgctcagccggtgtggctttcaagaacttaacagctactggaattgatgtgtccgcagcctatggacctactgtggatgaaatgttgcgtaacttttttatgtggcccattagatttgcaaaacgagaacatgtcaagactagacaaattatccgtaactttaccggatctatcgaagctggtgagttgtgcttggtcctaggtagacctggtgctggatgttccactcttctaaaatgctgtaccggaaacacttcagagttgttatctgttgagggagaattctcctacgatggtctcgaccaagccgaaatgatgaaggactacaaaggttacgtcatctataatcccgagctggatacacattttcctcatataacggtgaaacaaacaattgattttgctttgaaaatgaagactccagccaaacgagttgacggtattcctagaaagaaatacatcgacactatgagagacttgtggtgtactgtttttggtttgagacatacttatggtactaaggttggtaatgatttcattagaggtgtttcaggaggtgagcgtaagagagtgtcaattgttgaagcactcgctaccggagcatctgtgtatgcatgggataatgctaccagaggtttggatgcttccacagctttagagtttacgcaagctattagaacctcaactaaccttttgaacgcttctggtatggtagctatctaccaagctggtgaaaatatttatgagctgttcgacaaagtctgtgttttgtacaatggtaagcaggtttatttcggtccagctgaaaaggcaaggaaatactttgaggacatgggatggtacaagccaccaagaatgactactccggaatttttgactgctgttactgatccaagtggtcgttttatcagagaagggttcaaaaacaaggttcctgaaaattcggaagatttcgaacaatattggcttaattccccagagtatcaagaatgtttacggagtcatgatcaatatattcaagaccacaaccctgaagagacgaggcaacgtttggccaccgccaagtctcaaactaggcaaaaagctgtaagaagtaagtccagatttgttgcctcttatcccaaccaaattgcttattgtgttacgagaggttttcaaagaactaaaggtgagatagcgtatacgctggtttatctctcatcatttctgaccaagggattcattgtcggttccatgtattggaacattccaaaagacaccagtggattgttctcaagaagtggtatcttattttactgtttgcttttctgtgctgttacctctctttcggagatctctcacacgtacactaaccgtcctatcattttgaaacagaagagttattctctgtatcaccagtctgccgagtcattacaggaaattatcactgagctacctacaaagcttgtggctgtcatcattcttgcgctgaccacttacttcatgcctgggttgcgattgtctgacggaggatccgctttctggatgtacttactgtttttacttttgattcagcagtgtatgtcattcatgtttaagctgattgccactcttacaagagacgcgggaactgctcatgcttgtggaggtttattggctttaatgatgtgtgtttacacaggatttattattcctttgccttatatgcaccattggatcaaatggttcaactggattaaccctatgagatattgttatgaatctttgttggctacagagcttcacagcagagaaatgaaatgtagtgagtacattcccaatggtccagactacgaaggtattagtatggagaatagtgcatgtacaactacagcttataaccacactactggtcttgtctctggtaatgccttcctgactgctacatataattaccgatacagtcacgtttggagaaactttggtataaacattgcttggactgcaggtttcatcattattaacacaattctatctgagtttgtgaagaatgtcgaaggtggcggtgatatgcttttgtacaaaaggggacacatgcccaaggaaggtattgaagccgttgatggtaaagtcgccagtaagcaagaaatgatggaagcactgaatggacctgatgtcgatttgaagaaagttatcgcagaaagagatgtcttcacttggcaacatctggactatgtcattccttatggtggagcaacaaggcaactacttaatgacgtccagggatacgtcaagccaggtacaatgactgctttgatgggagaatctggtgcaggtaagacaactcttttgaatactctatcgcaaagaattaactttggtaccattacgggagacattttcgtaaatggcagacctctagattcctccttcaaaagaagaactggattcgttcaacaatctgacttgcatttagctgagtattcagtacgagaatctttgagattcgcagtcaatctgagacaatctgaaaaggttccccaagccgaaaagtatgaatatgttgaaaagatcatcaacttgttgggcatgcagaattatgctgaagctatcatcggcaaaatcggacgtggtctgaatgttgagcaacgtaagaagttgtccatcgctgttgaactggtcgccaagccttctttattattgttcttggatgagcctacttctggattggactcccaatctgcatggtccatcatccagttcctgagagccctgtctgactcgggacaggccattctttgtactatccatcagccttcagccactctatttgaggttttcgatcgtctattgctactgaaaaagggaggaagaactgtttactttggtgatattggccccaactcttccactatgctttcatactttgaaagggaatctggtattaagtgtggagtatccgaaaatcctgctgaatacatcctgaattgtatcggagctggtgcaactgctcatgcgtctgctgattggggtgatctgtgggtatcatccccagaacatgctgctgtcactgaagaaatttctagactgaacactgaattacagaagagaccattgcctgagaacatcgaagacttacaatctaagtttgctactagttaccctcaccagattaagatcttgttcttgaggacaatggttcaattctggagatccccagtttacatcagagcaaagtttttagaagctgtcgtttgtgcaatttttgttggtttttcatttgtcaaagttggtcatggtttgcaagaggcacagtttggtctaacatcaattttcatgatgctaattatttctcttgccatgattaaccagatgcatgtttttgcctttgactcccgtgaactatttgaagcaagagagagcgcatcaaataccttccattggtccactcttttattagctcagacttggtgggaaaccatttggtgtatggcatgccaattcttgtgttttgtgtgttactatttcccggccgggttcagcggtactgctcaccatgccggatactttttcttacaatttgttataattttccctatctattactgttcttacggtctttgggtattatatttctctcctgatgttccaagtgctggtatgatcaactcgaatttctttgctgctatgttactgttctgtggagttcttcagccacctcagttcatgccaggattttggacgttcatgtacaaattgtccccatacacttactttgttcagtctttcgttgcaccgctggtccataacagaaagttggtctgcagaacgaacgagtatactttaattacaccacccgagggccaaacatgttcagagtttttagacccgtttattgaatctgatggaggatacttgggaaatccggatgccacagagagttgcgagtactgtccatatacttaccagtctcaagtaatggaacaatttaacataaaatggtcctacagatggagaaactttggattcttcttcgcttacatcatttttaactacgttgctctattgagttgctattacctgatgagggtcaaagtctggaatatgaaatctatcttgaatttcaagaaatggttcaatgggccaagaaaggagagacatgaccctgaaaccaacatcttcgcagctcagcctgctgatgctaaattggccgttctgaaaaagaaggagtga

SEQ ID NO: 988 - DNA, 396 bp, Pichia pastoris
atgatgacattacttcaattgctagttctggtatacataatatataaagtgtttccgatactcagaagatttttcagtactggaacaatggtgtccgaacaggttttaagcaagactaaagcattgatcaaagatcacaaggtatttgttgcatccaagagttattgcccctactgctcccagactaagaagttgttggagtctctaaacgccaatgcttttgtagtggaactagatactgaaccagatgggtctgatattcaagccgctcttttagagctaaccggccagagaactgtacctaacgtgttcatcaacggagagcatgttggtggaaacagcgatttgcaagcactgaacagtgaaggaaagttaaaaactcttctcaagaactaa

SEQ ID NO: 989 - DNA, 963 bp, Pichia pastoris
atgcccgccattgttgatccttcgtttcaaacgaaccatgtttgcctgcatgtgagtgatattcaaaagtctatcaagttctacaccgaatattttgggttgtctttgttggcccaggaatcggtgccccaactcaagaagcaaatatacttactaggttacaattcgccttcaaatgccaattatggaaagcactgggctgacaggagcggtgtgcttgagctatgtgttgatcaaactcttccaaaggactacaagtttgcgaatggaaattcacctgaagctcaaggtttcggacacatttgtgtagctgtggataatcttgagaccgcttgcgagcagttggagaagaatggcgttgctttcaagaaaagacctagcgaaggccgtcaaaaggatattgcgttcgctttggatcctgacaactactggattgaactaattgaacatcaaattggcaaaaaagacggtgtctctaataagagcaattgggttctgaaccatggtatgtacagaatccgggatcctaaggtatcactaaaattttacaaagaagttttaggtatgaaactttattctactagagaatttccggaagctaagttcaccctctattttctgggctacgagcatgacgatcaatacgtggaaaaccaggaaaaacctcgtccacaagctgagagggaatctattattgagttgacccataactggggtacagaaagtgactccagcttcaaaggttaccataccaacaccactgagccttttggatatggccatacaggcattaaaacaaaggatgtcgccaaacttgccaaagagcttgagaatgatgtagaatgggtctttaaattgggagagattagcgacaagcttgccttcttcaaggaccctgatgggtatcttctagaaattctccagaatgatagttttcttaaagaccaaggaaacaaattataa

SEQ ID NO: 990 - DNA, 198 bp, Pichia pastoris
atgcaattcaagtctatcgttttaactctagctgccgttaccgttgctcaagctaacaacctatcaaacgagagtaatggtactaatcactccaaccatacttcttccgtgccaactggagctgccgttcgtgcctctggtatgggagctggcttgttgggagctggtgttgtagccggtgttgctctattgatttaa

SEQ ID NO: 991 - DNA, 1056 bp, Pichia pastoris
atggtgacaaaagagtctataataagtgatctggaaaaggaaaatgttggcccagaattcggcgagtttctaaattcactccaaaccgatctgaactccgagaaacctttaattgagcaagtcaagtctcaactggaaactcatttcaacttgggacccgaaacccaggagttctccaggaaaaacgacaatgctcccgttgaccaactgctgacaaactactataacaactatgaggtcaacgtgctggaatttgtgcttcaaatggggttctgtaaagatctgagtatccccctgaatgtatggttcgtactggatatgatctcgcaattgagtacctccaaacaggacttgcccttggactattatttagtcttgaacaatagtcacaccggaaagtatagtgactttgtacgttaccttatctatgaggctgtaggggcagagattcattgttttgaacaaggcgatatgccccaacaataccgttcctctcgctgggaggacaaagttaagggcccagctctcgccaataggggacctattagaggtaatgttggggctggtgatagaaaaatcacgtttcatctgttgtgcaagaagactgccaggatgattttggttggggatgaccgtgaaacagactttgaaatgtctgacaggtcttttgtaactctattgctagattattatcagcgagtcggtaccaccaaaaaaatcgacctgttattgttgaccaataactatgacaccaacatgaacaacaaattgcaacagctcaaaattctagagtctctgaacatgctcaagtctaactgctatgtattagactatcagatcactgcggaccaagttactgcaaactttaactcatacgttgagggtattccagcatttagaagacatgagattgccaattttctgaagaagcggagaacaccaaagaatgccgacgagctcattttcaagtacgttggtcgttggaatatctgttatcagaaaaagtttcatcaaggcaacatctccatccatcaaatttctggttatcttgattga

SEQ ID NO: 992 - DNA, 1347 bp, Pichia pastoris
atgtctgctccactaagtccactaattcagcaaatggtatccttgatggaggcccgaaccaacggcgcagacccaggaactggtattctgccccgtctaaactctgccgctgatatgctgggaggagttgatagaatccccagggagctaatcaattacgtgcaggggaaacagcttgctctttttggtgattatccaagcggcaaggatactgcaccttcagccattttcatggtggtgtttttctttatcttcctggcacacttgaccctttttgggatcaattggagcaggggccacaagttcttgctttcttttgggtttgctttttatgcactactgagagtcgttgggttcgctcttagagtcgcatggagtagggaaatcacccgagtgcaggtaggtattgcatccgaagtgttcttaatcattccaacgattctgctggccagtttcaatttgattctagctcaaagactgttcacttggagacatccgtatgtggggtcttcgaagcttttttggggagctttattgacagtttactctgtggttatctccgttgttgtgatgaccatcgttgctgccgttgttccatacgtctatctgctatcccatagaaattatgagatgagcaagaacgtggtcaaggtgtccagtatcttggtcattttgtattctcttttggcaactggtttgatattagtgtcttatcttttcaaaccaaccaagagagataaaggatgcctgatttaccagccaacttggttggagtctttcagtccaacttatttcccattaaaggacagtgccaaacaacatgaacagatctttatcggtcgtaacggcgcagctgcctttgcgtcgactagaatcattgcctcttcatatcactacaacgctcagtctgacgtacttccagagccaactgcagagaatctgaagctggaaccaggtaatgaggacaatcttgtaaggtactcttccagtacaggacaactgaagcacaactattccattattattgtcacacttaccaccacgttcatcctcattggagccgtcttccgtgccatcacttgtttcctcgataggacagttgagacccaaagctggatatttaaacctgttgtcatgtacatgctttggggattccttgagacagtcatcaacgttatctatttgcttggaagaatcgacttacgtttctatagaccagacaggttccccaaggacatgttggtcggtaatgaggctgtcgagccttccccagtgatctcaaataaggaaagaacatcttccatctcagaaagaactagtaatcctgagattgttcgtactgtgtaa

SEQ ID NO: 993 - DNA, 378 bp, Pichia pastoris
atgtctgaagaagaagaactcaaggttttcacattcgaagaagtcgaacaacacaaggccaatgatgactgttggatagtttacaatggtaaggtctacgacgttacctcgtacatagaggaacatcctggtggagaggaagtcatcttggagtgtggtggagctgatgccactgaacctttcgatgacattgggcattctgaagatgctcacgagatactggcaaaattgttgttgggacgggttgaaggtgcacctgttaaggcatccgtgtcttctgccagcactgctgaggactcaggctcttcaaacaacttgctgctggcggtgcttgttgctatattggctggtgttgcatactatttcttcaaccagtag

SEQ ID NO: 994 - DNA, 879 bp, Pichia pastoris
atgcctactcagataatggccccttgggccccagctctggccggcagcatcgcccgtgagttggagaaacagccattcgtttcgtttcagtttgcaacggtggatgaacacggatctcctcatgtcagaactgtcattcaccgtggattcctatttgacgacagaagcaccaatgtgcttactttcaccacagatcgtcgtatgaccaagtacaaagagctgttcaacgatagtgcttttgagttatgtttttatagtcatgttgctaggaaacaattccgccttagaggagttgcccgatgtattgacgacacaaccacgcctaagctgaagcttccaccagatatttttgaccagcttaagaactctgcagaggccaccgtcacccttatagctgacaatgacaacgagattgaaacagacaaaattgactacctaaagttccccaggtccacagcaagtgatgagctggaatatccattgttatctcctgaagtaatagccaaactagaggcatcttcaggagaagaaggattggatccagaagagatctctgcccaacttactccaccaacggaagaggaatggaaaaatgaacgacgcagaatatggaatactctctcccgttctatcaagtcgactttccgtaagcctacgccgggctcgagattgactgaagagaaaataaaactactggattccatcggaagaggtgtagatggtgcatctgacgaggatggactagagaatttggtagtggtggttttgtttgtggataaggttgactttgtagatattggttacaacggccaaggcagaagactgatataccgaagacttgctggagatcactggcgcgagacggcggtatgtccttaa

SEQ ID NO: 995 - DNA, 1380 bp, Pichia pastoris
atgggtaaggaaaagttgcacgttaacgtcgttgttattggacacgtcgatgctggtaaatctaccaccaccggtcacttgatctacaagtgtggtggtattgacaagcgtaccatcgagaagtttgaaaaggaggctgaagagctcggtaagggatctttcaagtacgcctgggttttggacaagcttaaggctgagagagagagaggtatcaccatcgacatcgctttgtggaagttcgagactccaaagtaccacgttaccgtcattgacgctccaggtcacagagatttcattaagaacatgattaccggtacttcccaagccgactgtgccattttggtcattgcttccggtattggtgagttcgaggctggtatctccaaggatggtcaaaccagagagcacgctcttttggctttcaccctgggtgtcaagcaattgattgttgccatcaacaagatggactccgtcaaatggtctcaaaagagatacgaggagattgtcaaggaaacttccaacttcatcaagaaggttggttacaaccctaagactgtcccattcgtcccaatttccggatggaacggtgacaacatgattgagccatcttccaactgtgactggtacaagggatgggagaaggagaccaaggctggtggtgctaccaagggtaagaccttgttggaggctattgactccattgacccaccatccagaccaactgacaagcctctgagattgcctttgcaggatgtctacaagattggtggtatcggaactgtgccagtcggtagagttgagaccggtgtcatcaaggctggtatggtcgtcactttcgccccagctggtgtcactaccgaagtcaagtcggtcgagatgcaccacgagcaattggagcaaggtgtcccaggtgacaacgttggattcaacgtcaagaacgtttccgtcaaggaaatcagaagaggtaacgtctgtggtgactccaagaacgacccaccaaaggccgctgaatctttcaacgcccaggtcattatcttgaaccacccaggtcaaatctctgctggttacgctccagttttggactgtcacaccgctcacattgcttgtaagttcgacgagttgattgagaagattgacagaagaaccggtaagaagactgaggagaaccctaagttcatcaagtccggtgacgccgctatcgtcaagttggtcccatctaagccaatgtgtgttgaggccttcactgactacccacctttaggaagattcgctgtcagagacatgagacaaactgttgctgtcggtgttatcaagtccgttgtcaagactgacaaggctggtaaggtcaccaaggctgctcaaaaggccgctaagaaatag

SEQ ID NO: 996 - DNA, 1674 bp, Pichia pastoris
atggctcctactgctatagatttacaacaagtgtctgatgaagactaccaaaccaaaataaaaaaggctacctcgccttcatattctgtcattgcctctctgggtttaaaccctgaggcagtgatccgccacaacgctgccgttcctactctttacgaggacggtttgttggagaaaggaactgccatcagttctactggtgctttgatggcctactccggtaagaagaccggaagatctccaaaggacaagagaattgtcgacgaggagacctccaccgaacacatctggtggggacctgttaacaagaaagttgacgagctgacctggaagatttccaaggccagagccatcgactatctgagaacaagagaaaagatctacgtcattgacgctttcgctggttgggatcctcgttacagaatcaaggttcgtgttgtttgtgccagagcttaccacgctctgttcatgaagaacatgttgattcgccctactgaggaagagttgcagaactttggtgaaccggacttcaccatctggaatgcaggccagttcccagccaacgtccacaccaaaggtatgacctcttccacatccgtcgagatcaacttcaaatccatggagatggtcattttgggtactgagtacgccggtgagatgaagaagggtattttcactgttatgttctacctgatgccaattcgtcacaaggtcttgactttgcactccagtgccaaccagggtgtccagaacaaggacgtcactttgttcttcggtctttctggtactggtaagaccactctgtctgctgaccctaacagaaagctgatcggtgatgatgagcactgttggtcagacaacggtgttttcaacatcgagggtggttgttacgccaagtgtctggacctgagtggtgagaaggagcctgaaattttcaatgctatcaagttcggttccgttttggagaacgttggctacgacccagttaccaagattgttgattactatgacaagtctattactgagaacaccagatgtgcttacccaattgactacattccatctgctcttatcccatgcactgtggactcccatcctaagaacattgtgttgttaacttgtgatgctagaggtgttttgcctccaatttccaagctaaccaacgctcaagtcatgtaccacttcatttccggttacacctctaagatggccggtactgaagacggtatcacagagccagaggctaccttctctgcttgtttcggtcaaccattcttggttctgcaccctatgaagtatgctcaacaactgtcagacaagatgattcagcatgaatctaccgcttggttgttgaacactggatggactggatcttctgccaccaagggtggtagccgttgcccactgaagtacaccagaagaattctggacagcatccacagtggtgaattagccaaggctgagtacaagaactacccaaccttcggtctacaaattccaaaggaagttccaggtgttcctaccgagattttggatccttctaacaactgggttgacggtaaagacaacttcaacaccgaggttagaaacctggcccaacttttcatggagaactttgagaagtacgcaagtgagtgcactactgaggttatccaggccggccctcagttgtaa

SEQ ID NO: 997 - DNA, 1071 bp, Pichia pastoris
atgacgttcttcaggcgttctttgcaatcgtccaaaagcaactcaacaaccagcatatcctcgttgtacgccactccaaacagcgtcgacactctgacgcccgagtttgtgccggaggtgatcgatgacgagttgaacagtctgcatttcaaattcacaaactttgcactcgacgatgaggtcgtcgatatcgcttcagaaactgccaccgaggcctccggcgtggcaaccatgaaaacttcgccatccttgcgcactggctccgacgtcaaatggtgtgtgctacttgtcggacttcctgctagtggcaaatccaccgttgttcgtcagctcaagcagtatctaacaaccggaaccaagcaaaaatgcagagttgagatatacaacgccgggaatgtgcgccggtcgcagcacccgaagagagcagatagtggatttttcgagttcggctctacttcaacaaacggaagattgcgagaaacgttcgcaagagacactctggctatgctattgggagacttgcaaaatgaccacgttgacataggcatcttggacgcaactaactcgacgcgtgaaagaagaaagtctttgctggagcaaattcatgctgtatcaccatctaccaatatccaaacattgatcctggaagttcagtgcactaataagtctatgcgtcgtttcaacatcgagaggaaagcccagaatgcagactatattcatattcctcgagacgttgccgttaaagatttcttcaaccgtgtccaagtttacgagtcacactttgaacctgtctctgctcaggagttagcctctttaaaattaccatatttatcaatgatcaacgttggtgaagaaatcatttacaacttcgaaaacgcaaagcaaactgacttttcattagaagatcctatattccttttgatatgttcattcgttacggaataccggacccaatacgcccccacatacctgatgacgttaaaatcattctatgccagtgagtatgccccattagtgagcactcccttagcttttgctgcaacctccgctgagacagcttccacacagtga

SEQ ID NO: 998 - DNA, 3966 bp, Pichia pastoris
atgtcttcggaaaaggagagtccctctgagtcaaagtcctctcaagttctgaatatcccaaagaatgagagagtccgtttgacagtgagaaatcttcaagtaacactcaaagcccaaaaaaagaaacaatctcttctaaagaggctgagaaagtctgaaaaagacaacaccattgatgaggaagcgcttcctcaaaagaagatcatttccaatgtgaaccttgacctgaaggaaggtgaactgatagcgatcctaggtgcctcgggaagtgggaagacaactttgctaaataccttatcacaaaaagtcacaaagaataaaagttttctgttcagtggtatgatcaaatacaatgagaatactgacattgaaagaatcagacatgcttacatgtcccaaaccgatttctttctaccaaatttgaccgtttacgaaaccttggattacgctgccaagctgaaattaccccgtaactatactaatgcagaaagaacagagctagtagaaagtatcttggttgaactagggctggacagaattcgtgagtcgatcatctgtaattcgtttggatcaatttatatttctggaggtgaacagaggctagtaagcatggccctgcagttgttgaacaaacctggattattgtttttggatgagcctactacgggactggatgccaccagctctttcagaattatcacagcccttcataaattgtccagaaactttggtatgaccattgtactcactattcatcaaccacgttatgagatccttgaacagattgacaggatctgcattctgacgagaggttgcagagtcatctataatggctccccattaaactctattgaatacttcaagaatattggacacgatattccaagaaatgtcaaccttactgactatcttctggacatttcttgtaaggactcatcttcccccgagaacgagtctcaaagtttggccagaattgaatatctggcttccaaatgggagaaacatgaaccgtcaactttggatgaaggtgtagaagttatggactcttttacacattcttccaactcggaaaaagcactcacagaaatcgaaaagagaatcactcttatcaaacagattagaattttgactaaaaggacgttcatactttcacttagagatagaggttccatgctcacgtttaatttttctattttaataatgggagttgcttgcggttggttgttcttcaagcctcccgcagacttgggaggaataagatccattgtttctcaagtttatgttgtactggaacttattggtttcgtgccaatgattttagaaataacgaggctttgggatttcgatggtcaagcttttctcagggaaaatagtgaaggttatgtgtctgtgaccggatggataataagtcgaagattagcaaagttccccattgaggatttccctacttccattttctttgctctaataacatattttatgtttgggcttcgaacagacaatggagcttcgaacttcctgatctactttgtcgttaccttatttgtcaatctatgtgctgttgcgttggctactctatgttttgctgttggatctgactttgcttcttcaagtttgatgtgtaatgtgatctaccaattgcaaaattcctcgtgtggttacttcatcaacgccaaaactatgccggtgtatgtcagatggctgaaatattgtgcacatttctggtacgcatttggatgtttaatgtcgaaccagtttactgattggatgggagattgtccaaccgaaggggatgcctgtgtggagtactcgggaatataccaactggaaatctttggatttggagaaaattggattactctaccaatttgtgtcttattagcgttctttttaggaactttggttctctctggatttattctaagatacaagaacactgaagtttcgatgtccaaagagatcacttccaacatgttttccaaaaggagcaaggataggaagaaacatgaggagaaggatgttccagctgatgataattttcatgccatttcaactgcaagacgagagatttccttgaatctttacgttagcaatgtctccttatacgtctatccttccagattgaacctaggtgtgtttacaattctctggaagtacattaataaccggtatttgaagtttggtgttgaaaaagtggaaaacactcccaagagcgcaaaatccaagcgattattgaccaatgtcaatgctaaatttattcctggaaggttgaacgctatcatgggtccgtctggatcaggaaaatccactctgcttaactatattgcaggacgactatctaaggagagcaacttttacaccacaggtgaggtcattgttaatgatattgccatgagaagcatggataaacctttaaaaaaattgtgctcctatgttctgcaaaatgattccgcattgattcctacgttgacagtgagagaaaccgttcactttcaagctcaattgagattgccaaaggagaaacaaatcgatggaggcatagatagaatcatcgatgaccttttgttgaaatttgggttgttggactgccaaaatattcctattggtgatgattacactaagggcattagtggaggtgagagaaaaagagtttccattgtagtgcagttactggatgatagtaaaattttacttctggatgagccgacatccggacttgattcctttacaagctcttccattttgtcaactctagaagaatatgctatagagcagaataagcttataatcatgactattcatcaaccaaagaaggagatttttgaaaagtttggaaatgtcgtgttattggctagaggaggttacgtcgtttacaacgacagcgccgtaaagatcgccgattacttttctagcctgggttacgatgtccctccaatgactaacgttgctgactttgtgcttgatatggtttctaacaatatcgacgagagacctgaagaaagtgatgctagactgagacgtttagtggaaacctggcaagagaaccatgagtctgatttccaaagggttcagactaacaccactatcaaaatcagcaatgaagatcagttcgacgcccaattttctcatttataccaaaaccgggctgcagataacgtttcgttgcctgtactgatcaagcgattaacattgaccactttcagagatcaaggagtcgtagctgctcgattataccaggtgatggcgttatgtgtcatccatgctctattctatgctcctctgaaaaatggtgctgatggtatttccaaccgattgggtttgatctttcaagttctgaacctttattatgccggcttcattaataacatcagcttgtttccacaggtcaagcagctgctgtacaacgaatgggaggatcagatctactctttggaatctttctttgcttcatactttttgctggaaattccattcgaactattttgttcatttctctacgcagtgttcctggtgatggttattgggcttccaaggaccgctggaatgctctttaccaccttctacgcctcgtttgttgctatgaactgcggtgagtcttttggtattctattcaatacactgttcaacaaattggacgtggccatcaacgtgctttccaactgtttgattataggaatcttcatggcaggagtgatgtcgatccatatgccagaattctttaaggcttggaactggatcaaccctttaaagtacatagtgggagtggttgccaaactagggtttgcaggtcagactttcaaatgtgagattggagatgaatgtgccttatctactggggacgatgtattgagatactaccggttggaccataatttttctgctttcatgggagcactagctgtttgcttcgtggtgtatcggttcgtcagttacgtcttccttgccattcggctaaaaatgagttag

SEQ ID NO: 999 - DNA, 1212 bp, Pichia pastoris
atggctgggaatctcaaggatattctatccttgtcgaggaagacagcaaggaatctgaagcaggctctggatgagcttgcggagcaggtgatcaaccaccaacggagacgaccagctctggtccgagttcctatcaacaacaaccttaggcgcaagagccagcagtcctttttgaatcgcaggtcattccatctttggaccagcaagtacaacccatacttttggaggggaggcagaagcaacgttctggaccagcttaaccgtgaagctttaaggtacagatcgtcttttgcgaaacccggattttatccaagtgggctgtatcagtcaactttccctcaaagaggtagtaggatgttttccacctgcgcctactcatgtcagcaggaggcagtcaaaaacttgacttccgctgttcgtgctttgttacaaagtggtgctaatttcggcagtcaaatgaaacaaatgaaacactgttcgcaaaagaagaagcacttctctaaattttctaagaggcttacttcttccactgccgctgggtctggcaagaatgctgaacaagctccttctggtttggccgaaggatccgctgttgtttttagccttgaacgtcaaagtcacaatactgagttggaaggaatcttggatcaagaaacttcttccattctcgaggaagaaatggttcaacatgagcgtcacctggctattattagagaagaaatccagagaattagtgagaatctaggatcattaccattaatcatgtctggtcacaagattgaggtatttttccccaattgtgacactgttaaatgtgagcaactgatgagagatttggctattacgaaaggggttgtgaggcgtcatgattctactgctgagcattcaagctccaggtcatttgttccagaagattgcttgtattcctcagggtcaagttcaccgaatcctttatcctcaacttcttcgaaatcatttgatagagtctcattggactacatttcctctcggtctacatctgatcaaaccactggttctgagtacacatctctgtctcaacaatatcacctggttagcaattacaaccctgtactatcctcagccccgggttcttcgagggtcttggagctgaatactcccgagtccactatggaaggcagtacagatctggagtatttaacgcgagacgatgtgttgctgttaaatgtctaa

SEQ ID NO: 1000 - DNA, 336 bp, Pichia pastoris
atgcttattccaaaggaagaccgtaaaaagatccaccagcacttattccaagagggagttgttgttgcaaagaaagattttgaaattcaacatgaggagattggtactaagaacctttacgttatcaaagccttgcaatctttgacttcaaaaggatatgtgaagacacaattttcatggcaatactactactactccttgactgatgatggacttgagtatcttcgtgaatatctcaacatcccagagggtattgtgccaaaaacattgttacaggagcccgtacccgagcgtctccccagacgcggtggtgaaagaagatttactcgtaactaa

SEQ ID NO: 1001 - DNA, 717 bp, Pichia pastoris
atgaaattgaacattgccttcccagccaatgggacacagaaatgtattgagatagatgatgagcacaagcttcaagctttttacgagaaacgtatggggcaagaagtggaaggggattcagtttctgacgagttcaaaggctacgtcttcaagatcactggtggtaacgataaacaaggtttccctatgaagcaaggagtcatgcatccaaccagagtcagattgctattgtccaagggtcactcctgctacagaccaagaagagttggagaacgcaaaagaaaatcggtacgaggctgcattgttgctgctgatttatctgttttatctttggtagtagtcagacaaggagagcaacagattgagggtcttacagatgctcaggttccgaaaaaacttgggcccaagagagctaacaatattagaaagttttttggtttgacgaaggaagatgatgtgaggcaatttgtcatcaggcgtgaggttgtgaaaggtgacaagacctacacaaaggcacctaagattcaaagattgatcactccagagcgtattcagagaaaacagcacttgagagagctgaaatacgagaatgcacgaagacaaaaggatgctgccgctgaatatgccaagctgctagctgaaaaaatccaccaacggaatgcggagaaggctgagatcaagaaaagaagagcttcctctttgagagctgaagcttaa

SEQ ID NO: 1002 - DNA, 2493 bp, Pichia pastoris
atggtcaacgaaaagaaacctttattggatgcttcaggcacagaaaatggccccgaagatcttactgccactgcaattcttcgtaaaaagaagaaagacaatgcgctgatagttgacgatgccatcagcgatgacaactctgtaattggaatgtctagcaataccatggaacttttgcagttgttccgtggcgatacagtcttagtgaaaggtaagaagcgtaaggatactgtgctaattgttttagcagatgacgatattgaagatggcgcttgccgtgtgaatcgagttgttagaaataacttacgtgttagattgggggacattgtaaccgttcacccttgccctgacatcaagtatgcctctagaatttctgttttgccgattgctgatactattgagggtcttactggttcactgtttgatgtataccttaagccatattttgttgaagcttacagacccgtgcgaaaaggtgacactttcacagttcgtggaggtatgcgccaggttgaattcaaggttatggatgtagagcctgatcaatatgcaattgttgctcaggatactgtcattcactccgaaggtgagcctttgaacagagaagacgaggagaataacattaatgaagtaggttatgatgacattggtggctgccgcaagcaaatggctcaaattcgtgaattagtggagttacctctgcgtcaccctcaattattcaaggcaattggaataaagccccctaagggaattctgatgtacgggcctcctggtacgggtaagacgttaatggcgcgtgcagtggccaatgagacaggtgcctttttctttcttatcaatgggcctgaaatcatgtcaaagatggctggagagtcagagtctaacttgcgttctgcctttgaagaggctgagaagaacgcgccgtcaatcatttttattgacgagattgattccattgcccccaagagagacaaaaccaatggggaggtagagcgtagggttgtgtcgcaactattaacactgatggatggtatgaaggcgcgttccaatattgtggtgattgctgctaccaatagaccaaattcaattgatcctgcgctaagacgatttggtagatttgaccgagaagtcgacattggtatacccgatgtcactggtcgattagaatgtcttagaattcatacaaaaaacatgaagcttgcggaagatattgatcttgaatctatcgcacaagagacacacggctatgttggtgcagatattgcatcgctttgctcagaagctgctatgcaacagattcgagaaaagatggatttgattgatcttgatgaggatacaattgacgcagaagtgttggactcattaggtgttaccatggaaaacttcagatttgctttaggcaactctaacccttcagcactgcgtgagacagttgttgaaagcgttaacgtaacctgggacgacattggaggtttagatagtataaagaatgagctgaaggaaactgtggagtatcccgttcttcatcctgatcagtttgccaagtttggtctgtctccttccaagggtgtattattcttcggccctcccggtacggggaaaacattgttggctaaagctgtagcaactgaagtttctgcaaatttcatctctgttaaggggccagaacttttgagcatgtactttggtgagtctgagtcgaacattcgtgacatctttgataaagctcgcgccgcagcacctactgttgtatttcttgacgaattagattctatagccaaagccagaggtaattcattaggagacgcaggcggagcatctgatcgagttgttaatcaattactgactgagatggatggtatgaacgcaaagaagaacgtttttattattggggccactaatagacctgaccagatcgatcctgccattttaagacctggtcgattggatcagcttatttatgtgccattaccagatgaaccagctaggctgtccattcttcaggcgcagttgcgaaagtcaccaattgaaccaggattggatcttcaggagattgctaagatcactaaagggttttcaggagcagatctctcctatattgctcagagagcagccaaattcgcaattaaagactccattgacgcccaaaagcgactactcgaagagaaagctactcacaaactagaatctagcgaagatatcgagatgaccgaggctaagcaggacggcgaagaggtagacgatcccgtacctttcatatcacatattcacttccaagaagctatgaaaacggctaagagatcggtcagcgatgctgaacttagaaggtatgaagcatatgcgcaacagcttcagtcatcacgtggccaatttacagacttcaagttcaacgacttaggagaatctgctggcaatggcggttctattggtgctgaatccagtgggcccgctttcggtaacgttgagcccgatgatgacgatttgtatagttga

SEQ ID NO: 1003 - DNA, 486 bp, Pichia pastoris
atgttcaaaacttacagttctgctctgcctcagagtctttcaaggggacttgttggtgcgacaagacaaactcccactccgtttatccagtttgtcagagggaagagaacgaaaaaatatgatttatcaccagcagcccagaaactcattacccaattgtctgttctttcagcttctagaaaacaaccaaaaatgttgaagctttgtcctgaagattttgtcaagcataacacggtgcaagaagcctacaaactgattactcgtaaaaggaagaaggccgaaaacgaaaaactaaagcaacagtatgaatccatgaaacttgcatgtgaggacctttccaaagttagtcccgagctgttcgaagctgccaataagagagaagtttccaagagattcagtttggaattgcgagttcctacgaactacccacccaacgtaccatggtactacgactacaccccagaatctcccgaagacaagaagtaa

SEQ ID NO: 1004 - DNA, 300 bp, Pichia pastoris
atgttgttcatttattgttcactcgtaagtccttcaattggatttacgtcatcctacccgagcgcattcctgttggctgaaaaaaaccacgcagcaccttccagccctctaccgatcccgattcggctagacgatgctggatggcggaaaacgaccgatggctggaaggatgtagtgaaccatccagtattggttggtgcaggtaactctttcttcactgagccgggagacacgggcaaccaactccgcaagggtgataccgctcaggacttggtctctccaaggcctcctccccactaa

SEQ ID NO: 1005 - DNA, 723 bp, Pichia pastoris
atgtcaaaacaaccagataatacgtatgtaccaaagttcatcaaggatacgccgtggtatgctggggaacatcaacgtgaagaaacgaccgagaaaaacatcaaagaccggttcatcaagcataagggagtgggaaaggaatgcaaaaattgcggaatgcctcataatgagaaggactgttttgaaaaaccgaaaaggcggaaggtcaataaacagtcggatacgataatggtacgagataccgatgattgggacagtaaacgtgataaatggtttggatacaatgctgatgaagaataccaagaacagctagctaaatggaatgcaaatgaagccaagaagcaaagagcgaaattactgaaagacctgagtgcacaagtagatctactatacagttggatgatccaaggtggggaagtaaatttaacagaagctgagcaagttgagttggaaaaggagattttagatgaatattgtggagaaggggtcaagagatgtttgcaagacacaggtgatttggctaatgaagggtttgtaggtgaatccaaagtaaacgagtttgaaggtagtaaggtgtttgcatggggaagggagaaagggagtgataccactgtggctatgaaaggtcctggcggaagccatggttcagatgggcaaactaaaaaccaagataaatccgccattgaagagaaacgcagaaaattactagaaaagtacaaataa

SEQ ID NO: 1006 - DNA, 2226 bp, Pichia pastoris
atgtggagacgaataaggagctcttcactagttccagctttcatagactccttatctaagaagttcacgtacgaaaagtccaaccagcgatactcattgaatggtcctggtcactacaatctggagtttaggaaggattccttcaatgatgttcttatcagtttgataatgggatacgaaactacaaagttggattgcgccgtaaaaattccaggcagaaaacttttgttaaagctgctgcacccaagctctttggaagggtgcttcaatttgcttttattggcactaagtcggtcctcagatgagaatagaactacaaggcgcatcccattaggtaaattgttggatagagcttgcaacacaggaatgttaaacaatcatgaggaattaaaaaaagattctgataaattactggcctgttactggtttaaaaattccttttatcctattcatgtctctgagtacacgaggaatatgattggtaagtcgatctacttactgaaaaactatggtatcaatacttcaacgttacacaattggctagtttcggttgctagtgaaagcataacgcaagcatgtttcgctttagaaggagagacattaccagagtttttggttacagacattttattaagaacacccagatccaattatgagtttgacttattgattgatttatacttggaccctaattaccaaattaatgactctgataaaaagagtatgttagttttgaacaatctaattcaaaattgccactatagaacatcatcaaggttgctagaaattatcaacaaagtattagatcaaacttcaaacgaaccatttttgaatcatctagtttggtccatttctaaaatttcctcaaaagttccaagggacgataacttatattttaatattcttgaatgccagcagaaaataataaggcatttgaactccaaggttagtgttgaaatcctattaggattatcgaacactctctatcacattaaccatagtaaaggaaaggaaattctacaagcagcaagatcacttataaatagaaaagacgccagtcctcttgtttctcaaacaccatcaattgctcactacttagaaagatcgtcgctcaatgtagcacgtaccaaagccatgctattgggtactgaaatcttgtacatagacaaacccattttgttcaaagcacatcaaaagctgatagccagcacggaaccaacggtgctgcaccaattgggattctcattatgggggctttggctatctaagaaagcccagtttagactccactctggtaccgacatcaaactggtgaaatctttaatcccctacttgagcacgcaattcgatcaagaggccttaagtgtatttcttacagggatctccgatattgagatgaataaagtgatcattaccaattactcaaaagccggtcatactcttggaaatttagtgttgaatacttatttgaaaaacctttatcgtcagtgtctttttgaagagtgcattaaagaaaaggcaccacattatttaaaatatccagaaattgtgaatcaaagaattgttgagcataaacagttcaagtccaccttagattacactcggttcgtatacgccaatgttgagcagcgaccattatcattagtgggcactatgatgtttggtgaagcacgtatagctccagagaaagtgtggaaagtatattttaatagacagtttgaaactgtcaacgagaaaatattgacttcgttgaccatctctgtgataacgttctatgaaagatccgggaagcatttgatgtggaatgggatgacagccgttcaacaatgtatcatggaagttgaaaaatggaccgccaagtcaacgaaaggtgataatcccaatttggtgaatccaacgaatcaattgtggctcagttacacccagatgcttggaatgtttggatacacagatctactcatggatttattggaaaaatgggtaaatctgaggcatattcctaatgaaagaacactattgaatgtgtttgggtatctcccggatgaaatttcagacaatttgttacggcatgtaacggcgaatatcaccaacaaagttccagcaattagaactgatgatttatcacgcaaaccagaattgcaatttgataatgattctctagtggtgaaatggccctggcccaccaaatctcaagttgaaaacttcaaaaggaaactactcatttga

SEQ ID NO: 1007 - DNA, 1623 bp, Pichia pastoris
atgtttgcaaatttggtttataggcggacatccctggttgtaactccttccataagaatcagatcttacatttcaattacaacagaaactgaatttgcaaataggaaagcaagggtacaggagaatcatgagttttactatccattggtgaacgatctacgatacggaaacggggtccagacgcttagaatacccgaatttcggaaaaagtttgaatattatcagtttccaaattctagcaagaaaattgacactttgttctcagtttgtggaaagatttccagcatccgaagagctggtaaaggaatgatctttatggatattatccaagatttcaccaagttacagttggtaattcatcataagatgctgaatttgaataaggaggagttttccaacattcacagtgaattcagaattggagatcatgtctcggtaattggattcccaggaaagacagatgtaggtgaactgtcgttaaaggcaaaccagagagtcaaactagcagctccagcactacacccgttacccccaaaacttaccgatacagctaagattaatagtctcagagtggtagactaccttgtaaatagaaaatcacaggagataatcctggcaagatccaaaattatatcaaccattagaaagtttttagaagacagacaattcgtggaggtttccaccccaattatagccaattctggtactggagctaatgctactccttttgtaaccagcagtgaacatattaagaatgatatgttgcaaccggaacctcttcaattaagagttgcaccggagctgtggctaaaaaaactgattatatctgggtttgataaagtatttgagattggaaaagtgtttagaaacgaagggattgacagtacacataatcctgagttttcgacttgtgaattttatcaaacttttacttcattagaggagttaatgaacttgactacagaccttttccgttcaatatccactgaattgctgaatgctgaatcattgaagctcactcatattcaagcaaaagctcttcagcatgaagagttcgaaacgttagagttcattcctgccatcgaagaagcgactggaaagaaactacccgagaatctgggggttgcagaacttgaaaactatttcaaaagtataaatttggagtttccaaaagtgaagtcaccagctcaatttttagatactctatcgtctgaatatttggaacctcaatgtgccaaaccaacgtttatttaccaccagccagcaattctttcacctctagccaaatccaccagtattaaatatggtgatcgtcaatacgatatttccagacgatttgaacttttcattaatggaaatgagtatgtcaatgcttacgaagaggaaaatgatcctttctcccagaatgaaaagttcaaacttcaaactcgttccaaggagaagcatcaagatgaagaggcattagttcctgactacaagtacgtcaccatgatggagtggggtatgccaccaacaggaggatggggaataggtatagaccgattgacaatgctactgactgacagtgccagagtagagaacgttttgacatttggaaaattgaatgatgtcttgaagcattag

SEQ ID NO: 1008 - DNA, 687 bp, Pichia pastoris
atggcacagtccaaccaacatgtgtcgatttacaatccaaaggtgatagtttactctataggtcttacaactgctatcctggcgtcaatgagcatttataggagccattttgtccgcttttccacctcactggacgttccaaagaccttgttccgaactaaacacctacatggcaaggttacctctgtcggtgacggagataactttcatttctatcacctgccaggtgggatctttgcaggctggggatggataagggagaccccagagatcaacaagttcagaaaactgaaaaataaaaccattcacgttcgattgtgtggagtcgatgcaccagagcgatcccattttggtaagccctcccagccctacagtgaagaggctttgcaatggcttaggcaatttattctgggaaagaaagtcaaagtaaaaccacttagcgttgaccaatacaacagaattgtgggaagagtgtttatttttcgttggaacggatggaacgatgtcagtgaagagatgctacgaaatggggttgcgatagtgtatgaaaataaatcatctgcagaatttgatggaatgaaagaaaggtatctaaaagtggagaacaaagctaagaagaaaaagaaaggactgtggggaatcgaaaggggcctaaccccaggagaatacaagaggctatacaaatag

SEQ ID NO: 1009 - DNA, 990 bp, Pichia pastoris
atgtctgatttatccacatcacagttgtttgtaagaccattacctggtgatgttaggccagaagagctgcaagatctcttcggaaagtttggccccataaaggaagtcaaaatcatgcgtggttacgcgtttgtggaatatgaagaaggagctgatgcttccgctgctttggaaaacctaaacaacactccatttggggatcaagatctccagatcgagttcgccaaggagaagccaagttatgctaagcgtggtgaaaacagggtaaaagtaacgaatattccagaatccatcgcatggcaagacctgaaagattttattgcaaaagagattgatatccttcctacctttgcccgtctgaacagacacgacgagccacctactgcgaccttagaattcaacaacagggaagagttggaagctgctgttgaaaagattaatggtattgttttggaggaacacactttaactgctgaagaagacacttccccttttattccaatgcctggtagaggtggtttccgtggaggtcctagaggtggtcgtggtggcttcagaggcggacgtggtggcttcagagacgactacagaggtggattcagagatgactacagggacgaattcagaggtggtcgtggaggcttcagagatgatttccgtggtggattccgtggtggtcgtggcggttaccctccaagggatgatttccgcggtggattccgtggtggtcgtggtggtttcagagacgaaccaagaggcggctttagaggtggtcgtggtggctatcctgcaagagaaagtttcagggatgagttccgtcctcctcctagagatgactacagagatgaatatagagctcctagagatgattatggtccacctcctccaagggatgattacagagatggttacagagatgattatagaagagatgctcctcctcctccaagagattacccaccaagagacagatctccatccagagcttga

SEQ ID NO: 1010 - DNA, 660 bp, Pichia pastoris
atgattaatatagcaaagtgcagacttcctaagtacagtcgaatagccacactctcctcaatgctttcaccccattcctatctgaaagcaaccgtagcgacgcgttgctactcctctctaaacaatgagattgacttggaaaggcaaaagcgaaaaactaacattgggacaatgatacagtatctagagacaaaagttcccaacttattgcatgaaacaattgatcgagaattgcttgacgagaagatcaaactaaggattctaccaaactcctttcattttttcccaaccattcaagggccagtaaaatatatatccttatgggaaacagtaacctcattcctcacaaggttcatcattgagaagaagaatacaaaactggtaattacaaacatttgtgtcaacgagaaaaatcctgacggcgataagtcctcagattcaagttcggattccaaaaatgactccattgatgcttatggcctttacggatccacttccaagatcgtcataagattcaagtctgacaataaagacaagttcattacaggtatattcgttttcgagttgaatagagacaacgatagaattttggttcacaccatagacaatgtggaaatagtaaacgataagaaagtagacatgttactggcgatggactga

SEQ ID NO: 1011 - DNA, 894 bp, Pichia pastoris
atgggtcaattaatgcgggccgaaaagcttatcaaaaaaatgcttaatcgtacggaattacaaggtgttatactagattgggatgaaaccattacagatagagattcgttggatctgatattccgaatagcgttcagagttaaacccgaattcccgtacaaattgaaccatttcgttgggatctacaaggataggtttagggactatgtcgaccatgaggtgaaagggtctgaatgtgaggcgagagacaccgtcaagaaggagatccagtaccaacggggaatgaaacctgtggaactctccagtgtttatgaggcaaggaggttagggttgttcaaagggataagcagggagaaatttgtaaattatgaacagacattgggtcagaattcagatcagcttttacctttgaagccaggggtggttgaatttctgaaaatgctatacaggaaggtcccaattacgatactaagcgtcaattggacttcactcatgatgaagcaacggttgaaagagtttggttttgaagaagacaaagagtggttgcattttctagttaacgagttggttttcgacgaacatggtatgtccaccgggaataacactggagaagaggaggatattcgaacgggatacgataaaatgatgaaaactcgtcaaattgtcaaagattgcccaaatgggaaacatttcgtatactttggagatagttccactgatgttttagccatgatagagactggcaaagctgtagcgcttggcactggggcaagagatcaattgaaaaggatgggtttcaaggttgaaggtccagaggaagaaaaaaacatgcacgatctgtccgaagaagcagcgtacatttttgccaaagatttcactatagtggcgtcataa

SEQ ID NO: 1012 - DNA, 1209 bp, Pichia pastoris
atgaatgcatctagtatccaaagaaaaaacccataccaaagcaaacaaacagcctatttaaattggtgtcacaatgaggggaagaaattcattccaggtccgcccaaattgcgtgagatcgttacgccaaagagactcttcctgttcctgaaaactcatattgaacccgccaaagtacgagaaatccccctctcgtttgcatccttcgatgcatatgtgagcgctatcgtagacttatatcataggcaacgtactgagttcaaagttagacctgtattagacgatccaaacgagcctgatgcggattgggtgacaccaagagacgacagagttaaagagtatttgaagcagatcaagaaagagagacagaacgtacatcgcgtgactcaatcgcatgagatggcccaagaaagaacggttaccccaacatcaactaactcttcaaatatgctgatacccactacgttcacaggaaacagcgacccatccctgctgtcaaatgaattcggtggaattgagccccctacagggtattcgattgtgtctagccaaggattgaggggttcctccagcagtacatcttcttctggaaccgatatttcatatctcaaccagcaattagctaaaacaaatgataaggttaacagattatccatggatgttcaacagttaaaagaattgctgactaataccaacaacaaggtgacacagatcgtggaaatgctcactttagtgtctaaagcaggacaagttggagctcaccgaacaccttcgcaatctgagccagtctctaattcaatggaacctccacaacctgcaaacggtcaatatggcattgctccagtatctgttccgttctccaaccccactggagctcctcctgctccaacaacaactgtaatacctgaaattattctcaataacaaagcaaaaacaatctctgccatctggcgggagtacaagattggatacaaaggacaaccttctttagcagaaatggaacggaaatatggtactagctggcgtcgtggacgtatcaggaaaactgtgcagagaaggagaaggatagcacaggctatagagacctatatcaaccaggggcttacagaagaagaagcgctttttcggttggagaagtaccgacaagaaaggtcaaagagccttttttggctctattccaatgttccagaaaattcttatgacttgtag

SEQ ID NO: 1013 - DNA, 1089 bp, Pichia pastoris
atgatagacatatcctcaaagttaagacgggatagcctgtctgacacagatcttaaccaagacccaaaccaaaaaaagattaatagtgagccaaccaagttgcttctctcagagatcgcactagaccctattatacagtcgttgccccacgttaaagatctgaatgtcattcaaccagcggaggctttagctctcttgaataaacttgccaccgagttgctctcattgtatgctgaatatgagcagcatgggtctatggatttagctccattgctgtacgacagctcaaagtatgccaagccaggttctgacagtcaagaagagtctccaacgcctgtctccggttttctggagcggaaactttccatgattgatcacagtgatatagacaagatgtctgattcgagtcaagctgatcagttcaaaattcgtactatttccagcgattcgtttgacataccgttaaagtcagaatcgaagctgggttataattttgacgatttagaagagggtagttcgacaaatgaaagttccctgagcaccttgaataacacctacgtcgacaattcggtcgaacaaactttccagaacgaggtaagctttgaaacttgtacaaacattgtgaaaatattcaacctgaaagctataccgtccctttctatcaccgcctatttggaaagaattcactcgctgttatctccatcgactgcggtctatcttacggcttgtttatacttatacaattgtgcttttcatttcaaaacagtcagactcaagcagaggtctcacttcaggccgagtcaacacactaatattacaatgttgccgataaatgaactcaatatattccgtttagtatctgctattatacggattgcttctaagttgattgaagacaagaactttaagcaaacatattactgcaaagtcgcagggcttcagagtatgaaggagttacaaaatttggaactatcattcctctttttatttaatttcaatctgtttgtgagccgggaaatacttctttctcatttggatcagttatacgtttttttcaaccgtcgaacccagcttaacgtttctgtatag

SEQ ID NO: 1014 - DNA, 2181 bp, Pichia pastoris
atgtcggcgtccaggttatccaaatcttttcaggattcccttcagatcgaacagaaggaagactcggacacaacggctcaacttctctcatcattgagtcccaaacagcttcaatccaaagggctcgccatcctatcacttgagatcaccaatacgaggcctggatacggtggtaaaaccatcattgaattagccaagcattccagtaccgtgggatcgaaaaggaaatcaaagcaaaaagaccaaccagatgagtctttggaattcggagattttaaagtcggtgatatggtagtactggacagctaccaggcttctgactacaaccccaagaaattaaaaaactcgtctaagaagtctgatcaggaagcacacgaagatctggagcaagttgacctggaagccgttgtggtcaagatgagaaagaatgagatacatattgctttgagctcagattccaactcgcagtctgtttcaagtataaagattgacgaaaagctggctcatctgaacaataatagcatgaaatgctggctcgtgaaattgtcaaacactataacttacaaaagaatggctcaagggctgacgaggctgagtgaagtaaattcagactctgctcccgagttgattcgtcttcttttaggcgaagaacagttcaaagcacccacatcttcagatttggtttctaagatggaaaatctgacctttgaaaatgacggactcaacgattcccagcgtgaggccatcaactttgccctacaatctcccataaccatcattcacggacctccaggaaccggaaaaactagtacattggttgagttggtcagacaattggtaaaggctagaggtagctccagcaaacgaatcttgatctgcggcccttcaaacatatctgttgacacaatcttggaaagattggacgatttatacccaaacaaggcggattcaatgtctaaattgatccgtgttggtcacccagcacgattgttaagttccattctcaaccacagtttagagctactcatccaaggctcagagtcgaatgagattctcaaagatatcattaaggagattcaagatctgatgaaaaagtctaaaaagatgaagagttacagagaaagaaaagactgctatttggatgtcaagaaccttagaaaagacctcagagaaagggcaagaaaaatcacgtcagagctgatcagaagtagtcaagtggtggtttcaactttgcatggagcgtcctctagagagctttttgacgctgcactcaattctcaagagggattgtttgatactttgattattgatgaagtgtcgcaatctttggagcctcaatgttggattccacttatggcccacacaggtatcaataagttgattattgcaggagacaataaacaattatcacccactataaagactcttccagaggggaagcagaagagtaaggtggtggacatacttagcaccaccctttttgaccggttagtgtccattcacggacaatcctttgtcaaatttttaaacatacagtatcgaatgaatgaaaaaattatgagattcccaagcaatgaactctatggggctaaattgattgctcacaagtcagtagctaataaaacctgtcttgatctgccttacagagtcgaagaaactgatgataccatagaaccattgatatggtatgatactcaaggtgacgagtttcctgaacaggagaccgaggaagatcaaggatcgaagtataatgagaatgaggcactgctggtggccaaacatgtcagaattctattgaaagcaggagttttgcaaactgatattgggataatttctccgtacaatgcgcaggtttctttcctcaaagagttactgataaacggcgatgaccaactaacagagttggaaatatcaacggtagatggatttcaaggtcgtgagaaagaaattatcatcttgactttggttcgttcaaatagagaaaaagaagttggcttcttgaaggatttcagaaggctgaacgtgtctatgaccagagctaagaagcaactttgcgtgattggagacatggagacattaggtgagaatgaaactacaaagtttctatctaagtgggtcaaatggtgtgaagaggaggctgatttgaggtatatcgatgtgaatgatctatatgagaattag

SEQ ID NO: 1015 - DNA, 1107 bp, Pichia pastoris
atgaagtttaacacattaatcacattagttgccctgccatcggttatctacgctgctgccgttcctcagcctacagctaaggcccagtatccaaagcgtcagatggacatttccaaccagaatgtcttgtccgataaaatctggacgacgactaacaacgagaagatcactcccaccgttatcgatggagtaaccctgtccgcctccccagtcaccaactctgcaaccccatgggtttcattggatagctctggtattccttacggtgttaccccaagtgtgaaagatggtactaccatttctgcttctcctactccatccgcttctagtttcccaactccagatgcagtgcccccagtgttgcgttgtatgaacgatagagttcctcctgacaacaccatggcttacccattctgtgtccaaaacggtaccgaattcttaattggtgagacctactggattacctgggaccctagctactggggaggggacgatatcaccagagtcaagttgcaaattagagcatatcctttgaaggatgacgaagatccagtgtttgtaactgactggatctcaaatgccgacggttattacatcttcgaatccaaggcctcaaatatgagaaccggcagtgccggatggggattcctgaacatcactcctcaaaccacctctgagacaaaagccacctacgttggtaccaaatctggaccattggttagaatattgacatccaagagcgaagctgactttgcaatttctagagtgccatctgacaacggactgtcaaaaagtaagggttcttctaacaatgccaaggtgattgctcctgctgttgccattccagttgtcgtcctgatctttgtcggatttggtgtctactggtacattaacaagcagaagaagcaaggtctcaacattggtggtggaggaggatacttcggttccaaggccgagagaactggtgctggtgccgcaggaactgctggtgtcaaccacgatctcgcttctaccgcttctgctgaattggagtctcacataacccacgatgctcgtaccatcgacaccgtaaccaccggtaacacagcagccaaccctttcaaatga

SEQ ID NO: 1016 - DNA, 966 bp, Pichia pastoris
atgggtcgcaacaaactcgacgaaccttccataacatgccccacagagaagataatagtgcgaagaattcccccagagctccctgaggaggagtttaaagagctattcactccctgtgtcgaaggagaatggaatgggtattatagatacgttaaaggccatgtagccaaggatatgtacgacgaaacgacatttgcaagggcttacattcgtttcgatagcttggagcaatccgagaatttcatgaaaaccttcagggaaaaggtcaatcatgatcctgagcattttcgggtagagagggcaatttaccttcatattggaccgtttgaagaggaaccagtaaaggaagaaacagaaccattagagtctaatgaatatttccagaggttcttagagtggtataacaccggctgtgagggcgaagctccacatttgttagttccaactatgtctgacaaaaagacagggaaagggaaaaagtccaagaaaaaggataaggccaaatcaaaacccaaagtggacaaggccaaagcccaagaacaacaagaggtagacaaacctgactctaaagagaaagttcaggggaaggataaatcaaagtcgaaagcaaagaaagaaaagaaaaagaagaagcaggcagtgaaccaagataagtcgccagaagaagttaaaacaacttcttcagctccttcggaagataccccggtcaagtcgaaacccaaaaaacgaaccaaaaaaccaaagtccaaagctaaagatcctgagtcctcatctgaacctaatgaaaactccaacgaaacttccaagcccagcgacctggaaaatcctagttctgcatcagctaaaaccaaatccaagcctaaaataacgattaaacagagaccaagtcccaaaccggagccagactctaattctcctcaaaaccatgctgcagagaattctagtaccgtgttcatagaagcttga

SEQ ID NO: 1017 - DNA, 1887 bp, Pichia pastoris
atgaagatcctatgcgttgcagagaaaccttccatagcaaagagtgtagcttatactctcggtggaggtaaagtcactgtgcggaatagcagtgtcaaatatgttaagaattacgactttacatttgaatttcctggagtgggaagatgttcggttacgatgacttcagtgctgggtcatttgacggaaatgacaatagataacaacagatatggatggggtaaatgtttaccaataaatctatttgacagcacaatcatagttaaagaaaatggcaacgattcaaagaaattggtgcaaaatatagccaacgaagcacgattaagtaatcaattgatgatatggacagattgtgatagagaaggtgaacacattggatgggaaatcctcaacgccgcttcgaaaacaaattcttctttgacattggaaaatgtctggagagcccagttttcccaccttgagagaagccatatcatctctgcagccaaaaaccccaagcaattggatcgatatgctatcgacgctgtgtgcactagaatggaattggatctacgggctggtttcagttttaccagatttctcacagatctttttaagactaattttcaagagatcaaggaggagcgtcgtcttatctcttacggtggctgtcagtttcccactcttggatttgtcgttgatcgatatatgagagtgaaggaatttgttccggaggagttttggtatatttcaattgaagtgaaaaagggtaacagaaagcttcctatgtcatggtcacgtccccacttgtttgacagattagctgccatgctcttgtatgaaaactctttggacatagccaaagatgaagctgaaattgtgcatattatcagcaagcctacatctaatttcaaacctctgcctttaactacagttcagttacaaaaagactgttccaagtttttcaaattgtctgctaaagagactcttgatgccgctgaaaagctatacaaccaaggattcataagttatccaaggactgagaccgatagatttgatcctaaaactgatttaaaaaacttgttaagcaaacaagcggaatctcctcaatggggtggctatgttcaagaattgttagacgggaagatgcgttcccccagagctggcaaacatgatgataaagcacatcccccaattcatcctatttgttatactgatttcactaagctcaagtccagaaatgaacagctcgtataccaatatgtgacaaaaagattcatagcatgctgttctgatgatgccaagggtgttaaaagtatagtcaccgccaaatggggactggaaacgtttacggcttccgggctaatggttctggagaaaaattatttggatatctacgattactttaaatggaccagtaccaaagagttaccagaattcactcttggtgaaaaagtcaaactactaaaagcagatttggttacaggaaaaacatcaccaccttcgtatatgtcagaatctgaacttattgcattaatggacataaacgggatagggacagacgcaacaattgcagaacacattgaaaaaattttggccagggaatacgcttctaagcaaagtttgggcgagtcaagatctaagaaggcttatattcttcctacagaattaggctgcgctttagttgaaggattcaaccaaataggatttgacaatctctctttatctaaaccatttctcaggaagcagctggaagagtctttggcgaagatcacagcaaaacaagaaactaagaacaatgtcttggacagatttattgaactttatcgtcaggcgttcatgctaagtaaccagaagcaggcaattttggttaaaagttacagacacattcagaggagaaatgcttga

SEQ ID NO: 1018 - DNA, 546 bp, Pichia pastoris
atgttaggaaataatctctccagttggtatcacgatgttgaagaacttgaaacagttgaggctccgcttgtagtatgtgtctgcgaaacttccaaggcattaaaactgtatcaaagagtgcaacatactgcatgctttataatcatagatcccttcttggatctaaacaagttgaatagcgatgaagttgaggttctgttgcgatttcaagaagaaaatgatatactctggaacaaaatagacggctgcttttcatcgacttcagtggtgaacagaagtttgaacgaggtactttttccactagtgagacttatggagatgaacaactggcacttaaacattgtcggacaagatcaaacggggttgctggctgctttcatctgtactatggtctactttaaaatgaatgtttcacaaaacatgaaactcactggagtggataaaaatgatattgacattccgatggcaacttcattttggatgcaatggaactcatacaagaattactctcctaaatcaatgaagagaagaatcgactgtgtatga

SEQ ID NO: 1019 - DNA, 270 bp, Pichia pastoris
atggctgataaactaaaagagcaacaggtttttgaccaactaaaatccaagcatctggggttgggcaacgctgacacgaccagaaaggaatggttggacaacatagcaaaggacacctacgccactttagtgcagcacaacccaatgttggagtatctaagtataggattgaacaagccccaggctattacaaagttcgagatgattgaaaaaatggcagggtgtagagttgatgaggatggcataaaaagtaaaattgaccgaaactaa

SEQ ID NO: 1020 - DNA, 723 bp, Pichia pastoris
atggccgacgtcagcgtttatatcacgtcgggattgacctcctcagagagaagaatatctcctcaatgggacattgcacatttgaaacaacgattagagtttgttacggggatacccccagcagatcaaaagatctgggtttacaaaacgcctacatccaatgcaaggtacgagctgaaaggtggcgaagaaacgacacttaatgaattccaaattgcaccctatactagaatccatgtcgagaacatcaaccagcattcggatatctcagaattggaatctgcaacggcccaggatgatgacgagccagtcttcaatttgagtgaagatcagtacaattccatggataatacagtgcgcaggtggaaagaggaaaacaaactggggcgattcgatcccgattatcagtccaagaagtctagaattttggaagaacatagaaaattatcagaatcgtttgagatcggagcgagatgtcgcacaatgaatatgatggaaagacggggttacatcagatatgttggaattataccagagattgacaatgagagctactgggtgggcgtagagtttgatgagcctgtgggaaaaaacgatgggtccatcaagggaaaggcatatttcagatgcaaggccaaccatggcagtttcgtgaaaccaacgttggtgcaagttggagactatggtattaaggaagatgaacacagtgatgatgaggtataa

SEQ ID NO: 1021 - DNA, 1194 bp, Pichia pastoris
atgtcattactgaaccagccaattgtcctggataatggatctggtataataaaattgggctttgctggacaagagcagcccctggtatatgctccaaatatcttggggcggcacaagtacagcaaggtcatgactgtaagcgagatagatggcatttctgatccaatcttagtagggaagaccgcacagaagcacagagggatactaaagctctcgtatcccatgaagaatgggcatatctctgattggaatgatattgaactgatatggaaccagcttcttacaaaggacctcaaggttaatgatgtcagtgatcaccctatattggtgactgagatacctttcaataatgttaaaaatagagaaaaattgaccagtatgatcttcgaatctttcaattttccggctctcaatctatcaataccggcggtactttctttatattcgtcaggaagaactactggggtagtgcttgatagtggagatgaggctacatacgtggtgcccatttacgaagggttctccttaaactcttctatgaaaagaatagacataggaggaagggatataacaaaacatgtgcagttcctattaagaaaaaatggtgttcagctactgtcgagtagtgaatttgaaattgtcagacagatcaaagaaagatattgcagggtttcgcttgatcctgcaaaagatgagagagaatggtcggtgtatatatctactcacctcttgtacggaagtgacacccttggtgatgcagatagtggaaaattaaccagattcaagttgccagatgggaaaatggtagagattggagctgagatgttcagaggtcccgagatcatgtttaatcctgtacttataggatcggaggccaatggggttgatagtctactcacaaattccatcaactccatcgatattgagcttcgaccccaactttatcaatcaattttactagctggaggctccacgatgtttcaggggtttggaaaccgtcttcttagtgaactcaaatccagttgccctaaagggactaaattaaagattttttctccgccagagaggaaatacagtgcatgggtagggggttcaattttggctgggctgagtacattccaaaaattatgcgttactagagagcagtacatggaaaatccagagtcagttgttgaaaaattcttcttaggttga

SEQ ID NO: 1022 - DNA, 417 bp, Pichia pastoris
atggctgatagattgacccaacttcaggtttgtttggatcagctcatagaacagttttctgccactattcattatgttgatcagcatcacgattcagtcaacttacctgagaatgatcctaagatagtagatcccgatttgacaccagacagtgaatttgattttaaaaacaccataaatgaactttcatcggacattttattgaaaacaagacaaattctggccataatagactctcttcctggagtgggagtttccaagaaagagcagatgtcaaagatccagaccctgtcagaggaattatgggcaatggaaaccctgaaacaggaaaaaatcgttcaaaaagacgatttgttagattgggtcaacaacctgataatgaatttgagtgagagcatagcaaactctagagattag

SEQ ID NO: 1023 - DNA, 591 bp, Pichia pastoris
atggcttatcggctaccaccaatagacactgtcagaaatctccctaccacacagaaaatccagctcttagctcatttgtttgaaccatgtgacactcttactcaatatattattcccaaactctttcccataaatactgaggccaacgaacagccatttaaaaactataaagaactgatagataaatgccattctctattcagtagcttactaagtgagataaacagctcagctgatcctgagcttacccatattgcaaacggtattattggagcacacccaaggctcggcccccagaaaggaggatctgcgctttcgtctcattcaaattcggaacaaaagtccttagcaggatcaagtgctgaagagacagcaaggcttgtcgaactcaacgaatcatatgaaaaaactttcccaggcttaagatacgtcgtctttgttaacggtaggtctaggccagctataatgaacgacatggtggaaaggatattcaggaacgatataaaagcagaaagacaagctgcaattgatgctatgtgtgatatagcatgggatagggcaaagaaactacaaagcccaagctctcaataa

SEQ ID NO: 1024 - DNA, 693 bp, Pichia pastoris
atggaacaactagtcaaggaatacactgaagcgacaactattgatcctagagagatcgagaactctctcaagttctacgaaacgcagtttgagaaacttggctttcaatacttggaacaggagagtaaggaaaaatttctaaggatcattataaatgaaaaccccaaattaatagacaacaacaacattgttcaactagaaaaggaaaactcccaggtcaaagataatatagacgaagttgacagtaagataaaaactcaggtcaaagaattggatcagttgggtgcttctagtattgagttagccaataaagtgtcacagaaatccgatcagatatctcaaacaaaaaaggaattacaacagatggagcaggaattgcaggaactagcagagtatgaaggtgtagagaaagaactgggcaagtatattgaaggtgacatatttagtggactggaaatgttcagagatcagttgaactccaagcaggcggagaatgatgaacgtaacgaggatatcaaacgattgcaaagattactgaaggaaaatcaagacttttatgaggacaagaagaagcaaatacaacaaattaactctgaaattaaatctattgatcaagatattgaattagacaccacattaggtccgtggtattttgaactaggaagtcttttcatcaagttaagtcatgaatga

SEQ ID NO: 1025 - DNA, 804 bp, Pichia pastoris
atgcccgtattcgaagcaccagcggtgtatgttcagaatgcatacaacacgctgaataactacatgattcaccacatgtacctctctaacctcatagatttccatcattccaatggtaatgtaataccactggaaagtcccactgttggatttcatgtccgtagagataacaatgataagcaaagaatagttaatgtttttgatcacaatggtcaattgagatacaccttcgagcgtttatcctcgttgaacccagtatggtccatgtttgattccagccgaagggagatagccactgtacgagttggcttttttagcagatcgatcgatttccacaacaagcctggggtgctgcaacacagagagatcaagacagtatccaattggcgtcagggtaccttggattacattaatcttcaaggtaacatgcttgcatggaccaaaaactccaagttcttggaaatcattaccaatgttgacgataacgatgaagaaatcagagtgagagccgcccgagtacgtctgatgcgtcaatggaaatttgactttgagttggtggttgatgaatctagagtcgacgcagagatagccctgggcactgggtttgtctctatgatgacaaggtggggcgtcggtgatctcactgatacgcggggtcctactccaatcgttgcaccagcgctacatactcagtcaaagtcggagcctaagtcagagacgacgaacgggaacacaaacaactcgtcttctcccaattccatcacactagttgtaaacgatgatgagatcattattgagcattag

SEQ ID NO: 1026 - DNA, 693 bp, Pichia pastoris
atgacaaaggctaagcattcaaatattttggcaccagatatcttgaactcctcaatcttcactagccatgctgtttgtgaccaaacagttgaattgctgaaagctattactagtcgtttcaaaactcttttcgacctacttaaggttcaactaaagaagtgtccatctattgacaatgaaaaggccctaaagaagcttctgaatttatacgatagtggagctttggtaaatctacttgtaatggggtttaatatcttcttgaatcaacatatttatggaaaactggtcctctcgtctatcttattcctctcctttttcatactgagttgtctaggcttaatcgtgttaaacaagctgaaagtagaatcggcttccagctttacaaaacagtgccgccctatacaggaaccgctaacctctcatattcaagagtccattgatgtttctatcgacttgaaaaactttattccgaaagtttctcctaattctggagagatcccaaacaatttagagttgcaatcaattgaaattgaaaaaactacccaattttcagatgaagaaaaaaaacaaacggtagaaagagttcgattagtttaccgaagattgaatcaaagtgtattttggtctctctaccgattgatactaaaaggcaaccaagaaacgttattgaggaagtttaatcttgaaaaatga

SEQ ID NO: 1027 - DNA, 1287 bp, Pichia pastoris
atggctgatgatcctctaacctactacgagctacaatcttgcgttggtaagggaaatttcggggatgtctataaatctattaataaagtcacgcatgaggtgtttgcaatcaaaatcattaatatggaagaaacagaagaagacattaacattctcattcaagaaatcaatctcctttctcagttgaggtctccttactttaccaattatgtgaagacttttgtaaggggaactacgatgtggatagtgatggagtattgtggtggtggatcttgtagtgaacttctgaaatatctaggaaagttaaatgaacaatgtgtggctctcatcattagagatactttgaaaggactagagtatttgcattcacagagaaaaatccatagggatgtcaaagctgcaaacatcttattgacggaaaaaggcgaagtgaaacttgccgactttggagttagtagtcagattggcgtcactcaagtcaagagggacacatttgtgggcaccccattttggatggctccggaaatcatcacttgcaagaacgggtacaatgaaaaagtagatatctggtcattagggataactactatagagttagctacaggatccccaccgctatcggagaataatccaatgaaggtcttgtttgacattcctgatcttccagcacctttacttaaaggagacaattattcttgcaacatcaaagcttttgtcgcagcctgcttacaaaaaaatccaaagttacgtcccagttgcaatattttatcgcaaactccgtttgtgaccaaaattcgaagaagtacttcgttggttcctttgatactgaagaaacaggagaagatgagagaaaaaaacatcacacccaggtcaagaattccattggaaaaactggtcaacatgacaaatggggccagggaagattattggcagctatccactattcgaaccagaggcagaaatttgtcaagatctccgatgtctccaatcacaggtgaactcagtgcgagtaatgccatgactgaagaaactaccccagagttagatatgccttccaaaaagctacaattggggtattcggattatttaaagtacgtaatcctttatgccttggataaagttaggagcagagccagtactgaagtcacgaagcttgatgtggatactttgaaggctacaatggaagagtttgagaaaagacagcctggtattagttgcgcactagtggaagagatatttttcagagttagggatcaacgactttttactgttcatgaaagtaactga

SEQ ID NO: 1028 - DNA, 1782 bp, Pichia pastoris
atgtttgtgatccagctggcattcctatgtctaggcgtcagcctaaccactgcacaacctagttcacctttcaaggcaaataagtttccttttaaaaaggttcactactcatcaaaccctagcgatcgccttattaagcgagacaactataagaagcttgacttgagacatcttggcgtcttgtatactgcggaaattgaaattggttcaggcaaaactgaaatcgaagttattgttgacaccggatctgcagatttgtgggtaattgactcaaatgcagccgtatgcgattgtcctatcttgagatacaagtttcaggaaaaccatcttttgaagagaaacgaggccttgaattttgatgtcgatctgaataagcccatttgtgatcaatttggatccttcaatccacagtcatcaagaacttttcaaagcaacgacacagcatttagtatcagatatctggacaactcttttgccaatggatcgtgggtgagggatacggtttatgttggtgattttgaaattgaccagcaaagttttgcattggttgatatcacaaataactacatgggaattctgggccttggtccttctagtcagcagacaaccaatagtgatcctacagataacagtttcacttatcttggtattctggattctttgcgggcccaaggattcattaattcagcctcgtactcggtttatctggccccagatggtaagactgatgatactgatcacgatgatggtgagatcctgtttggtgctatcgacgaggctaaaattaatggacagttgaagttgtttccatatgtcaatccttataaatcggtataccctgaccaatacgcttcatacatcaccgtttccagtattactgtagccagttattttagtagccgcttggttgaaagaatccctcaattagctcttttagacactggtgccacattttcttacttgccaacttatacgctgatacgtctcgcctatgccatccatcctggttttgagtatgtccgacaactgggtttatttattatagagtcaaacgtactctccagtgcgagacaaagtaccattgacttccggtttggcaaagacgtagtaattcgatccaatgtttcagaccatctactcgacgtatcacaatacttcacatctggacattatcttgcacttaccatccatgaaagtgtcgatgggcttctcattttgggtgacacgtttatcaagtccacctacttatttttcgacaatgataacagtgaattgggtattggtcagatcaaaattaccaatgacgaggatattcaagaagttggtgaattcaccttagaacgcgattcagactattcttctacatggtccatttactcttatgaaacttctttggatcccttaagcactggcactggtacggggtcaacctattctcctactcgcagtactacagctagaagcgaaccgactacgtctcgacgctccaccacccttcaacccagaacaactgtgattccttctattgacaggctttcattgaacagcataactagtcatggttcctctactaacggaacctccccaactaatgagacttcttttgctgaggatggaggaactttgacacccgaagaagcttctttgacaacttcactaaattctgctactatttctgagactacttttgtcgatgttgaaacttctactaccaatggtgcttcagttgtatctttgagtgttggtccctgcattattgccttcctactactcatctcttaa

SEQ ID NO: 1029 - DNA, 735 bp, Pichia pastoris
atgtctaaggatattctgtcactaatgggtaaaaatgtttgcatgaaaagacactccgcactcagttcaaaaactaaaactccagcttcgatattgggtaaggcaggggcaactttagttgaagaattgaaaggatgggacattagtttggattgcattagtgatatgccaccaaagattcaaaatgatcaggaaagttttaaagtagctggatttgatttggatggcaccttgatactcactaaatcaggcagcacatttccaaaacacgaaagggactggaaatggttcgataccaataccattagaaaacttcaagagcttgcatctcaagattacctaatcgtagtcttcagtaaccaaggaggatttcctgtgaaatctactagtaagagattcttacaattcgttactaaatggaacgaaattcggaggcaattggaagaattggatagtaactttcaagatcgcatattcatgatagccgctccaaaagtcaacttggaagaaccacccaaatatcgaaaacctgaaattgggatgtggaattatttcctggagcgtgtccaagttccttgttcgagcccaaaagatgcaaaaaatattgacctctctagctcgtttttcgtgggagacgccgctggaagaaagacagactttagtgacagcgataaagcattcgcacagactattggcatccaattccaaactcctgaaacgtttttccggaaatga

SEQ ID NO: 1030 - DNA, 744 bp, Pichia pastoris
atggctacgaaacaagctcatcgacgacttaccaaagaatataaacttatacaagataattctccgccatttattaccgcccatcctagtgaatcaaatattttagaatggcattatgtcattgatggtcctcctgacaccccctacaacaacggccaatatcatggagttctactgtttccatcagaatatccattcaaacccccctcgataaaaatgtgcacaccaaatggacgcttccaaactaataccaaactttgtctctctatgagcgatttccacccggacttatggaatcctggatggtcggttacaactatactcgtgggattactgagttttatgacaggttccgattccaccaccggatctataagcaccagtgacgctgtgaaggtaaacctggcaaaggccagtaagttctacaatgcttgccaaaattcagcatttcaggttcaatttccagcacttgccaagcaaacaattgaccaaatacacgaagacaggctgagagagatcgccgatgtacggaagctagactgtcccactgatactgctgaaggtgctatcaatattggagaaatagaagatccagaagataaagtgcgataccaaatatggaaagaaaatgaatccaaacgagcagaccagaacgataaatcgcctgcatcaatcctttcaaaattgcagtacatattgttttttatatttctgggtgccatattcaagtattatgttcattga

SEQ ID NO: 1031 - DNA, 903 bp, Pichia pastoris
atggaacagcagagtgagctatttcgacagtttctagaaccggatagcctatctctggtgttgagcgattgggacggaaccattactaaggaggatacgattccgttggtctttgaagctcttagattagataagccagaaggttatccttgggatttcaagtatttccaaaagctctatatggatcggttcaaaaagctttttgaggtccatttgcccaatcatgagtttaagcatagggatactatggagaaggagattgaattccagaaatattttggagaatttgttgagatgaagacaaaaattgatgttatcaagttgaactgctttcacggtgttcatgtgaatagctttaataaacaggtcgagaatcttgttatccatgaagggttcccagaagtcttgcaaaagttaagagacagaaatattggttttggggtgattagtgttaattggactcaaaaaattatagaggcatatttgaggtccatagggtttgatcccgttcccaacgagataatgatgataggaaacgatttcgagtttgacgaggacggatattgtctaggtactttgcgagatgatggaataacaacaggatacgataaaatggttaaggtggtcgaaattaaatctagattgaatggagggaaagttctatacgttggagacagtagtgttgattgtcttgccatgttgaaggctgacaagggggtagttataagaggaggatcggcaagtgaagctttaagaaagctaggccaggaagttctagagataaaacaattggattctgataatataaaagatatacgatttgtcgcagtagataattggacagatctggaaaagtgtcttgatatccaagactctatagtgtttcaaggagatcgtccctag

SEQ ID NO: 1032 - DNA, 4617 bp, Pichia pastoris
atggagaccaacagggctagtgaacactccattcaagttcctcctggagtttacccgctcaacgggcatgactctgtgaacgaaggtcccaaaacagagcttatctacccagatttcaagatttggcagcattctccacaagatgacattataatgactagatatcttcaaaagggtttttttgaagcgcctgtggtccaaaatgagtccttatctgctcgaagtctgatggccgtgagtctccatgaaaactccaacgagcccaatgcatccgaagagcagacagccaaggctccgaatccaaagataaagcttttaagtgattacattatacaagcaattttccaaagacgacagttgagtaagatacacaccaaagtgatagtcagacctcctccaagggtaactctgaccgaacacaagagagaaaaatggatggaaaatttggccaataccagaatccctttgtcccaattagctagagctatcccccatggtatcaagaaccgaatactgctggagcagtgctgtctgtataatgttcctgttgcccgtgctgtctggttggtcaaatgcgtggcaggtaacgaagtcagagtgttgagaaggaaggtccagcagtccagcaccaatgctctttccaccaacgcaattttcaatacctggctttctgattggaccgaccaggttaccaactttttagagcggttcatgattagcatatttactccaaatcaaaaagattggagggaaaggtccaactacaaccttactttggtaggaaatctcttcatggaagatcttttgagacaagacaagttcttgggttggattgtgtcttttttgcgccaatgcttggttaagttatcctctggttcgaaagaagagccagatcatgtatcgcagggattaaacttgcttaccattcatttggtaattctacgtctgttctggttcaaaatcctaaaatcagatcacatatcaaaggaagcaagtgtggtccttttacaattgcatgccaaattagtggacaaaagtacactccagtcgggaaactccccgtcaacatttatcatcgagctcaaggagaacattaattttttgatcaagtatcttttctattacagtcctgatgctttcatcattcccaactattggcatgatttgaaacacacattgaagaaaattttggacacttctaacaacctggttcgaacgcagttcaagcttgtaacctacaggaatgaatccctaattgtcaatctgccgcaatctttaaacaaacccttgaacttgaaccaagatgagcctttgcagagcaacagggatgatctcctcaaatcactggatacgtttttttcctcctctgattctattggcacgttgacgtcgttggtttttgaaaagatagacgaagatgaagaaacagagatcaaaacttttgctccagacatagaacccaatgaaccagaggcctctgagacaatagagatagattcgcctattaagaattctcccattcctaataataaagaagtttcacccccaatcacaaccaagaaaggaaacaagaaggataccagaaagttatggagttacaatttcagactgttgctaaattggtctatatcaaattaccgaaaccaaagctcgtctgttgttcaggtgaatcttgttgtttctattttagaacagaggctacgagaaatttattcaaacacaaccaatcttagagccaaaaagttgaaactggaaattgagcttgagctattggactggatattccagattaacgattcttacaatgttttgaagcagaataacgagacagaaattgtatataaactagagacattggaatatctttgtgcaagatgttaccaatctggattgttgactgtttcatcttacataagaaaacttatcgcttccggagttatctatcttccagattgcttcaaaaatagcacaatccacagcttagttctgaaaagcttacctgttttgaagaataataatttggacaatattctaagaaagctctcaaacaaagaggaaccgtatgatagtgccaaagacatcttattcttcgaagaagcaaaatcaagtttgctcccgtttatcgaatggattgtcagtgattttgagattaaccttgatcctgtctggaactgtttaaagtctctggatactaaaacggctatattagtctctgaatggtttatgagtgagacttttcgtcttctcttcgaacgaactgcaaacaagaaccaagtaaaggttacagagaagaaactaagtttaataacctacgcattggtcgaaaaattaaattgtttacctcagttctacgtgaagctcctgcaggcatttgctcttgagttgaagtcgttttcaatagataaaatgacaatgatatttatctccgagattatccagtttcacgagcaacaggcggctgttttttccgccaaggaagagactaatgcctatacgaatatgatcaagtctttgtttcaggtcgtcgatgagggtaagtatctgatcaactggacagtattcaaaccaacactggtcaatgataaaaatgttatatcagagctttctaagaggattgaactatccaaaaagagttacatcaaggacttatccaacctctatcaacttaacttacgttcatcttcattcttactccataacatgaattccaaagttgagaatttgttgaatttcaacggccttgtacacaacacacacacattagcgggtcgactatgggatatggtcaggaagaaatctttcactaacacagatataccacccgaccagtatgaaagagacctcttccagtcgctgaagctaatgaaattggaaaggccgaatgatttggtcaaagcagttctagcgtatacgaagaaaaacgttttggccacattgtccttggagtacacatcgataactacttatattttgaaactctttttgaatgaagttctagatttggaacaactttgggacttattcagcaccgttaacgatactttcactgacgtcagctgccagaagtttttgaaaggactcatgtttgataagtacttctcagacattgagtgtatccaattgctctcagattttgaacttttgaaattaaagatggttcgttctaaggtgaagcaaacggatttcaagtcatggtgttcaaggatgaggcaatgcttactagaaattgactcaccggaaacaaacaacgggagaacaaattctacccccgtttcaaccgaactggaccaactgcccacctcaaccacaaataatttgcctactccaatgcagttaatgagcactccaactacagtaagcaatttcgatagcatgctctccacgacacctttcaacagcttcttgagtagattcaaagacgaggtcatggagacgtgcaaggagatgatcaatgttcatacggagctttctataaagttttttaacggactaacctcttccttgcaaggggagggtatgagcataagaattctcaatcaacttctgctgcaaaacgatcaagtgatcgtgagttgtaatgatatgtccaaagtactgcaattgctagacccattgaatttgggggtttgccaactattgaccaagaccttacatgaaaaggcttttcagtacaaaagaaaaaagaactctatgaaccacgaagaaaagtccagtttaatggctgatttaacgctatgtttcctgaaagacctcatgaaaatgccgaagtaccaacattctgaccacaaaagtttggagttggtgggagaattgtttagattcctggaacctgatttgaaattgctgctgctgcattcatgcgagctgttttttcttacatccgagatgttcccgttggtaaactccagggaagataatccgggagacaacacactggacatcctttaccttatcatcaacagctgtactagatatgaagacttattttcattatcgtccaagtaccagaacggaattccaattccggacaatcttgttttttcgttgactgtgtcactggagaaaatgatcgggaaatgcgcccggcccaaaagaaagcttgataagcacgccgaacaaaaagcaatcgagtcatccattctcttggtgtgccggatcattctgattcacaagggttacctggtcggattaatactcaaaaggtctacaggtaacatcaataaagactcatttttgcagaatttggtgaaacttttcaattcgaagttcatcaaatccagctctaaactcgagaatttactgtatgacataatcgtttctatcaagattttgattggtgagcacataggctccaccaatcatgagatactgaatgtttcacctccggattacagcaataaacttaattaccttttggagaatgtttccttccaggacggcttgcgtatgagcaatgacagccaagaactattcgttcaaaacacgaagaccaaaaccttgagcaagttctacattcgcccttatgagttgctgcccgagactactacgaagatggaggagagctgtatcaacctgcacctgttcaatgcatccacagaactgaaaaatcctaaatga

SEQ ID NO: 1033 - DNA, 984 bp, Pichia pastoris
atgttttatccgagaaatcttcggctggtggaaaaaactgcagtgaacggggccaatttgccgaattcaaagatggaaaagaagttcagtttcatcgggggcagaagcgagcctaagatcagatttggactggaaatagttaccctcaatgatacaaacgaataccttgttccattgatagtgactcttgtggtagtagcgtaccttattcctcagaaggcaatttcaagattgcaagagtgtctggaaattgctttcttattggtaataggctggtccgtttaccagacaataaggtggcaatgggatgtgtacctggagatgagaggaaacgacggtgtcttgaaggtcaaggccgctagacaaagaaagtctagagcattgttccttggctggggaataattgcgacagggctagctcttctttgtttcattttggtcaaacgttactttatggaatctagacctctgcctgatctattgtacaattcagagcagtttctcttgacgactttttccatacgacaatggggaaaagaaattcacaaaaatgttcaagattatatctcccaaatatgcgatgagccaaaccagccttcggaacctgtcaaatctgaaccaccttcctatcgaagtttcaaggagatgccgtttttcatcactgatgtgtacaaaaagttggagaatctggaaaagaagacagataaaaatgaactcaaaagtttgcatgaactgactgaacgattgagccatcttgaacaagctatcaaaacaattgcttatcaagaaccttcattgagcacgaacgacactggatgttcaaaatcggtaccagaacaacaaatagaacactctagcagtttcagtctatggtcaatacccaaaatacccattcacatattctcttggtgttggtcattcccaagaaggttattaatgattggcctaacgctaactattaaggttcttcagaaagcctggtaa

SEQ ID NO: 1034 - DNA, 1482 bp, Pichia pastoris
atgcttgctgagattggggactatttcaggacaaatagtagcaatggattcagttctagctgctataacaaagagaagctttcaggagacctcttggagtccgattttgtgaattcatcattcgatgacacaacactccactctatgctatcttcttcaataaatgctgatccggagcaatcccagaaaccacaacaaagacacaagaatcaatccagttgccatcaggaactcaagattgaaacagaagatcagcaagaaccgtatctattgcctgatatgcttaccaaaaacatattcaactcacagtcttctatgtttgtctactccagcatcccacaaataagctcagtgcaatcgtttatagacacaaacaccttttccgctgttgatggtggtgccgccccggaaggaaattcattgtctgtggactcaactttaggtctatcttctgaccaatcatttgagaagctatactcttacgaccaaaactttgagaaagaaccacaatcgccagcatgtcccttagtaaaatgtgacccagtaagcatcatgaaaacatccacaaactcattggagacagctgtcaacaccaaaagacgaatgtttcagcttagaaaccaaaatgaaattgaaagtctcaatgtttctagtgacatcgttgttgcgacatcaaaatttctcaatcattcatggatcccgctgatccgtggacgtaatttcggaggaagcaactgcaaaccgcccaagaaaccattatttcctggagcgcgctatgttactgcccgtctacgattggaatacagtagctgtaaagatatgtgtctaccggaatggaacgagtatgaactcgaagacagtagaagaatcattcgtattgagagactgttcgactccaatgaaatcgtagcctccttttccattgtcgggtctgctgtagagaacccggaaactaggcctgtattcaatcctaatgtcaaagtgttggaagtttcgtgtctaagatgtcttaccaacaacaacgagtctgacgaggagaactgtgtcaacaaagatttggatggccgtaaccgcgatatggttaaggactcatttggatgcaagtactatatcaccagtgttgaagtcataaagattatagaattactggtcggaagctcttcaatctcagatcctcatcaaatgagaaaagaaagagggcgtgtgagatccaacttggctcagttctggtccaaacgcctagtttcttcgtccaggaaaaccatgaaacaaggtttcttgccaacatgcaacgatgattattttgcagagctggcccatcgtattaacacatacgacgtcagaaaaccacgattatttgacaagtgtataaagattttggaatggtctaaacttaagccagctctgcagcgggctatgcaaagttactacatggttcaactggatgaatctagcaacaaaattgcaacagcaaacaattag

SEQ ID NO: 1035 - DNA, 216 bp, Pichia pastoris
atgctgaatgatacggtaatcgtcaccatcgattcactaccaacgaccaccagaaaagaagatgcctggaattattactcaagcttgatgccatacttcaatcgaaaaaatattgcagcacctgagtttcgcgtatggtctcccactacactactcggtcaggctcttagcagcttaactacggttgatcggacgggaaacggtgctttctgctag

SEQ ID NO: 1036 - DNA, 846 bp, Pichia pastoris
atgaagctccttgaggcgacgcctttcaagtctggggatttggagttggatgaggaccaattgaggaatcagtgtctggaattgctggaatgcatctaccaggaggaaaatagatataagacattccatcaaactggcgcccacaacgagaccattcaggtggacacatttaagggaagcaacggatgggccgggaggagtaacactataagcgccaatgattataatctagagaatgttgtggaagctttgacgggctgtgtgtatgagggggacaaatggaagattgcggatccaaccttacacacctattacgagaaacagtatatgggaaagttagttgaaagcttcgtaatcttgaaaggtgctccagagccatggtactgtgtagaactgaactacaacctagggcccttgttgaaaacacgaaagttctacgaatatgtcagggtgcttcctccactggagcaaaatgaaggcagcaaagtgaaactatttggcaaggagtcggggttcatcgtgagcgttccagcggacattgaagaaatacagcagacgctcaggtctagtgacaatcctaatctccattccgacagtttactaactgatttgcaattttcaaaagaatgggtctatgcccagtattcctcggtggaaagtattagttatggcgatagccaagaccttatctggaacatggcaacagcttccaacgctggggggtttgtgccgagttttattaccgtgctcgctcttccaagaacaatagctcaagatgttccccatttactgcgttggattcatcagagaaggcgattacccaaagaggtcaataaatcagaatag

SEQ ID NO: 1037 - DNA, 486 bp, Pichia pastoris
atggactcaaaaaggtatctagtttcatatggctggaaggaaggagaggccttaaagaagggaggccttaaaaggcctatccttgtaaagcagaagagggacaccaaaggattaggaaatgatatcaatgatggagaggtctggtgggaaaaactgtttgatgtgcagttgaaaaatttggaagtttacaacagtgacaaagttaagtttgaacaaaaggagataaaaatagacaagagtccattgtatagcatgtttgtacaaggagaagggctaactgggactatcggagttgaagaagagactgtccaagctacggtacgaaagcagatagtagacttgaaagaaataaggagaaaaagagagaaggccaaaaagagtaaacggaaagaagaaaagaaagagaaaaagaaagcaaaggaaagtaaggagaagaaagaaaagaaagtcaagaaagttaaaaaagtacaagaaggacaagaatga

SEQ ID NO: 1038 - DNA, 720 bp, Pichia pastoris
atgtctagaattttatcatctgctaagcccattcaaggcataggctacgatcctcttattggcccccagcgggttgaagaagtagaagcatctgcgaataatagcacgtctgtcgatcatgttacacccccaaatttcaattacgatcgaaacctgcataggatgaaacacgatgtgtctctaagttccttcagttttctgttttgtgaacttgtcagttggtcaagggaacgtgcgaatggtattcaagaactggaaaaacgcctcaatggtcttggttatacgataggtcttaaatatctagaacttctagggctgagagaaaattacattaccaatacaaccacaagcaagaatggactaaatagggacatcaagattatccagatgttggaatttatacataccacgttttggaaggctttatttgggaaaacagcggacaatttggaaaggtcccaagataatgtttgcaattacatgattactgacaatgacccattagcaaacagatatataagtgttcctagtgagttccagaacttcaactgcagtgcatttgttgctggtatcatagaagggatgctagattcagcatatttccaggcggatgtttctgctcatactgtcgagaccaaggaaaaccccaatcgaactgtcttccttattcagtttgacgaggcggttatcaaacgagaacaaatcagatttggaagttaa

SEQ ID NO: 1039 - DNA, 1212 bp, Pichia pastoris
atgtgcgaagatatttgtaaaaagaaagataactattttgttaaaaggtatgctattaccaacgatacagtgaccactccgctatcctcaaacaacacagatattaccgtaactgagagcaccacaatcatgccagtgtcttcagcccaatactcccttttatccgcatcaacgagcagttatcagacgtcaagcatggtgacacctacagcgacatcgcaagacgagtcatttcttgtagcgcagtacacccaggattacgttgttacagcagaagagaccactttcacagtaggaataagaatgacaaccacagtgctcggttctcagaccgtaactgcggaaccgaaaacgaccgatttgccttacttcaaatccgtgttgtccagtcaattagaatcacagggcatggaccctgactcttattatcgggtctcaaaaggtagttccttcggaaggggccagattgtaggggtctccataggtagtttttttggtgtccttttggtactactggcccttttcttgctatatcgaaggcggaaaaagaagattcatttgttcccacttccagatttcgaaaaaggatatgttccaccaagtctacccaacgaaaactctcccatagttccaaacagaggatccaagccctttttattttctgaagaatcaactgtacctgagacgacggaggagagagaggtctctaccaccggcaaccaggacgatgagttgggtggactaagatttgggattctggcaaaccaggacatgtcaaatagtccacccttgtcaccgaaagcaacccaagaaggatcccgccattatttggggtctcctgttcctgaaagtttaaacgcttctgtggacaggaccattaacgttgtctttgaagaaggttcaagtcttgaagaggaacctgtgctcagtgagaagggacaaaacaccatagataagcaaattcgaactccttctcgctatgcaaacgttggattagacagagaaaggctcaagtccatgtcttcaccacctccggtcccgagaccacgtaagaatatacatttaggccaagagagcaaccaagacgacaatgaccaagaagttcacgatactttacagtttaacacccgacgggtgctagaagaagaagagcttagcatcggatcatttgagagctctttgctcagtctcagcgattcacagagtgattga

SEQ ID NO: 1040 - DNA, 927 bp, Pichia pastoris
atgagtgtactctggcaaactagccttggggatatcaccattgactgttctggcaaagacgactatgtgaagaactttatatatttgaacttgttaaagtattacgatctagtctcctttcacaacaggatcacaaacgactctgtctccacaggtcttccctattatcccaaccaagacagaagaaccagctatcaagatctactaaaggaaaagggccataaaggaaaatgctctagtgtggttaatgctgaccctcaggatatcgaaaattccgtggggttggttctattcaatgtgaatgatgcgaatgatgagccttcgattgattctttgataaccattagcttgacaaacgaagggaccagatcaaatgttgttgaaattggatacgtaacggagggtttctccgtccttcaggagattaattcctgtgatgccaatacaaagaacgaaccgattacagacattcgtattttcagatcgtacgtacttcacaatccttttccagaaatatcggtgccttcggtatcagctcccttactgctggatattgaccagctgaacacgatctcagaattaacttccgaaacggcgtctcgtcagctggcgttagaagtgatgggagatctggtacatgccaatatccaacccagtgaaaaagttctttttgtatgcaaactcaatccaatcaccacagcggaggatctaggtgttgtgttcagccgattcggaaaaataacaggttcagaaattgtcaaggataggagcaccggcaagtccaaaacgtatggctttattgaatttgccgatgttgaaagttgcgaagaggcctaccgcaagatggataacgtaataattgatgacaggcgcatccacgtggatttttctcaatcgaccaaaagattcaaacgggcaaaaagataa

SEQ ID NO: 1041 - DNA, 1191 bp, Pichia pastoris
atgaacagtgattttgattccgtcgtatctggatctgatgatgcagagcaatgtgtctttataggagattcgaagtctgactctgactcaacgtattcatcgctgaatttttcaggagatcatccaaccaaaaccctaacggaagtattggccttagaataccagaggaacatgctaaggctcttccaattaaggcggcatgtaaacaaggccattttggaggatttcaaccttgaatttcatcctgaagtcgttaactgcactgataaacatcttttgccggacatggtgtttgaaattctgaaacaagccaacgatgagttcgtacgtagagaatataggtcaaagtcttctgcgggtcaggttttcaacaagagttctctattctttgtggacgtcaattctattgccaatttggaaatcaagtttactgtgattgaccactttaatacagaagtgcatacatatctggatcggctgtttggggctaagataaccagggacagtctagctgttttcaaccaaaagattgatgttttcatccagcatcatacaaaactcttgagtgcttacgaaatagtcatatcctccgatcagaacagaggtctttacattcccacaattcccaatcgtcacccaccaaaacctcctggaccgttcattatcaacgggtcccagtctccaggccctaacagaacgcccaccaaagcagctgataaatcacctaacaaatcgcctaacaaatcgcctaccaaatcaccccaggttagctcaaaattccagtttctcaaactgtccaaacactcgaggactaattcagctgatctccacatatcctctcccataatgacgagggaactacgaaacaaatctacacccaagaaatcgacaagctacactgcattaggcgacactttatatccaaagtgcatcaatgaactttacatcacaatccacacattgactaaacattacgaaatcctcagggcattattcccagactcagacttggtcgtgtatggtgaaacctccgagtatcttaagttccagcaaatcaaaatgttgctgcgtttcacctcacgatgtctcatgaagttcatagtgacagatttcggatttctactggcacagttcctggaaactttggatagctacatagctactttagtggttccaggtagtaatgtttaa

SEQ ID NO: 1042 - DNA, 1416 bp, Pichia pastoris
atgcccactataaagttagcagattataaaacgatagcaaatcttggatcaggcaagtctgggaaggttatcctggtcgaatcagtccagacaaaacttcaatacgctgtcaaggtcataagcctcaaggagaagaaaccttcaattgatttctataactacaacaacttgagtcgcatccagaatgaagtcaagctgcttactttaatcaacaagtaccatcatgaaaatatactggaattcattggaatggtccaatcaagcagcaataactatatattcctagagttttgtgcccaaagggaattgtctccttcgctttttcgaaagctcacaatggtcgaaagcctgtcttatgttaggcaattggttaatggtattcttttcattcatcaattgtcaataattcatagagatttgaagccaagtaatattttaatcaatgaagcagggacattaaagatttctgattttggcatctcttacaaactaaccaatgatgacaagatagatcgctttgaactgagcaatttagttggaaccccgttattcgttgggccagagctcgtcaatttcaacaacacaaaaatgcatttggggtttcccatcgattactgggcttttggaattactttattttacctgtactttgattattttccattttttaatgataacgaatacaagctgttcaatgataccttaactaaggagttagagcttccgctgtatgaagaacttaccactaccgaccgagattctcaatttttcagttacttacttcgaattatatcagctctactgaacaaagatccaaccgaaagactctcattgaaccaactacagcacgatgaattcctactgaacggcatgtccaagaaggaagtaaagagatttctaaactacaacaacaccctgttgcaccataaatctagtccgctttcattgttcagactaaaaccatccagatcaaagaccagtaaattaaacatatcaaaccccttaaaggaaacttttgaacacatcaaagacaatcatttatcctcaattgatcaagcccataaacagcgcttccagttgaatgagtcttccgtttcacttcctatcaaaccaaattctatgacgatatcaccattgaaaaacaggtttgatgatacactattcaagaggtcaccctctccattgaaggcgccttctgtgtttcccaaacccaccattgccattcatcctgaagaaagaacctctatgcataccctccccaacgatctttcagaattgagccctcaataccaaaccaacttaataaagtccaagggttataacaatttgaacaatgtcctgaaaagtcaggcgccccactttctagacatgaatgaatactgggatcaagtggaaagaaatcacgaacagagttaa

SEQ ID NO: 1043 - DNA, 576 bp, Pichia pastoris
atggatctgacatttctgagaaccactctatcgtggactttgcgtgcaggttgtctgatccatttttttcattctcacgtttacgaattcaaagagactcgcggcgagtccatgcttccaactcttcaagcgagacatgactatgttcatactttgaaaaattacaagtttggaaggaatattcaaacaggagatattattgtagcattgaaaccaacagacccagatcagcgggtttgcaaacgaattactggaatgcctggagatattgttctcatagatcccagtagcggatcgttagagaaagacaaaagtgacgcgagttcaacagcttttgaacgttacattgtcattccagatggccacgtttggctgacaggtgataatctctcccacagtttggactctcgtacttactcggtactaccaatggggctcatcaagggcaaaattgtcgcggcaaatgacatgaacaaatcctggaagtctttgtggggtttcagatggattgaaggaggtgttcagcgggcggatactccttcttggtccagaatatcaccatctgatgttacctga

SEQ ID NO: 1044 - DNA, 474 bp, Pichia pastoris
atggtaccttattattcggaaacagatcatactttggtagtacaatgttattgcaggtcgtttaacgagaagctgactgaaaagttcagaactcagcttcaacatagcgctatattgaagaactgtatcgatgaattgcaagagctgaacttttcactggagcttatctcaacaaggccaatcctgtatgaagaactggtagagcatctcaacttcttgatgacttcaaacatgtttcaattggagactacagtccccattgtattctctttctatggaatagactcatttcttgaaactattaaatattgggagactctttgcgatgctttatcgacaactagtacccgttctttgatgtcattaaacatgatcaaactgttgaacaacaatatgatccaaagtgaaaacttcacaactcatttctttaaagagaataggcacttttacaactttgcaagctttttcgcttaa

SEQ ID NO: 1045 - DNA, 309 bp, Pichia pastoris
atgcatggatacgctcccttagatgatttaaacttctgcgcctatcaaaaatgcgaatatcaagtgataggtgctggatgtttaaagatatccgaagtattcaatgggtctgtttcttatctactgggaattcactccgatcttctgttccagaaacgagttgagaccctattcgttgatactgaattacagataagagtgtttatcgctccgaaaacttccgatttatcaggagcctatgaaggaactatgatatctaaggaggctgtgaatgtgtcaattatatccgtgaatttatttgatccgtga

SEQ ID NO: 1046 - DNA, 471 bp, Pichia pastoris
atggatatcatatcaagtgaagagcagaataacacacctacgggtcttttccgcagggagatttgcagtgagattgagggcaacacggattactgcctagagatgtggaaggtttacaataataaaaagatctatctgagcaactcacacagagttttgaatctgacgtggaggatgaccagtctgaagagtaaacagatcatgcagaaacgaaacagagagcactacttaagccaattcagcgacctgagcatgggcttggatcctttggggttctttaacgatgtgagtaactgcgagcagtttggaggcatcattgcaggaggcatcatcgaggcaggtctcattgatgacagttttatggacgagggtaacgacgacaatggttcgaatggctgctcccgctgctctgattgtggcaaccttgtctgcatatgtgctgactttgagtggatgaagttcggaaggtga

SEQ ID NO: 1047 - DNA, 807 bp, Pichia pastoris
atgtaccctagtaaggaggaatcaaaattaagcgtctccattttggaaagaaaaaagactaagaagacaacacagaacaattccttcgcacctccattgacgtcctactcatccgaaacaccggggtctacctccctgacgaggaatcatgagtctcgtggtcccaataatggccttataattacagaagaaacctcagtacatcaacacaacttgaactacctttcacatcaggtttcaagtaagctaaatgagcttgatagttatagaaccctgggatttaactatctccaaccaccaggcatatccacaactatgaaaatgagaaaagcccaggagaaagaacagaaggaacacagtcacacacaagaggttcatactaccgaacaagctcattacagccagattaattcagaagaagtgggcaattcggccatgtccttgattgatatggatagcagtttccacatggattacgaggggctcaataactccaatatgttggatgatcaaagcaatatttcagcgcaatctcatgaagattcggtaagcttcgatgaagatgaaaatgttgactccgatttcatggttatagaagaggacgaagatgaagatgaggagtttgaagttggagaaattgaaagtccagagagacagaatgaaataaacgaagacgatagggtgttagcaattacagctccgactagatttcagagcaatagactgcatcctaggttttccagcgggtctgtcaattctaattctcacttgagaaatgaagtcacctactcggaagatgaatgttga

SEQ ID NO: 1048 - DNA, 306 bp, Pichia pastoris
atgtacccatttcagacaatactaatagggctgagtgaaacaggtaggcaaaaatcaaatgatcgaaattttgacgcatggatagggaaaaagagggtcgtgtgtgtattttttttgataggaatcatccaggggtctcccgtggtgatccttgattctcaatttaaagtttgcgaggcagctttatcacaaatttttcgcatcggaacacttttccgtcgcttgtgggctatttcttgcaacaactctcagatacgcgagtccttccttgtatttcaaaaggtaaacagtcctgattgccattga

SEQ ID NO: 1049 - DNA, 780 bp, Pichia pastoris
atgaaagagtataccttaaaagaatgggatacttccaagtttggatccaaatggcaacaaatctaccatcgtaaaatggttcaaccagccaagaaataccactctttgatgaccctgttgggcttccttcttgctcttctaacccattgcatcatgtacttgtcattctaccaaatgacagcctttctggccctttttagatgctttatgtctctcactataacctgtatcatcttctcggcatccatcaagtatcaggaaaagatttaccacaacttcaactattttagtagcatcttcctcgaggaatacataaccttcactgaacagctgatggaggagtacaatatcgactccagtgctcttttgaacttggaatacatttcggatcgtaacagcacagctgacatttcgctgggatcgatcattcagctgtggcaatcgcctagtgtctacgatagctaccttctgtgtgaagcactcgatcacgaggattctttttcggacatctggatagactcattattcttgaggtcactcaacacaggctgtctgttcaacattagcctggatatggcctattttgtcacatcttccgcctgccttctggtacatctggcacttctcaattttcctgctgtgaaatttgtaccatccatggagatattctacctcgatatcgcaagcagtacgctagtcttacttctatgcaactacttgaactgggaggtgtggaatactctaggcgataaaaagcgccagtattgtgatctggtatga

SEQ ID NO: 1050 - DNA, 195 bp, Pichia pastoris
atgttgtacagatcagtgagactttctctaattatctatggattgagaaagttattaggagggacacacgacgacggctttgacctacttcccaaaagtctccatcgatgtctcaatatgattgatggcaagtacacaaatgaaggtactaaggtggaattgataggtattgctatccagaaagacaagtcgtag

SEQ ID NO: 1051 - DNA, 1068 bp, Pichia pastoris
atgatctctaagctaaaattcaaaggggactcagacagccgcaagaaaaacaagaagaatgctgacagtaaagcaaaatcaaaatccaaagttagacgatctctaagcacggaattatctaggcaagagccgcaagctgcctccttaggcgcttctacttttcgcatcaacaatagtctaaggaaattcaaggatatcgacaaggatgacttggaagcaggatggagtgtggctgctacttgtgaagatataagtggacccacgatacttttagttaatggtgtagactccccaagggccttagcttgcgtcaatgaatccatgacgacagatgaccgattggatttaattgatgttgatgaaactgtcaattttaatgagagcaacaattcagaatttgcggcagaaaaggaaatgtttcgactagagccaacgcaaacttcacaggtatttgtttctacgccgttagataagcttttgttgaatgaatcagaccaaaaagatccagattacggcaagacctttctaaggatggctatgaaatccaacgaagacaaatatttaagatatgatagagatacagatcagttgattggtgattctgttaccataacacatgataccattttgactttaaggaggcttccagatcaaggctatggtgtatggtcgataacagtcggctcagacccttcactgaaactggtatacttagctgagagtgacaaggtccgggtcataaaagatgaagagaatatattggatcttgaaacaacaagtatagtaatgagggtccagacaaagaataccaaattgggtcgccagatcatggagtaccatgactttgccactcaagaaaatatcgttgatttgaacgatcttgatcttcagaagtataaggatgataggttaatttcggaaaaacttttggaattacagaggctaaaaatcaaggtagatgaggatttgatttcaagggtgcaacaagcggtgcaaaacagtgaaataaatgaatttatggttaaactgaaagaacaaagaaccagtgactccagcaggtattattga

SEQ ID NO: 1052 - DNA, 318 bp, Pichia pastoris
atgacaatgagcgcacacaatatcggaacacgagcttcacctaaaactggctgctccactaatttaaaaaagattgatttgcaattttcatttatttattgtgaaaaaatagttactacagggatatctgccattgaaaaatctgtgtctcttcgaacaatatcaattgtatcgtttggtgaagagaaagaggatcagttatttctaaagaaaaacttcgttacacctcctctttcgacggatgttaagagcgttctaatcaaccacaaaagactggctagaggtatccaagcaaaagcccacaaatactactcatga

SEQ ID NO: 1053 - DNA, 2532 bp, Pichia pastoris
atgtatgcaattttcgctgcctacatagttatctatcatccatcgatttatcactcccacagtacccaccaccattggccggccacaatgagttggtatggggccgtaattgagcatatattgattaagagtgacattgtacacaataataatagaaaatacgaatcaaacgcctatagttcagaataccaggagtttgtgcacgaaaacacgttcaatctctatttgcaagccaaatacctggtaaggtttttgactacaccacagagggcatatttacctcaaagatcaaaggaagcccagattacatcggagtatcgaattcagcagcttgaccttggcataaatgacgaagcagaatttcactacaggtttctatctttcctaagcttactttcttatgtcaagcccgcctccaatttttttcaacgagaagaactttgcatggatgacaccgaaagtcaagacatgaaggtcatgcgagtaacaatcaatttatgcatattggctatttttgctcgtacatttaatagtaacttgttgtccgatactcatgctacggtcttgggagacatcgttgcaaggtttcgtgacctgttcgccattggtgatgaatcttgtcccataagtatagcctatgatcttgtgattgatttactgctgtataacaagtttccaaaggagatgtctactctttcgcttgaacagatgagatccagaatatctagtgccgagagcatgttggacttgaaccatcccccaggcctttggaaggttgctggcgttgaaaaaaatgacattagtaactctgctttatccaaacttcgaaaagtacacgatatcaagaacatgaatgggatgcttttgagttttgttgaacgaaaatattcaaagctatcctcaatggaaatggggccactgaatgttggggactctcaaagtataatctcaagagcaacagcccaattaaacttgcctataggaaaacaaaaaaagtcagttgcaactagtataattagggagctacttgaggagctgaaaactggtaagaaacgcctaaacgcaggtaaacctgcacaatcattgacagagacgaaccgtcaactggagatagaagctcatgaaggaaaggctaaacttaatcaatttgaatccggaaggtcaacatacaccggaagtactacagagagtatttctgcgaatatttattctcgtccacaggctatacattcaccggatgatgaacgaaataattatctaatgaacctgctccgggagagggataacgaaataatacgacttgccacagaaaacagagagaaaactcagcgaatagaacggcttgaaggagagcacaagcaaacagtcgatcgaatgaacaggactatgcttgccgatacgcagaaaataacagagttagagagaagcttaaatgaaagtgtaaaatcagcctcatcccgccacacgtttcacactcttgagaaaaagcttagagaagcagaggagaaattgaatcagttcaaaactggaagacctttaccatcgtctttgccaactgatcaaataaatcagcaatcaaaccagaatgccaaaactatccaggaactatcaagccatcttcatcaatgcatgtacactgttacactgagagagatgagaatacaagaactagcagcccacatagctaatttgacaaaacaactgggagtaaaggatcaactgatcacgaatgcccagcaacttatagaacgacaaaaagttcaccttcttcaactagggaacaattatttttctgcttcccaagaaaaagaatcactgaagcagaaattgaatagtcttgccaatattgataatgcgataaacaatcctagtcccaggttatcggacgcagaaacgaaactagtgcgactggagagtgagctttccaactgtcagaagctacttgagacacggatcgttgaacgtgatattcaaaacaacactataattggtcttcaagatcttttgaggactagagagcaagacctgcatttgatagtcgaagaggagaggcaatttaaagatctagtattggagaaggacagactgctcgatgttcaagataagaatgctttgaatctaaggctacaactaggttttgcttcccacaaggtaattgatctaaaccaattacttcctgtgcaaaaaacacttggagccactactagtctggagttaatcaactttcaaacagacatcaaaactttacacgtcgtaaacaatgtcatggacaaaatccgggttaaggtcactggggagaagcgactcgtgacactgactcctgacagcaccaacaaggctctagaatttcccactgagaatgataggccactgcaagaacaacaaaatacagagcatgaaaacgaaaacggtgctcaagatcccatagactcaaaccaaacgaatgattctcagacatactccacacctagccgtatccattatacgactaacgaggagagttcctctaagaaggttaaaatatcaaattga

SEQ ID NO: 1054 - DNA, 1935 bp, Pichia pastoris
atggattccaagccattgtctggggtgtcactagcggaagctagtaacttgaatctggatccatctgtacagctgaggtccaatagctctatacaagaaaactatccggatccagctaatgtatacacggagcaactaggtcattccccatcagagagggacacacttctcccgcagagccctaattacaatgctacgagtccttcccaaggtgctggccgatcacctttgtcgaagaagaaaagaacgcgttcactactttctacggacaagttgaagtccttaaacacgaaactaggaaagtggaccagagggctttcatacaaatggtggatagtacggtcaaaggatgtagaagggcagcctagtgagatccttttcagtgttttcatggcaccaccttatgtgcagcctcttagaagacttccagcgggagggttgatgaatatgggtccaacttcaagagaagattttgcacatatagtagatgacgttatcgatgccatagaacaggggataaaaccaactagaatttcacaaggctcttcaggatcatattttatgtacaatacgcaggggaagatagtgggagtgtttaaaccaaaggacgaggaaccgtatggacccttgagccctaaatggaccaaatggattcatcgaaacttatttccttgcttttttggacgaagttgtctaatccctaatttgggatatattgcagaatctgcagcgagtcttttggatcgccagttgcagtcttttattgttccctacacagacacagtgctactctcgtccagtagtttctactacgcattttgggacaggtgtactcacgcttggtctaagaagccgtatcgcaagaaggtgggttcatttcagttatatttaaacggatacataggagcagatgagttcttcaaaaagtatcccttgccagctgacaaaggaaggagcctattgccatttttacccgataaacacaagaagaaaaaaacttccaaaaagagacaaagaggtgatactagacattctatttttgacaaagacactgtttttgagtggaatagggataccttacaacaattacgagaacagctggaaaaactggtaattctggattacatcatacgtaatacagacagagcttttgacaattggatgatcaaggtcgaatgggatgaatacttagatgaagaggcgaacgaggcttataagaggccgaacttgaaagttagagcaatagactccgggctggcattcccttggaagcatcctaatgagtggagatccttcccttttggttggttgtatcttccaacatcagtgattgcaaggcctttctcagagagaaccagaaggcattaccttcctcttttgacttccaaagagtggtgggaagaaacttcagtgctattccgagaaatgttttcgagagatacagagtttaaggagagaatgtggagacgtcaatgggccgtactaaagggacaagctttcaatgtggttgaaacccttaaaattccaggtcagagcccattagatcttgttcaaaaaaccagaataatggtctgggataatgtcgtggagatcccagtttcctacgttcctagagacattgatatatataatgactctcctgtttggacataccaaaattatgatgaagagtactggagctccaacattgctcacaactcaccaggaaggtatcatgaacacgaaccaaccacaccagagtctgagtgtttggatgatcccttttcttcggctgcgtccactgatcgtggaggttacgcaattagttcaaatgcaaatactcctggacgggccaacactgattccattcaaaagccgaccacggctacaagaagactcatcgtggagaggttagaaactatcacttccaaaccacctgttttcacctggtgttaa

SEQ ID NO: 1055 - DNA, 438 bp, Pichia pastoris
atggaccaggagaactctcaactacgtaatttccatggattgttagttttggcgaggctcttggatgattacatttccaaaactcttcagcaagatgcggtgaaggatgatacgatggtgcaaaatgacctcaagtggacgcaaaccgaaattaaggaaacaatctccagagtgtctccattggcgtcaacactgacatcaaataactcctcatcgaatgcggaaaagaaggagatttttgttcaggtctgcgcttactttggaggtgtgttggataatgttatcgtgatctttaaagagactacagaactgtcaatgttacctactctcgagacgttgcaaaataatttatgtgctatagaaagcggtggagatgcaggcggagatctttctttgttgataaaagaagctatagagcaattacaaagacagagataa

SEQ ID NO: 1056 - DNA, 1200 bp, Pichia pastoris
atgaacaacttctcttcctataagattgggagtaacttattgtggagtcattgtagacgggccctaatcaagacaagtcaatgccgcttacgacctaatttctattctgctgtctgcttaaacaatgcagactataatatgtctaaactcccctcccatatttcagaaaacttaactgaaaatcgcactatgaagctcaatcttaggagactcacttgtttactgtcgattttgtatatctctagtgtagccgaagctaaaccattggaggcagatgccaatgtcaccggaattgatcatataagcacccataactacagactattaaatgaaatggcacttttttgtcaagcctcctattgcaaaagcttagttcccatgagtgaactaaaattgggggataagtgtttcacttccttttgtcaaaagaaagaaaacaaagatattgaaattgcctttatttccgagcctgttgcgggcacgcctggtgctggatatattgcagtagatcatggacgccaatggatcattgttgtaatcagaggctcttcttcgctggaagattggattgctgattttgcattcgtaccaattccttggaaaccgtatgctgccactaagtcaggtgtaaagtttaagtgcaaaaattgcaaggtgcacaaaggttttaaaggaacttccgatcttctggagaaaagaatgtgtgaagcttcatctaccttgcatgaagaataccctgattataagtttatcgtaactgggcattcacttggtggggccattgcaaccttgattggggcagacttgaaaatgatgggaatgaatcccctggtattgagttatgctgggccaaaagttggaaatgaaaatactgccgtttacattgacaaccttttcaaaaacagcgccgctatcaaaaaattggattctggaggtgatatcacccaaggagattacatcagggttgttcacgttggggatttagtgccaaaggttccaccttcagaattcttctggcatgcgggtgctgagtattttattgacaagtacgacctcccgcatcccccttccagcctagtcttcaaggggaaatacaagtacatgcctttgatctctgacatagacaatataatcagaggaaacttcccatttgctgcccataatgagtactttcatgtcgtcaacaagtgtaacgcttag

SEQ ID NO: 1057 - DNA, 600 bp, Pichia pastoris
atgtcacttcctaaaaagtataaaaacacgtttctaccgtcagaggtcgaatttcaggctgaggatcaaccaattttaattatccctagatatgccctcaaagatcgtcagttaataggaactagtattccagttttgaaacccatgaagagagctgaagtgccattgtggttgggatttatattgaagcaacaagatagatgtaacatagtaacccctagttggttatccataaactttctgaaaaaggcctaccaagaagaagtgacatatactaccagattctttagaatgccttggaattggctagagatatccaagatgattttagataaagcttcggacgacatgaccgagcctccccatcaaatcagggccctaatacaagatctgagggaagtcagactgataaaagctagaagaggtctgaaagaactaaatgaatcttacatgcaattggacaacttgagtttaatggaaattaatgagctgaggccgatggttgttggagttatggaccaattgagaaagctgcaagtcggcactaatgaggacgaagaagtgagcgatgaggagggcccactgagttatgatatatga

SEQ ID NO: 1058 - DNA, 375 bp, Pichia pastoris
atgtccttcgagaacagttggagttttgcgaatttggatactaacaactttagtgatcttgttaaccgtccaaaagcggagttaacagactctgaacttcaacagctggaggcatacgaattccaatatggaccaatgtcaatactcaccacggccaccaatacacaatccacagtaataatatccctgagaaatgatcacaaattaattgctaaagtgaaagcttttgatagacattgcaatatggttctggaaaacgtaaaggagttttggactgatattaataatggcacaaaggtaaccagagaaagatttgtgagcaagatgtttcttcgaggagacagcgtagtagtaatactgaagcattccgactaa

SEQ ID NO: 1059 - DNA, 1335 bp, Pichia pastoris
atgcagtttgcttccttactgcttctcttgtatattttcttggggcaaatttatcctactgaagcagcaaaatattttgttcgtctgaagaagcctcacacactagacctcttgttcaaacaggatgaagcagatgcatctgctgagaaccgaatctctcttcatggtttaagggaccgaatcaaaaaaaagatctcttttggaacgttcgaaggttttgttggtgaattcacaacagaacttgtagaaaaactaaaaaagaattcgttgattgcagacataactcctgacattatcgtctcatcttgcgatatcgaattgcagtcccccgctcctgatcacctggctaggttatccaaagaaggtgccgtaagagcacaagatcgtcttcttggaccggaatttttctacgatggtgactggactggagaaggcgtcaatgtatacgtgatagacacgggtatcagggtaaatctagatgaatttgagggcagagcatcatttggtgctgattttacaggcactgggaaagatgactctgttggtcatggaacccacgtagctggtcttattggctccaaaacttttggagtggccaaaaatatcaacttgatatccgtaaaagctctctctggtaatgggagcggttcgctttcagaggtcctacaggcgattgaattcgcagtcaagcatatgaaagccagtcgtaagccaggtgttgctaacttgtctctaggtgcaccaaaaaattcaatccttgaaaaagcgattgaagaggcattcaagaacggtttagtcatagtagcagcagctggcaatgccttcgtggatgcctgtaacacatcccctgcaaactctccatatgcaatcaccgttggagctataggtgatcacaacgatgaaataactagattttccaactggggagcctgtgtcgatctttttgcaggaggggacacaattgtaagtgtaggacttctcaatggagtcgctgtccgcatgtctggaacttcgatgtctgctccaatagtcgcaggcttagccggaatattacttgaccagggtgtggccccagaagatgtaaaaggtaagttaatagagctctcagatgaagggaagatcaacgataatactggaattctaaagccgggaactccaaaccgaatagccaacaatggaattcgaaaaagtgattatgaagatcaaaaagaaaatgacaatgatgaagacgatgaagacggggaagacaatctagaagacattgaagaggacgaggattattgggatgaagagagaaggtatagggaatatgcggtatctagtttagtcttctaa

SEQ ID NO: 1060 - DNA, 888 bp, Pichia pastoris
atgcaaagatcactaagattaatggcaattagagctaactcgccctctttgcttcgtgcttcagtgtgcatggccccaagaatggtttcggccccagctaccagatatttctctgtttctcctatgaagtttaacgcaaagaaggatgaggctcctaatgctaaggaggaatctaccgagtcacccgagaaggatgcttcttctgagctcagtgaggttgaacaacttaaagccaagttggcagaaaaagaccaagaagtcacccttttaaaggaccgctacttgagatcagttgcggatttccgcaaccttcaggagactaccaaaagagaaatccaaaaggcaagggactttgctctccaaaagtttgccagagaccttttagaatctttggacaactttgggcatgcattgagtgctgtcaaggacgagacccttgctgctaacaaggaggtgtctcaattgtacgacggtgttgagatgaccaagaacatcttcgagaagacattggtgagacacggaatcaataaaattgaccctgtggatgagaggtttgatcccaacagacacgaggcaacatttgaagttcctcaaccagacaaagagccaggaactgtcttccacgtccagcaaccaggttacgaattgaatggaagagtccttagagctgccaaagttggagttgtcaagggtggaaccgagaacttaaacagtgataaagacaggaggaatacactattaatagtagacattccatcaacaaacaaaggattcaaaggagcttatcaggaacgcccatcccccatttttgtgtcgttaaatagcccaattttcctcacaaagaaacaacaagagcaaagtctagctgatcaagtccatacagactag

SEQ ID NO: 1061 - DNA, 606 bp, Pichia pastoris
atgcatagacagttcccccttgtagatctcaccccctactcactcactttctgccctccgcctggccaccagttttccccgtctaacaccatgccactaacagaagaacaaaaagcaaggtttcaggactttctgcaagacagcctggaattctatgtttcgaaagctttgaagcttcagccaactatacgatactacgtactagcgttggactgtaacatccaagaaaactgtgaaatttgcaccgctttgaatgacccaaaatcttttcaggacacagctgaaaaatactacgcagacagagacccagagtacttgaggacagaaataaaatacaacagtggcgatttcaacaatagttctgcaaggattgaggcactcgaccttttccccaaccaaatactggaagacagtcaatgccagtctattttgaatgaattattgaagcagatggtgatctttatggaaaatccaaaatcgagctaccattcgatccctaaaacggataactttaaagtcattgtctatgaccacgaccaggacccctccgtcgcctttcaagcccagcataaactgtaccccaaaccggaattttatctaggctaa

SEQ ID NO: 1062 - DNA, 1404 bp, Pichia pastoris
atgaaacccaaaccggtcacattgccgaaaaggaaacagtttcctatcaccacagagttcaaaacacgtctacagttactatcaaatggacagcagcaaaataccgtaaagaactttgatatcaatgccctattcccctccacatggagccctgtacctatcgatttacctaaaactgccccacagttgatagaaacaataggaaccccgatctacaagtgcagaacagactacaggatactgatcaacaacctcctatctgtatattcagaaagcagtccaaagttatccaggtatcatgattttctttacgaaaaagtatcatacgacactgaattgccttccagtacccctatagaaacacacaaattagccctggatcctttatttgaagagcgcaactttgaaggaatcatatcatatcttcacaacatcaaaagcgaaccgaattctgatttgtacatctatttgatggacagattttttcaaatttcaaggtacaaatactatagggccactattcaaagcatcttctacaaccaccgtcaaatagattcacttctttacgctcaaaattttgctatccggcccaatgatgatctcataagcaagtacctactattttgcatcaataacaaatataaacgaacgtacttgcacaccctacaactactaaactatctgaaaccactgaagaataactaccagaaatacaacagccacccttggttcatgccctccgaagttgaccctccttctaaattacatccttatcccatgtctgaatatcaattaaatctagtcacaaaaatcatcttccatcaacggtccaagtcaattaatatgagctatcttctgaataatgctccctttcaagaagaaacgatgacgctgatggatccaaaggcccttttttgtgacagagacctgtatcgggtggcactaaggggttgcatcaggttcagacaatttgacattttcaaattactccttcaaaacctcatcttcaacagtgtgatctacacagattctgagactcagatatctgaattgaaaatctgtgtcagcgatcaagagattccagatacaatgaaggcagtttataatgccaaaactgtccaagatatcaacctaatttttgacaagactgtcttgaagatgattctggattttgctctcctgaccaaagatgagaaggtgtttgagtggtgctggaccgtctttaaagattcctatttgagcaacatgaacatattcaaggagtcactgaaagcagaggtttttgataactacgtcattcaaaggatatatgaaatatccaaggtcttttcaatggataacacagtttaccacgatcttaacctttactttgacatgcaatatataaccaatctttctacatag

SEQ ID NO: 1063 - DNA, 390 bp, Pichia pastoris
atgaaatttcttaccactaacttcgttcgttgtgcgataaaatcttgcgatggtgctgtaaactcttttccactgaagtattcggaaatcgagcttgttcaagaggaacaagactttcaaccagagttcattctgggtattcttcccaggttggattggccagctatactaaaggttgccgcagatctagggaacacctcgcttccctctcagctaccagaaatagacatcaacgatccttccaatgagatccttttgaaagatctccacacccttctgatcgaaacccaactggtgcaaggtaaaatgatctgcgaaaactgcaaccacgtttaccacatcaaagattccattccaaatttcctgctgccgccacatttggctaattga

SEQ ID NO: 1064 - DNA, 534 bp, Pichia pastoris
atgtcgtacaacggtataggcttgcaaagcgctaaagggtctagcactagcgggtatgtgcaaagaagcattgcagatcgctccggaaaacgtggtggtgaatttttgagaagaaaacaacaacaggaaaactacaagagagcttatgagattacagaaaggaaaacgagattcacagcagacaaggcgattcttgcccacgataagaagcgtcaagtcgaagtcaagtgcatggatttgagagagcaactagaggacaatgacgaagatctgagcgactctgagattgataagagagttgacgcactgagatcatcattattgcaagaagttgataagacttctgttgaagcggacatacgtaatatcagtaaagctgatcacagtaagcaggttagaaatgaaaggtttagagaagctgtttctaataactcaaggcaagatcagccattaggaccaaggcggagaagcgcctctcctgatgaggccaaacaattcttgcaaaacttgaaaataaacagatcaatgtactag

SEQ ID NO: 1065 - DNA, 1533 bp, Pichia pastoris
atgactgaccctaagcaactgatctccttaatgaagagtaccagtactaatacgaggctaggccgagccgaaaagtacacccattgctctgcatgtcgccgtccccgagctctcaaagttacagatgaaaaggagatcacaatgtatgatttcaaaacatgtgataagtgcagggctaaaaacaaagtgtatagactgaactccttttacataaacagaatgtacgaagatgaaaagactgccaatcccaacccacagaaatatgatgacagggtgcgtgggaattatagaagtaaagagttcgttttttccgatagtgaggattctgacgtcacggctgtatcagcccgtacaaagcggacaacgaaatcccaagcgataagaagaacgtatttacacgaaagtatcaaacataacgaagaaatatcaagtctcgataggcttctagaactgctttactgcaataaagaacaggatgtcatcaaactgagagttagtatcatggtacccattcatttggctccttgcatggacgatataaaagtgatgaagctaatgaaactagtttcggaaaatgatgataaagatgcgaagagaaaaatagagctggcgggaccagagatacaaaagtttcggaataatctgaagcaggccatcctcattcattatatagacagaatacttcttgtgttgagatcaattggttacgtatttactttgaggagttctcgtttcaatggtccccgtttggaactccagttacgctgtttcaatgaccttcctagaggcaataggatcaaaagagaacgtcctaagttaaacaagtacttgaaaaagcagatgataaggaaccagtcatcggcagtggaaggaaaacagggaagaagagacaagaaaaacaaattttccgatcttatcaactctataccagcttttgacccttataaactttcatcagtgaaacgtgcctacagaagattagaggcagcttaccgaataaaaaacgaacgtgttaaattcttcgagtgtgagtcgaagctagaagtatcaatgaaccctgaatctggagagctatccgtatttttcacccataaacaccattccacattagataacattgatgtcccaattgtattccgaggaagtccttcatcgttgaaactgcggcggttgagagacttcgataagatttatcatttagatgaagacgacagtgatatcaattcctctagaagctcttccaccacttcgaacagttctgatgatagcattgatgactctgactctgaggacaaggacgtttcagaatcatcttccggtccaggcttttctgatatgaaacctgaaagcaaacctcaagagagcattcgatcaagcacgaaatcaaagttgagagcaaagaaatctggcattaaatttaactcaactgcacattttagttctagttcaagttctagttcaagttctagttcaagttcaagttcaagttcaagctcaagttcaaattctagctcgagcttgtcttctgattag

SEQ ID NO: 1066 - DNA, 531 bp, Pichia pastoris
atgtcccataaagactccaaaatgaaagatgccgacaaacacaaacctggtgaaacgcacaccaaacttcgcagcaagtctttatcaatgagaagagaatcttgtgacatccccacagagagtgacttcaagtttaaacgtcgtccttcgttaccaacatccccgtggggtcgccggagatcgtttttgtcgacttcaatgatgtctaatgaaacgcactctgtatacgaagtgtcatattgctttaaccaacctcctacgtttataatgggacttcaagaaagccagggatttgtgtggaatcaagatctatttgcttctcagcatcagcaagccaaatctgtaagattgaacagaattttgcgtcgccattctagtacgggccataacgttgtcaattccagaatttccccatgcgtgccgttggatgaagatccttttgaagaaagtgatcatgaagggattagggtgtcagaggtcgtcataaacaacgaatctagcgactcggaaaacgaagcaacagctacttaa

SEQ ID NO: 1067 - DNA, 684 bp, Pichia pastoris
atggatatcgacgatattctcaaagcatttgaccaagaaacttcaagaccacaacgatcacaaagtaaactctaccgccaggactatgaatcgctcaagaaagcatggataaatgaaaggacttcgcctgaattattgcattacgaagtagatctcatggaacgtgtactgaagcgaatccgacaacagatggaattcatagaactaaactccatagaattgcaaagctcggaggaaaaagatatcaagttattgttagtcataatagaaagtgaattagatagagtcaacttcgtggttcgaagttacttgaggactcgattagataaaattgacaaatttaccatttacatccataatgaggagcaagagttgaagaaactatcccctgaagaaacggaatatatgaataggcatttggagatcctggtagagctgtacaataagcaatttctcagtaaactgcccgaatctttacacacacttgacgataccagcggagggatatccatgatagaaagtccggagttgtccaagagcgtgtttatcagagtgttgaaggatattgagataccaattgttattggaggcgaagagattgatatgaagcaagatgagatttacgtgctgagttataggttagtcaaggaccttattcaagcagaagaagttgcccttatatga

SEQ ID NO: 1068 - DNA, 1515 bp, Pichia pastoris
atgccttacacagaacaatgctctcgctcgaatcatctaaatttactaaaccaccatgcgaaccaagttgatcggtttatccccaacctggttagtaacgtcaactttcatggattaactgactctcacgttgatgataagttcatcacggaggaattagagcccggatttttagatcgtcctcctcacttttccagcttgaggcctcaaactccaccactcccgacaattaggtcgcctgccaccagtgatccacccactccaatatctgatatctcttcagctgttagcaaaaaaggttttgagaacaaggaggtagctcaagccttggatatgagcagtaatactagggtctatggttttcaacataaaactcctcccggttcaagatcaccagttgcgagcttgaaggattgcatgtcccaagtaacacaccataaacaaacagttaagcaggcaaaaaagttccctcagataactaatccgttccgagttttggatgctccaggattgcgtaatgacttttatgccaacctaatctcttggtctaaggttaccaacaagattgctgttggccttgataaggttttcatttgggccgatgatggccaggtcgctcctttgagaagtctcttgacagaagctataacttgtgtttcatatgctccttgcactacatttctagctgtaggaactaaagctggcaggctgtatctctatgataacgcaagtttaatctgctcaaccgtgaccaaaccaaatacaagtgtatgctgtatccagtggaccaacactgggaaagaattatttattggagatgacactggaaatgttctatattatgagattaaacaaacatattgcagttatgatttggtgatgaaaaattcctggaactgccaccaacaacagatttgcggcattgcattaaacgcagacaatacccagattacagtcggggcaaatgataattgttgcacagtttgggatattgaggatatcaggacaccaaagttaaagttcatgttaccacattttgcagccgttaaagccatagcttattgtccatgggccccttctcttttagcaactggagctgggtcaaaagatagaatgatcagattttggcattctaactcagggactttgctggatgcgtataacaccaagggccaaatcacttctataatttggtctgtatcttccaagcagttactggtttcgtttggcttcacggacttctctagtcccttactcatgagcgtctactcatatccaaaaatggatatcttgattaatgtcccggctacttgcgatctaagagttctctcagcagtaccatctcccgatgggaagtcagtatgcgttgtagccaatgatgaaacggttagattttaccacatatggggatctaaatacagtctaactttgagctcacaaactgagggagtatttggaagtaccttactggaattagctgaaggtgtcgggactagaacagataatctgagatag

SEQ ID NO: 1069 - DNA, 585 bp, Pichia pastoris
atgtccgatcttcaagagactgtgtccttaatcaggtcgactatagagaattttcagatcgaaccggacgtgcaaactatcaaccaaattaatgaaaatctttctctgttgagctccaaacggaaacttaaactcgatcaccagctagatttgttgtcacgtatcagtaaacagagagacgaacttaaagagttcaacaagcaattattggaaacagaagaccgtcaacagaccctaaagagtatcgaagagcttgaacacgaaaaatttaaattagcaaaatcaataacagatctggagatgaacatgaatcaccttcagaattcaatctctagtttgacccagaatctcaacgaattagaagagcaagaaaaagcagtgatatcgaatgatctacaagaaaactacgattcgacagtgttaagactcaagcttttcaagagcatggggttgatgatagatacatctaaggataaagatcagattataatctacaataaagataaaggtgttagtgatatactgccggtggaggaaaattatagtgatttttttgtgagcaactatgtgtgggataatctatga

SEQ ID NO: 1070 - DNA, 969 bp, Pichia pastoris
atgtcgaatagcaaaactgaactctttcaggatttgaatgtccccaaagagttgaggcagcccaaacaaggatcagttgccaatacgaaggttaggatgattctcgacacctttaatggaaggctacttgagttgtcattccgtcctattgtcatacctctacgattggtattttctggcacttttatgtatcctcttttaggagtcacttactttatcagccatcctgttctatggtcatatctattctcgttgatactccctcagttgattatgacatttatcgtttatgtcatagttttcatagccatttatccattgcaagccgtcttttcatttttcttcaatgggccaattggtttgataacggccatatttgctgttctacaaataggagcattgatatccaactggatggttacgtggcttattttaccagtgcctttgaacatgatgtttgatgcaatactcacaaatgaaggattggatgaaatagtactgaggggcaaacttcgtcggatagtgagaccaagtttccctgtcagagtccgtaaagccatctggacagtgcccattcaaatattgtttcccatatggctatacaggtctttgttgatagtcggactgaattttataccagtcataggtcccatattggtcgtaattatccaggcgccctccaagggttataaatctcaccaaagatattttgacttgaagggattagacacgagacagatcaatgcagttatcagaagcaaaaaaggtgagtatctagggttcggattagtagcagggttactggaaacgataccatttctgagtatgtttttcatcttttctaatatgacaggagcatcattatgggcagttagcttggaaaatcgtatagccaaggaacaatatattgggaatacaagagcactggggaaggctagagggagagctttaatcaatgcaatcgattag

SEQ ID NO: 1071 - DNA, 1386 bp, Pichia pastoris
atgctcttcattcacgctactttggtcaccgtcaatgcgaaccgtgatattattgaggacggggccatcctggtggacggacagttcattcttgacatgggtaaatccgccgatcttatctctaggcataacggtcaagagacaatcgatttgaagggtcagattgtgatgccaggcctgatatctttgcacgttcatcttgctcaatctcttctccgcactgcgggagacgatttacctcttatcgattggctctgtgacagagtgtggaaaatgcagggatgcttcaccgaagaagatggttatgtggcttccaaactgaccattgccgaaatgctaaagtctgggaccactaccttcgttgaagctctttttgctgaaagatacggattcgaaggcgccgtcacggctgtcgccgaatctggtatcagaggctgcgtggggaaagtcgtcatggaccaacctagatacgcaacccaggagggtataagcatgcacgaaggcctcattgaagacgaaacttctctggaaagagcggtccaaatgtttgaccgcttcaatggctctgctgaaggcagggtggaggtctggttcggtgccagaacccccggcggcgtcaccgaagatctttatcgtcgaatggtgaaggtgtccgaggaaaagggtattggaatcacaatgcactgcgccgaaatcgaagcagacagggtattctttgcctccaagggccacactcccatgagttattgcaaagacctggggcttctaaaatctcgtaccgttttggcccacatggtccatttagacgacggcgatatcgagattctaaaaaatacgggggcttccgtggctcactgcccagcctccaacgccaaattgggttctggaattgctagagttaaagaactagtagaatcaggaattccagtaggtctaggttgcgacggatgtccctgtaataacactatggacttattacaagaaatgaagttggcttctctgttaccaaaagcggttcacaaaaacccaaccattcttccggccgaacaaatagtggaaatggcaacgattgtcggagcgagagcaatcggtaaagaagaccagttaggttcattggagattggcaaaaaagctgacttcatctccatcaacctggccaacaagttatatgcccaacccatgagagacccagtttcaatgatagtctacattgctactggtaatgatgttgagaatgtgatcattgatggtagactggtggtcaaagacaaggagttgttgaccttggatgaagaagcaatcattagagaggcaaatgtgcatggtgaatcagtcagacagagagctaaatgcatggggggatacagtcgttggaacacaatgtaa

SEQ ID NO: 1072 - DNA, 2055 bp, Pichia pastoris
atggccaagagacataaaaatatggccaaaagggctgccgctgcccggctagagaagaaaaagggcaaaggctccagtttcggcaagaagaagagtgacggtcaaaggaaaaagtctcactctttgggaggcgatgactccgatgcagagttcgaagagctctacaacgtcaatagggcttcacaaagacccagcaagaataaaactttggccaatgctgccaaaaggggtaagagaccccgaatgattgatgaagtgggatttaccaatagaaatattgccgatactatgaagaagcagttgaggaataatccaattgaatttgtcaagagtaaggatgtttttgatccttcagcagatttgataaagagattgaacgagagcaagaagaaaaaagaggcactagaggagaggttagaccaagaaaatgatgaaatttatgtggaagatttcgaaacggttaatgagtcagaagttatcagatctgatgaggaggatgaggaggatgaggaggaggaagacgagcaggaaagggaactggtggaaagcaatgaggaggagcagtctgaaacgtttcaagaaagtaacaaagaaactgattctagctcagctctggaagaatcggattctccagcatccgaagaacctctattttatgtggatgacactccgaatataggcgattggccaaaacagaccattgttcctccatcacagctacccaatcctccatctccattatccatcgacgttcaacgttttgatgaggacgattcgtctgacgaccaatatgtcaccgttggaaatgtcatgatgaaggtaaatatggatgatggagaaatgtacgtcaatgccccatccggattactggagcagtctgaaaatgaagtagaagaatctgatccagaagaaaaagtttttatatcacaagctcccaaagcaacgcagaaagaagataaacccaaaacaaagtcttcaccgtcatacccagagtttggatttctcgccgaagactacgatatgtttgatgtttcaaccatcgttgtatccaatattcggcaaagttacaaaagcactcaatatgaagttcaatccgaaagattactaggtataagtcaagctcaatggttagaagaagattttttggttgatatgttgatcgagtatggattgctggatcatcgtgttgatgcctatttagactacatcaagaaaccatttttgaaagaactctctcctgaacctgactatccaattgatgattctgatgacgaagacagtgaggatgattttgaaatggagaacattgaggatttggttgctctgcaaaagaacaaaatgatgaatgacgtcggatttgagaccgacatgtttacacaaactatacagtttagaggaaaaggtaaaaacagaaggccaatccttgatcatattcacgatgaagatttgaaactagaactgctggagaaatttggactccaaaacagcaaaccagcaagacaaaagggtaaaaaggctgagggtttgtgtgaaaagtatccccacttgttgcatatcaatgagatcaaagaagaatttgaacatttttatcatgacagcagcatgacaacattgcgtttccctcctttggatccccatggcataaggacacttctcaaactggcagatcattaccagatgaaaggccgtaaattccttaaaggaaagcggcagcatgtcacagtcataaagacaaaacggacaaattatctaagccccgagtacgacatgatcggcagacttctcaggcaacgaagggtctttaacagaatcgatgtcagcaagaaagatttctcggaggacaaactgataaaaagtggttcaaaatcacacgttaaggaaggagagattgttgggtccagggctcccgaaattggacaagataatattggtagaaggatgctggagaagttaggatggagcaaaggtgaaggtttaggtttggacagtaggggagtcactgagccaatcctggccaaaatcaaaaagtctaggttgggattgagaaaagaatga

SEQ ID NO: 1073 - DNA, 1392 bp, Pichia pastoris
atgcttctgttcagcactcttgtcaaggtagccgtgatagtcagtcatgttattacttttttcctcttacagacctcagacaacttttctctcagtcacttgatcagtggaccacgcctatccctttcactaggcggaaatgacgatcaattgagtctcaaagattcaaacctgaaaaacgaaattcgtttgtctgattacgggcaactgctctatgacactcaggataaccaggacgtcttctctcaagccaaaacgtgcagtcgcgtggggtcaatctatgttccagctgctactcctaaggtcctgaatcttgtacccaacgtcacaatacaagagccgattttaccttcaaaatcgtctccaatttggattgcgggtctgatggttttgagtagtgtggggtttgtaatgtcgatttgcgagatgtaccaggaaaacctaaagtttttactagtcaaatggttgccgttgcttgattctaacgtttccaggattcgtaggaaaacagtcaggttaatcccgtcattactaaacctgtttgcactccaagatatctctaaatctccagaaacacccaaaacagttacaaaagcaccgactacgcacctggtttctgttgaaaagcctcctgatcacctttctccgtctccctctcctttcccctctccctctcaccctttatctgcaagttttgaacggcgtctgactgccacacccaagtcaatatccccgcccaaggcacttgttaacctgattaggaaagacatcccagacaatcaatttatgaacaaaatgctgtatcaggcagtagcagaagtctccaaggccctaaatatggtcaagacatttcaggatcacggaccacacaattccaaactgttctctgatatgaacgatcagcttgaatcaaacatcagacgaagctccctggttttcgaccaactacgatttcactacttaaacgcactttccaagaaaaagcgatcaggagtaatgtacctcctgaaacaaaaagaaaggggtttcaaagctaaaaatagcaagcagaccctgagtatacctcccaatggcactgatgaaccactagagtacaagatatccaagatcatccagcgaatcatcaggattcatatccgtttgatgtcacaattctggtacctacaaacgactaaacaaacgaaatatcaacaacgatttgtgtttcaaaccttggataacgagagttatggagcagatgtcgtcaggtttatattaaatagcaggcatttatgccaggagatgattgacctggatttaagcgaatatcgccaatcaagcgcgggccgcggcaagtcagatcattatcaaataaacccggccgagggctcttccatggagtggaaaaagtga

SEQ ID NO: 1074 - DNA, 300 bp, Pichia pastoris
atgaataattgtgaattaactcttacggttgcatgtctagaccaaggactgtggctgggggagagagctcaggcagcaatagttggagcaataattgaaaagcttagacatttctttcagttcaagacatccacaagtttcctaaggttccatacgagcgatgtcaaatttctcaattgcaacatggttcctgttgtatatcaaacgacttcctttgaaaaacttgccaagatctcaaaaaagttggttgatctccaatcaggtcgtctaagagatccgatcccgctgacccccttctga

SEQ ID NO: 1075 - DNA, 687 bp, Pichia pastoris
atggccccaacaacaactttcattcaaatttccccgggaaaagttcttccactccggatctttataaaccgactctccgtgtatgagaaccaacaggttatccatgaaactgccatagctacagagaacgtcttgaacacacctcaaaggccgactaagtctctgttgagactggtaaacgccgttcatgtgaagctgtcgaatagagatttaagccgttttctggagttattcctggacactttactggtaaagatactggataccccgttggatcttctctttgctgaaaaattggaaagctccgaactggaagagtacttcttgccccaggataagggaaacatgcttttagagctaaaaaaagaagaatgggtatgtcatgttcatttcgactcggaagagctggcaaaagtcagagatattgtgaaaaatggtggggatccgggcaccaatggtgctttcgaatacactcaactgctaacgcggtcacaggaattgcaaaaccctcctgaaatactggaagagcccaaagaggattctgaactactgctcttagagccacaagaatcacaagatactaagaagatggcaataagcacacattatctccccaacacaatcataggcccacccgttgacatctacattgtttctaaaggaaaacacggcaaagaaaaaatgtaa

SEQ ID NO: 1076 - DNA, 1527 bp, Pichia pastoris
atgcttagacgagtagcccgctgcactatgggcggtggccatttgtctagcaggtattttttcaggagtttgaacgtccagatgggcactcaatcaagcatcgtgcatttgaaacaatcggcccaagactacatcaatttgttttcctcgcccaacagctctgttctgcaactttctacggtcgacagttccgggatcagccagctgctagtgaatttgctggtattagaggagtatgatttgtctgatcggctgtccaaagcggtgtttcaaagtgatttttatcagctggacaacgactcgcttttattattgataaagatcattgaaaaatacgaaagaccgttgcagcagaaactggaattgttcaagcatattctgtccaaactgtcagaacagtcaggggctgatattgacgcggaattgaacgtccagcaggaacttttgaacacaactacaagattaatagaggaggaagaagccttaggcctagaactaacaaactttctgctagctctccctagaacgtcattgatatccagtgttttgttgcacgcactaaccattcaaaaccattatagacacgcattcattttgattgataactgcattcatgagaatgtgcccttgaaccgatttacattggacaactattgttatcatgtagcccgtcaggggcttttggatcccctcgtttacatgataagattaattgaaggcacatcatatctacggattaactcccagctaataaggctgcttttgacccaggctctagagcacggtagaatcgatttggtggagaagtggtggctaaaatatatagtccgatctcgaaggtctgtcttcctgggcgaaaatgtgctcaagaacattgtctatctggcatctgaatacggagccaacaagcttatcatacgggtgaaaaggtttctccatttacaaaatcctgtccttctagcctcgtacgattggagaaggttattaggtatatccctcttcgaggcagatatgctacgttgtggcacgactagtgccaattatctcttctacaagcttgaactcaacaatatgaacatccgtgcagttgaacttcccaatctgcaaacacagttagcaagcacagatatcctggatgattccacaaagattgccaacctaatctacaattccaagagagaagaaatatgtcgaccgttactactgagtctcgtcatcgcactaataaaccagcataaaggcggtgccgcgttggacttgcttgaccagtggtacgcacactccaaagacgttgagaaagacgaggaagtctgtttctatcatctcagagcactcttatcagttggagataaggatagagttatggagtgtctcgaaacacagttcaataatgttacactaagtcctagactttactacttgatctctgccgaattggaaggctctccagttgagtttcatttgcagaggttgaaggatcgagcagccaaggattccacttgggtacagacggcttccatagggtga

SEQ ID NO: 1077 - DNA, 426 bp, Pichia pastoris
atgaatagcagtgattcggactactgtattataatcccaccctcagttcaacctccacagtttgttacgctgatttacggcacgttcaccgctttcaccaccgatgctgatagaagtacaatcgccgttatgacattgccaatgtatgcttcggtcgacacccatgtaccaacagttgaattgagtacacttcaaacagtagtggagtcatcgggttctgagttggcagctgtagccgaaagcattgccttatccgacaatgaggcccaaagtacatctgacaccgtttcccgacccccttcaacggtttctttgcaaactggagaagcaaataccctgagatggtcagctttttttggagtagtttcattgcttaacttgctcttcatttatagagggagggtccttttttcactgttcctttaa

SEQ ID NO: 1078 - DNA, 1245 bp, Pichia pastoris
atgtttcaaccactcgagcaagaacaacaactggatttgttgtttgccatgcctccggagaacatttttaactctgactcttctgcacttaccttttccaatacttttcaaaccagttcagttcactcggtcacaggtgttgacagcccttcacttgttaatattaatatcccaaaatcagaatcgttctttatggactcaatgacgggtgcatcttttggacaaacttttcaagacctattcccagcgtttcctttgctaaaacttcctaccatggtagcacctccaacttcgttgaagatggtcatggaccgtaaacggcgacagtcccaaataacacagcagaataccactgaaaatctcaattcctttcatggcatgaatatgccggtaccagcgttccttgaatactcggccttcccgctggttcgtggcttttgctctggaggaaaaataaagccgcctaagaaccaactagttcctggaactgagtacgtcaatgtctgcttggagttgctcaacgtcaactatgaaggcatttgtttacctaaatggaatgagaaagaacttgaggaaagtagaaggattgttcgagtagagaaaagacgtcagtataataaaattgaggctgccttttcaatagttgattctgttcaagaaaatccacaaaccaatattgcagttgaccctaacgttgatgtgctggagttttcgtgtttattgtgtccaatcaaagaacacaactcagaagtagcgcaaaccgtccctacaagctcttcaagtgaagaacacaagtacagcgagctagcaggacacgactttgaagaaaatttgagctgtggtagtgataaagaaattgagacttctgttagatttgaatactacatcaccagtgttgaagtcattaggattatagagtttttaacggaaaatcatctaatccaagatatccaggcgaaaagaagagaaagaagctgtctaagatcaaatttagtgcgattctggtccaaagatatagttccatcgtccacaagtaccatgagcaagggttctaagccatctcgggaaaacgattgtattgaagagttggcccaacgtatcagggcttataaggtgcggaaacctctaatagtcgataaaagcctaagaattctggaatggtccaaacttggaccagctttggagcgggctcttcaaagttattacgtagcgttaccattggataaaattaaaacaaagttatga

SEQ ID NO: 1079 - DNA, 207 bp, Pichia pastoris
atgtgggttgctgggcacgatctaagtatgcgtttgaaatacgcagtacctttccctaaacgcatacattacgtcatgtccgcatgttttctgcatgattatagttcgctttcgtgcaacaatatacgccgtaaaaagcgatacggtttggagtttgatgtcttttttttagcatcttcggatcaccaatccgaactgtgcatttga

SEQ ID NO: 1080 - DNA, 756 bp, Pichia pastoris
atgaacttgatatcccctctattgctggttatagctctagcctatgccgaagacccagtctataaggcagacagtcttcttgaacatgccatgttccaaagtggcgagaaccttggacttcaactgggctctcctgccagtgtagtaactgtttatgtgactcgtactgaaacacttactgttaccgaggctccctggactactactacgagctccttaagtcatcacacaaaaactgaagactctaccttaacttggtcccttgaatcacctctgagttcagttaaaaactcaactgattgccctgaagaccaaccaaagactttagttggatctactaccggacaatggattgaaaccacaactccttatcccactcattctagtgaacatcttatttccagtaaaactggttactctaccgatcttacatctacttattccagtattcactcaactgaacctccttcattgtctcacccaaaaaagacatacactgaggagacctttactgaaactcatactagccatggatcatattcttcagcttcatcttctatatataagaatgaccaagtccccaagaattctacagctccatggtcttaccaggtgcgtcctacacccgttgttgtagacgaggacttcccagatctcttagatgtgcccaactcagctaatccaccaacttcctttagattggtttctctgctaggactaccgttgattctggcaattggtcttttaaccctttag

SEQ ID NO: 1081 - DNA, 795 bp, Pichia pastoris
atgagtttctcatctaaggtcgtcttagtgctggctgattattacgccagcttattcagtgtggcattactgattggcattatcagtgtaatttctgctaagtttatccctgaactgaacggcttgctgaaatatggtaagacgttggatgtcggttctgtaactaaatggaaatggttatacgtaccaaaaagttggttcttgcatttttacattctagattttacgtgggcacttattggactgctccttgttggagtgaatagctccaggtcatcaattatacttatattcaattttctccagtcactaagaagaatatacgagtgtgcatatgtaagcaagtttgcagagtattcaaagattcatttgtcacactatttggctggaattgtgttctatacaattgctaatctgcaggttattgttccccatatttttaccaatgttcctggtgattctgaaactgttgttcctcagtggagtctgttcctggcctcctccctattcataatgggtactatagaccagtttttcaaccattgtcacttggcaaacttgaaaaagtacaccgctccaagcttcgggttattcagatacgtcgtatgtgcccattacttcgatgagattttaatatatctagcggaatacgtgattttacaggattccacgagttttcttattatactatgggtcattgttaacttgggagcatcagcatgcgagactagaaaattctatatggaaaagaggtctatagtcggccctttcatcatgattccactggtatggtaa

SEQ ID NO: 1082 - DNA, 558 bp, Pichia pastoris
atggcagatgttttacattttttcattgacatcagttctttccttcatttccgtaaacctggccccaccgagcatactaacatacaatctagtcgtggttacagatctggtactcgttacgctttctcgcgtgacttcaagaagcatggagccgtccccatgtctacttacctgagactttacaagattggtgattacgttgacatcaaggccaacggtgccatccaaaagggtatgcctcacaagttttaccacggtaagaccggtgttgttttcaacgtcaccaagacttccgttagtgttttgattaacaaggttgttggtaacagatacattgagaagaaggtcaacctgagagttgagcacgtcaagccatccaagtgtcgtgaggagttcttgaacagagtcaaggaacaccaaaagaacgttgctgatgctaaggaatctggcaagtctgttgctttcccaaagagacaaccagttggtccaagaccatctcatgttgtttctggtgagccaatcaccctggccccagttgcttacgagactttcatctaa

SEQ ID NO: 1083 - DNA, 2067 bp, Pichia pastoris
atgggcccggatagcgagaagaccagcaagtatttggaagtcagatctcgactgatagacaaattggttgaattcaatcaagaagctttgaaggaggagatagacaaacccagaattgccattttaaagaagaaagtcaacgagctcttgaaaggtggtgttgtgatagaaaagtatgggctggactcttatcaaactcaaaaagtgcttgaaatcgtactgaacgtcttcaatggacgtgtttttgacaagaacacgaaattgaagcttataaaccaatggttgttcacgtatgaaacgatagaagagagtagcatcatccagattttctcgtgtttaggcgtaaagtcatattttgttcaagaggaaaaacttcacattgacattcaggcagcactgttgaattgggctcttctgaatcattttcaatgggaaacctacgatcaaacagtcaagctgatgaatctattgatacactacttggcatacaaatttgtcagaagaagcctagtattgatcattcttttgagcaaaaacaaagtgtttggggcccaagtgagtttttcaagcttgaaattgtgtctaactcttctggacaaagatccagatgaccttagcttgcaattgttgataatgatgagtagtgacttttccgtttctatcacacgagaccaaatgaaaactataatttctacagactcaaagaccattaaacattgggaatctgttattaacgttcgaaagttgtatcagagtggatccaataagaaagttgctcagagtttgaaacaaaatctcacatttctccagtcaatttggaacttaaccaaggaagaagccgttcctgcagatcaattgacacattctatagggattttgaaaagccaaagcgcacatcatggttacagcgcagaaacagctccagatgtaattgagcttttgtttgcgttgaatgtgagttctcctgatctacaagtatcacccatcatatactcattcttcaaggaacataatgttgaggaagattcttcagagactgaagagttgaagtttcttgtatcaaagttaatgaaagtccctgatgatttacttcaaaaactgagtgtttggctggaatatgccttgatctccaacaatggacaattggatccacaatccaaaatgatactgacagagttgttccccaaattattaataattctgcgatacgatcaaagattttatctacctgttgtcaaaaaagttttatttggccagctagggctttctgttgttggtgtagtacctgtctggaagtggtttccatacatggaagcagtatcagccaaggagttcaaagatgagtttctggaaaagcattcgcctgattatcaatggctccagccgttagcttattcttcttggaatgatgaaaccatctccgcaatggtaatagaaaaaatgctagacatcatatttcagtacaacgaacacaccgcggagagatacttccgtctcttcaaactctcccaattcattctccaagcgcaagggtcccgaaacattgttattcccccggtattgatgtacgagctgctattttcaaccaatagcctactcgtggaccagtgttgtcatctcgttgtgcgggccaaaaactactacaatacacatgaattagatccatttaaacaactaaacaatgcatacgtaatggacatttgcaatcttctttggagacacagagggttctctattgaccaaacggcgagaggggctttccttccgcctgaattcaaacagaagctatcgaccatacaattttaccagcaagagctagaacaggaattcaacctgttcttccatccgagtcttctaggaatagtcacaaggctggtaaaagccagcagtgactcaaaatacacaggaatagtaaggaaacaacaatatgaagagcaaggacttgagggcttcgacgctttcagaatcgagctattgaacggtttagatttggcaggctttgaagggatttcaaatttattatttacttcgttgaagagcttattgggccatcgaatgaagagttga

SEQ ID NO: 1084 - DNA, 687 bp, Pichia pastoris
atgattgagaatgtcaaccctggatctcgtctcaaaagcactggctcgtcccaggtctgcacgcccaacaggagctctcgtcctcattatgccatgcctactctttcctcgttgcggaaatctggtcaacctgctactccgcaatctgttgaagggaccctgttttcagggcaaatatcgtgtaatcttgacgctttgttcaacaatcccttggaagactcggagttgaacaaaaagaaaccacggacaaccttcaaaggccctgctaagctgcgaccctccaagaggccaagttctacaagctcggaagaagatctgtttgaagatgccgctagatatttattccacagtacgatagagaaactacagaacaaagaaaatgctgaccttgggaagatcacccctcacaactttcgattacccattcttcaagactatctaccatcttcgggctctgaagtttcctggaaacaagtcgaagacatgtttgactctgatctccaacaggtggataaagccgttccgataccttccaaattgctagaggaaaccaaagagggcaaaagcgtgcctctggaaaaatacgtagagttggtccggacctacgaaaccctccgctcaagttttgttgaaaagattaatcgtgacaagcagttatttcaccgtttcttttcatccgagtgttga

SEQ ID NO: 1085 - DNA, 750 bp, Pichia pastoris
atgactgctatgaaacaaaaacgttctcgggatatcttgaaaccttaccattttgatccttcaattgatgatacaatgctctgctccatgctaccgcctacaacaactgctgaccctgaacaactacaagaaccagagcatgaacagcaacaacataataatccgttcaattgctgtcaggaagtcaaggttaagatggccgatcagcaaaagttatatttgttgcctgagaaacgtactaacaatattttcaattcaaagtctgctatgttcgtgtattgcaacatcccacaaatgagcttggttcagtcgttcctggaccttaacacttctcttcttgccactgacgtcactctagatagaaattcgttttctttagactcgacaattgatataccgtttgaccaatctgttcaagatccatactcttaccggtcaaactctccggaggtagcacctcaatccacagcatgcttctcagtaaattccaatttagcacccgtggaaacattcacaaccttattggaggcagccgtcaattctaaaagacaaatgcttcaatatagacaacaaatcaaaatcaatggtcttaatttttcagaatcaacgttccttgaccattcatgcatactgctggtacgtgggcgtagctttgggggaaattgcagcagacctcccaagacaccattaattcctggaactcgctcggtatgttactgcccatctaagactggagaacaatacaaatga

SEQ ID NO: 1086 - DNA, 264 bp, Pichia pastoris
atgctggatgctgaaagctgcagaataagaaactgcatagctaactcttggcggaattggtcttcggttgttgaagtggccacttttgcatttgaactgataccaactcgtagatacatattgtcacgtttaatccagcttgatgtcctcatttattatgttttcagtgtcactcaatatgcatttaaaagccaaccaccgtgtttccagcatgaagcagaaccatttgccatctgccctccccccctttcggcgttgaaataa

SEQ ID NO: 1087 - DNA, 1923 bp, Pichia pastoris
atgaaatttaatatttttaacaagaatcggaaagagagcccgtcaagttctccggaaagccaaactactgatgaagaagcccacataccagtactccctggtgttgctcgtgcggaaatgcttcgtcatgcttggtcaaaaaagtcccttatagtcgcctacgctgcccttttctttgctgcgtttgtattccagttctgcggagtcaccgttaaatcttacactccatacgccacatcctcgttcagacagcattctatgttaactacggcagcagtcgtttacaagattgtgtgtgtcattacgcttccatttgttgcccgaatagcagactgctttagcagggtgtcagggttctttattgccctaatctttctaatcgctacttacattatgtttgctgcctctaagaacgttggaatgtacttggcttccgaaatcttcttgggcatcggtaaagtttcttatgtcatgatggagaaggtgtttgtggctgataccactcagatcttgaatagaggattgtggaccgctctgccaacagctgttgcttccattcctaccctttacatctcctctattgtggcagagaaagtgttggatcactccacttggagatggggttatggaatgtgggctattattacacctgtttctctagctccattgatctttattatgtggagattggataggaaagcccaaaagtatggtatcacccataacattaaggcctctttaaaccttcctgagggcagttggtacaagaaactggcccacttgttgtatgttgagctggacattgttggaggtttgctgatgcttgctggactctccctcttcttcctgccctttaccctcacaggttctgcatcgattttagattgggatgaagccaccactattgtccttttggttcttggatttgttgttttagggatattcgttttctgggttctctctaaattcccacaaagaccattcattagtgtgagtatattgaaaaatccttcggttctgatggcatgcacattgccactttttgatactattaatagttcgacatcgggggcttactattcctccgtattgcaagtttcaggtcactttacagttggtgaagctgccagaatcaccagagcctcaagagtctgtcaactggtgggttcggtcctggtcggtattttgataaaatacacaaggacagcaaaaatttttatgatttctggaatatctttgattgttattactcagggattcttttgttatctttctgatcacaatggtcaatttggttcagaacttcattggactgtaattcaagtcttcgaaggttttggaagaggtttctacaacattccaacaataatttcagtgcaagctaactcagatccatcacagattgctccatccattgcaatgtttaccatgtttagccaaatgggtgcggtaatcggaaactcgatcgcagcgtcagtttggaacgaacttgtgatcaaaagattgacacagtatcttccagaagggtctaaaagtagtgctacaagtatttttggaagcatcaaggttgcacttggatacaaacaagggactccagaaagggaggctatcgatagggcgtacagggaggttttgcagaaacaaggatacatttcactcgggttccttctaccagctctcattatagtattttttattaaaggttttgatccaacacagagaacatctgtcaatgttgacgacaatggagaagtggtattgaggacagctactggaaagaacggtgaaggaccacagtttcataccatatcttctaacttatcttcttcttcatctgcttctgatctgtcggaagagaaagatggcactagcgccgcttcaaaagagaagaacagtctaagtactgaacctgagcgcaagtaa

SEQ ID NO: 1088 - DNA, 228 bp, Pichia pastoris
atgagagcaaaagcaggggagttttggaaggttaaagcagaagcctgcgatctttctaaattgattgtcgcattacaaaaagccagatccatttttgctagctattgctggttgcccaacatttcaggtatagcaagatcacgttttgttgttggcagatcaattcattgggaatatcaacccaaatacagaaaagtcatgtccatgaatgttgaggccacgatctga

SEQ ID NO: 1089 - DNA, 192 bp, Pichia pastoris
atggtagaacgctccgggctctattttttctctagtcgcttgtcaagtatccaagaggtggagcttattcctgccggaggttgcattgtcgaaatcaaaacttcgttgcaaatttgcagcatcaatttcccgacggactaccattcacatctgatcttagaaatcatcgatgacaccttagatagaatttga

SEQ ID NO: 1090 - DNA, 654 bp, Pichia pastoris
atggggtcatttatctttagtttggcccatttctgcgaaactcatgggccaacagtcgttttgaatacccagcatattgcgactgagcagcatgaaaagctgatatcaagcaattacgatcagcaagcttgtgaatcgtgtaaactacaattacccggtggatcaagtacattaacaagtatagataacgaagtgacatatgtctctactcaataccccacgtcccaggcaaagtactccattcttcggcaggttgccatcaagtgtttatctgttgaatctacttcagagttgtcacctgtgatgtttggggatcccatattaggatttactttagcatgcatattcaagatctctgataacactgctcgtggaggagaaagaagatacagcgtgatgatcgtagcagaagacgaaagtgagttgattcattattggaatataatagctacaaatttcaaagagtggatacactgtatcaaacaaaagagggaacaggtcttatccagacaagctgagcaaggcaataatgaacaatttttcagaagaacacagctatcaaacaaaaacatggtccaattactggaagatcctcaattcttcgtcaaaatgcatgtttgggccagtggagttctaaaacagctggtcaattaa

SEQ ID NO: 1091 - DNA, 171 bp, Pichia pastoris
atgggtaaaactgggaaggcttacataatacgggagttatctgtcaatgtacacaacagtgatgagccttttgtacagttaggccagctacctttgggtaaatcattctccaccggatatattgcaggtggaatttgtgactaccgttctttcacttgccagacgagttaa

SEQ ID NO: 1092 - DNA, 678 bp, Pichia pastoris
atgctaccaacacctttgaccaaagatctagactttgaaaaggtgtatgagccagcagaagactcctttctacttttggacgtctttgagaaagaaaagccgtggttggaaagctacaagtggaactcagatgtccctctcgtggtggaaataggaactggatcgggagttgtaaccacatttgttaatcaacacataatccctcaaggactgtttcttgccactgacttgaaccctcattgctgtaatgctgttttaggcactcataaaaggaatattggaaagaaaggtaatttacaggtgcttcaatgtgatttgacaacgcctttaaggagaaaccaagttgatgtcttgattttcaacccaccctatgttccttcggagacagtaccagaggtagcacgggatccagattccgaagattggttggatattgcactgttaggaggacctacaggtatggatattaccgaaaaggtattggattccttatatgataccctcagtcgaaatggagtggcatacatactcttttgtgcgagaaaccaccccgaaagagttatggaaaattttaaagccaaggagactcagagaggaaatggatgggagattgaatgcgtacaacatcgtaaagctggatgggaagtgttgactgtttggaggtttattcgaaggtag

SEQ ID NO: 1093 - DNA, 975 bp, Pichia pastoris
atgagtggtgctgatgatgggaaagataaaacggatacaacatcgtttgaggctattcttgccggggttaaacgtttaagagaacaagatcaaaataaagatgcaaagcaaggctccgaaaaactcaaaattccgttgaaacggttgcctaaaagatcccttcctacccccaaatccgaccaaatccagaatgttaaaactacagaagatgctgctcccgtatcgtctgctcccgtaacatctactactacaagcaaagtcattcgcatggataataccccttcaaatttagctataagacatcaaaagaaaacaggaaagacaacctttaacagcattcaagtcaacaagtcgcaaaccggtaacccattgctgaaacatttgaagacagtttcttgggaattcagcagcaacatcaagcaggtagactatctagtaaattcccagacatttgttttatttctgtctttgaaataccataagttacatcccgagtatatcatgaataagatcaagtcgatgaatggaaacgatacctcttttaccaacaacaatttgaaactgttgctggtggtcgtcgatatcgactctcatgaggatattttgagagaattaaccaaaacttgcgtcaataacgatcttagtttggtactgtcctggtcctttgaagaagctgcaaattatattgtctacctgaaacaatacgaattgagtgacctatcagagtcaactttgattaataacagcaagcaagactcttcgagttacaacagtcttgtcaaatccgttacctctataagaaatatcactaaaacagatgcggtaaacttgatatctgagtttggaagtttgcgagaattggtaaatgctaatccggagtcaatgtctgcggttcaaggaatgggtgatattaaggtgaatagatgggccagtgttgttgaagaccagttcgtgttaaacaaagagtatacttga

SEQ ID NO: 1094 - DNA, 1191 bp, Pichia pastoris
atgtccattactgctaaactcagtacggtaaatcttaatactgacaaggaagccaaacaggctgccatcaatgacaaaaaaattagatatggtggagatgttgtgcatttttcaccggggaccgacattgttcgagaagatggggttctaactgtttccaaacaggctcaagctgagtctaaatatcctcaatggctgccaacctgggaccccaagctacgtttcgatgacgagcctcgtttcagccacgttgatcgtggtttctttgccgatcccgagctgaaacgattgtttcctcaaggcggagaccataagctcaagaatctcacccctaaactgggaactgaggttgagggagtccaactgtctcaattgaccccagagcagaaggacgatttggcgcttttcgtcgcccagagaggtgtggttgtctttagagaccaagatctgcgagacagacccttggaagagattaaaaagtttggccaatactttggtcctcttcatatccaccagacatcaggcgctccggacggattcccggaatttcacattgtgtacaaaagaccaggcgcctcaaaagcattggagaacaagatcagtgtgcctgcatggcactctgacaccacgtacgagctacagccaccgggaacaactttttcggtgttatcgaaggtccagaagcaggtggagacacactgtttgctaatgcaattgaagcttacgagcgcggctttatcccagggatctatccagagaaagaatttcactcctgagacagttcatcctctagtcagataccatcctgttttgggtaaaagatctatttacgctaataaggtttttggtacaagaattattggccttaaacaggaggaaagtgatctgattcttgacttcattcaattcttcattgctgctgctctggatttgcaggtacgtgcaaactataagccaggcactgttgttgcctgggataacagaactgtttaccactcccctgttttcgactttgattacgatgcaccagtaagacactgtttccgtattacgccaattgcggagagacctgtaggatcgaaggaggagtatgaatcctggtcgcccaatggggaggaaaaaacagtggaagaatgggaagagctgtacgcaggcggagtcccagacttgaaaactgttttgtctagttga

SEQ ID NO: 1095 - DNA, 978 bp, Pichia pastoris
atgaaggccataatatgccctggtcaaggtgtgttcaacgtgaaaaccttgctaaggctctccaagcacatcaagtcatctacgtatcacacggagtttgtccgtcatgttgataattctttgaaactcccgatcaaaaagtaccttcttaccccggacgaactgacccccaatgatttgaacaatctccaaaaaacatcgtatcagcaaccgttactcttactagccagttacctgctgctagaattaaacaactacaaaatcaccccaggcaacacagactttatggttggccattcaatgggtgaattgacacttctaaccctgcagaaaaaaatatccattgaaggtagcatcaaactagcctacactagaggtgttctcatggaaagtgtcgttgaaaagctggaaaaccccacagagttcaaactctatgctttaatgatcaaaccgaaagacttccgtttcatccaggacactttagaactcaaccctcatgtaaatatctccaatatcaacggattcaatcaaatcgtaatctctggaagagagtccaagtgtctacagctttttgaacagttcaagcttgataagatcagctttaaacctatcgacctgaaagtgagtataccgtttcacaatccagtgttggatccagtgataccgaaactatcattatacattactacacatcaactatttgataactcttccctatcgatcccttcaatatccaacctcaatggtcaggtagtcaaggaaactcaaactttcgttgataatttcattcagactactaataaaacagttaactttttaggttgtctggagaccctaatcaaagaatcacaagacgaccagcttgagattcacaacattagcgcagtcagcaccaatctagtaaagagctttgcgaaacaaaaagggctgaaaaacatcaccaacattgacttggaagagcactattgggggacataa

SEQ ID NO: 1096 - DNA, 1020 bp, Pichia pastoris
atgtctcagggttggtatcagaactttgatatgtctaagacacctgcgcaagaacagccatcacacgaggatggcaatgtagaccaacgaccaagacaagcttccagaaaagttcaaaggcaatcgcaatctcatatacaaacatctcaacaaccacaactaccttgcatcaaccagccccagcttctagattcgttcgcacagtcactcgattctcaggcaaattcatatttgtatacaggaaaccaaaatgaccccaaccaagtgtcgcatgtgccacaaagttcagagtatatggacttgcaaccctcaaatagaccctactcacctgccagcctcctctatttgcatcctccagtgagtcgtcagtttgtatcgtcgtcacaagaagatgcagagcccacgagctcaagcggacaaagcagctcaaattgcacagcaatagaccagcaacacagatttcaaatagcaaactcaagaaatgtcttcaacagttcagaaggcataccgatggtacccgttcaggaggttcgaatggcccctcctgtgtcggggcctgactctagacctcaggggtttggtcaagatcagccgtataatcctcaactgtttgggtattatccagagggtcttccgactcaacagtttccctcgtcaatcgtcaacctcgtcaaccctcctcctttcgatgaggtaatgaaaaacctaccaaatccagtggcgtttgatgatttggggttagaaggacaaaaaacggtcccttcttccacaagaacgcacagtcaaacacccagcttacgaattgaagaaagaatcggtaaccaatgtccgcattgcaaaaaaaagtttaggaggccttcatccttacagacccacatctacacacatactggtgaaaaaccgttccaatgccgttggcctaattgtgaccgtcgcttctctgtcagaagcaatatggtacgccactaccgattacataagaaagtaaacaagcaaggttctgacgagaaggagcaataa

SEQ ID NO: 1097 - DNA, 1527 bp, Pichia pastoris
atggaaccaatagaatgcttgacggtcttatcaagaattctggttactttgggaagcaacggtgataaggtcttgaaagattatagacacaatttggatcttttgtctgcctgtctttctcatgcaaactccaatgctggatttagaagagaagtctttcaatcccaatctgtttgggtaatgctgaaccaaattttcagtttctacttggaaaacagtgatactcgtgttgttcaggacgagatatggcaatacagaaccaggaccgttagaggcattagtttgctagcaagaagcatgataaccgcatgtactgcccaggattcgtctgctcaaccgtatgtggaaaatactcatagaaatatctccaacgtcaccagggtttcgatagctaaattatgtgacagctccttatcagatagtacaagagatttgtatgtgaagctgatttcttccaattttcaattcctaactaacctgatgaatacaaaactgggggacgagtatcatggaactatcgactacaagctagctcaggatctctttagaagaattgctcacgttaaggaaccgggtgatgcacccttggaccttgagtttgcagaacacgggttgtatttagtcaatagtctggtggacaataaagagttctctttcacactaatggatgatcaagagacatttaatttattcttgagtgctctgttgaacagttttgaagaattctctactaatgctgcaatcgagatagaagctgccaaggaccaagatctgaatgcaatagaactcttgattgtttcaatctgctccaaaatcatcacaaaacccaggttcgttacttggatcgatacgatggatccatttgatggcaacatgcccaactacctaaaactatttcaaacaataattgttaatagagactcatggagctcagaccagctgattgtgcttataacatggttgactacattgtttgaccgtctgaatgttgacgacaacagtgtactaactgcgtcacttaacaaagtattagtctctacattagactctattgccagcatatgtcaatacgaagaagtcagacagtatatcagtgaataccactattttgtcaagtttttggatcttttgaagatgttgtcaatcaaggttccaagaaaagcactgaaagactctgcatcaaaaattcagttccccaacaccaaatcaatcatcgtagaaatactcacctttctggtccacaaaaatttcaaggttcaagaagcaatgcgtgactttcagggaatagaagtcatcttgaacaattgcaacattgatgaaaatgagcctttcatcaaagaacgatccatactgtgcatcaagtacttactagagaataatcaggctaatcaagactttgttgccaagttggaagctaaaaaagtaacagatgataaagttctcagtgaagctggatatgaagtcgatattgtggacggtaaagtcaagctaaagcctcccaaacccagatccaaccccagtgaatga

SEQ ID NO: 1098 - DNA, 582 bp, Pichia pastoris
atgacagactattcgaaggttccgatcaattccttggagtctctccgtttgagactcactcaggctatgcattcactgaataaattgaatgattccatacatcagtcacaaactctacctcaatggtcatccatccaaaaccaactcacagtcattctatcccaactaacctctctttcgacgacgttggaaacacaacgagaaatcctacagtacataaacgtttaccctctgccggaatttccatcaacgacgcatgaagggctattgactacactattgcggaagaagaacattcctgaggtatctgaatggataacacaatctttagaggagtccaaagataagaacccttctgcgtccgaccaatttgctacctggtgtgctgaaacaagtgctcaagaaagtgaaaattggattttcactggatttcgaacaaaatatgaaatagacaacgatataccgcaggccccagagtattctcttagggagtccacaagcacaaacgtatcacaagatgaagtctctacagatgacttgaacaaattaatctacatgggaatagatcccagaaaacagtag

SEQ ID NO: 1099 - DNA, 486 bp, Pichia pastoris
atgtttccccctacccttttagaattaaaggctaataagccgaccacgatgatgctagcctcgcctccatccctcatccctcaacagggtatcgaaaaagcaaaacctaaatccgttaacttacaactcaacaagctgaaatacaagaaagcttgggaattggcatacagtcctgccaaaaacatcccaatgaatctgataatgatgtacttctctcccaactcccttcaaattatttccattatgatgaccatcaatctgttcactacacccctcaaagatatattcaattgcaacgaaatattcgaaaaatcggtagacgtatccgtgattgacacttacgacttgatcatgatgaaattgttctttattgtttgccatttcggaacattgctggttggtatgtggaagctgaacaatatgggaatcattcctacaaaggcagatttcattggatctataaacaatactctagaaacgatataa

SEQ ID NO: 1100 - DNA, 207 bp, Pichia pastoris
atgagccgtcgcttttatcgtaaatttgatcgaaaactgaaattacgacgtagctgggcccatactgaaatttcacaatggaacggcaaaacgcaccttggacctgcactgataggaggcagatctagtagaaagcaagtggatccagatttgtttgagaagcttaatgtcattctagaaaacagaaagcaaaaaagatcagtctaa

SEQ ID NO: 1101 - DNA, 219 bp, Pichia pastoris
atgacacatagattggactcaaccatggctatctggggtatacggacgttggcaagggcgttaatttttcaggacaaacggaaatgccatggctccagggaaaggcattcctattgcaaacctagaccgtcgaacctctcctatcgcctaccagtcacccagctatccctaggcaactcatctccttcaagcggattgcaacctgctaagccaaattag

SEQ ID NO: 1102 - DNA, 2511 bp, Pichia pastoris
atgtcttcgaccaaaacagagaatgccaaagaaagtcttcgtagaggaacttctaatttttggatcagaaggtattgggccagcttcgttcgtttccccattttgaataaacctttgaaccaagtaagatcggttggctattcgtacttgaaaaacagcttgatttctttggacttggtgtccaccctgcgccgcttatttgtacatgccgatttaattccatacgacgagaaccataatttttttatttctgctttcctttccagccttatcatgatagtagaagactacgagtatgtggtcggcaatagacccaccacctaccatgttgcaattcctaaagaaatcagctccaaaaagccagttttaaaactgcatcctgatttcatcaagtcaagaaactgtaatttgtattttgatgaagagttttaccattttctaaccttcctgactctagaaaaagctaacatattatgggaagcttttatgaacttgaagggtgatcatactctttttcaaagtcaattgaccagtcatgataaacttgtcttcatgagaatttggcgggattatttgtcaactctagacatctttagagaattccattccattcgttgcattatactgtctcatgactttctgcagaaggaagataacttagggcaattggagttctgggacaaaattcagaaggatttcagctcattcgtctatttcaatgatagcaggaaaccatggtattccccgttttcgttaaacgttcgaattcaaaagttgttcagtatttattctgattcattctcagtaggcacttctttcggcgaatcaaaaggccaacacggacagagaaggctttcccgaagttctaaaattgttgcctctccgtatgtcactccaaagttccaaggtttaacgtttacaatacctccattttttccactgcactattggagacagtacgtcatggaagtgtacatcagtaaaagtttcaagcaagaaaacgtcccgcctcttatgaaaactggccatattatcatagatcattcgaactcgacagttgacgttgaagccatcagacatcgctacggcttaagcacatttagaagtacgacaaatagctatgtcgagtcattgttttacagtgatcggcttgatcttttttacttgccattagttgaattaaacacaaaaatcctttatgttctgggatacttggcggatccaagtgacgtcttatctgattctgaccccgacgacgattcgataaaggttatcgtggaagagttgagtgatatgaacgttgaggaaatggttgctaggattcaatctttggctaaacccaagttcttgaaaacattcaatgttgacgatttgattcagtacctagcggatttttacgagttcttgctgcatgtagagttaccaacaaaattagaaattgaagccaggaaaatccatgagttggttgagtcgtcgtgcatcacaggagagattttggaactttgtttcatattctacggagagtgcatgacattcggactatcagtttggtttatcaaatgcttggacataataggtgaagatttgatgaaatttgaggctgttgtatttaatgagatccattgtacaaaagaactccctctgaaagaagcatacccatacttacattatgtgatggagaagttcacttttgaattcacacatgataatcacatacaatattttgtcaacttattttcttacttcaccgttagccaaaaagaaaatacctggcagaaatttaatcacgtcccagaacaattgcaagcgtttgaaaaaaggttcaggtctgtatgtgacgacatagaatgcatggtgatgacattgtctattgtacaactaattcatttttattggaacgaatctggtgtaaatttttcttgcaattgggaccacacggccaaaactatttacactcatattcaaaactgtaatgatatccagcaatttagcagtttgaagaatggattatctggggagatagtcgatctatttcaacttcaattttcagctgatgaaacgaaaagcattcaaagatccgaatttgacccacagtttctctcctcttatctggtgaatgccgaccacacttcaattaaccccaaacaaagtgtcaaaatgattgtaatgcaaaagctggtggaactcttcgtgttgtcaacacagtcaaccaagcaagatcagttttacagattgttgaaaaaggtattccatctatcagatacattgaggttacaatttcttggcacaatctttgaaatgagctgcattttgaagacaagtctgacattgtacaattcaatctatgaacaagtctacgaaatgcacttcaacactcatagtttgaccactacattgattgactttccacgcattcaacaacaacgccataagcaaaaagatcttaagttccaatcagtgaaattgagccccacttctgggtccaacggattggaagatgccagggattaa

SEQ ID NO: 1103 - DNA, 1749 bp, Pichia pastoris
atggttgctccaatcccgttcaaaaaatttcgatttcacagatacgatcgttacaccgctgggagtcgatggctatacgagactcgataccactttaacttctggagttacaacctgaaaacctgtgccggtcttttaggagtctgtatttatatcactatgattctaacaatgaactttttgtacgagaatggcaccagaatggattttcctgtggacgttgagttggatccattcttcctgaaagaacaactgtacatgcaattgcaggcaacttattttaaccaaacaaacattgttgttaacaaaacaatcggcgtaaaccctttctaccaaactatgcccgaggcctcccagttgagttctatcgacagaatcgcaatgctaactgagcctgtggtgagggatgaaaacattcacgttccgaaacttcctctgaagttaaactattttgactataagactgcttcgttgcagcagtcaatcatcagtacattcaaaggaagaatgggacatttaaacaagtttctggaatacaagataaccactcagtattctctgagagttccagaattgacacatcaacctacagaggtaaagatctctgataagggtatcttgtacgagttagtgtggaatggaggcgatgaaaaaaaggtggaggataggggcagtgctgcagagtattttcaatccctgggtgtccctccagaacatttcttgattttcaaagggagtaagacagcaccggcacacttcaatttcagtaaaccacaatggaccctgcatgatttgggttcacacatgatccgggagtactcatacttaaaccatgaaaaaacggctgcaatgcaaacattggctgatctcatcatctttttcagtaagcaacgattcaacttgacggttacaaattatgacttggtggtaaagagtttggaagatagcatagaaaagcatcgctcaaaaattatactcggaagggatctttattttttcagtgtcatcggatgtgttggaatctgtgcttcaataattctgatcacaattcttcttgatttcctgaacagatcagccagtaaaagctacctgaaaactctatgttgggggatcagagtagtccaaatattactgagtatactgtgcttgtacggagtttcagctggaattgtttatacagctctctttactcaagcaattgaaagcgttgacaatgattcattttcagaattgagcagattattgaattcgttggagcttacggccaagttcaaagtgttgaaaggattcacgaattggttcgatttcttattcttccggctgcttagcaccgtattttcctttgtcattccaaccttggctttcatttactttctgcaatgcgaattccacgatttgcaagttcggttgaattacaaaatgatcgacaaatacagctattacgtccacaaggaggcggccagaagccttcttagacacgatttaagagccatggacaaagaagatgatgattatgataatcgccaaatatacttataccaagacaaacagaaacggtttcttccagtgtggatatacttgaaaaatcctaaacagtaccaaaggatcatcaatgaattttctaaagaccgtgaaaaacatccaatttacaccgaaatgcaattggaaaaaaatatcctcaattatagagtgttagccgcagactacaaactaaaacctggagaagatatcaggagtctgccatgctaa

SEQ ID NO: 1104 - DNA, 399 bp, Pichia pastoris
atggaccctaccaatatagactcctttctatctcggttgaagccagacttggtacggctaaagtcgctccgggaatcccttggaacggattccaacgactgcaaagacgagcagaccataacaaataccatccagaatctcatctccaacacagaaactatcatcaaacaaataaactatgaactcaacgttaagctcaaaaacacagccaaaatctacaacataatcaagaactgccagctttctaatacaaaggagtttgtgtggaactctgatcttcttaccaccaagttcattctagatttcaacaaaaaacacaatgaacatcctcatgaggagattgaccttcgacagttgttggcccccaaaaaacactttatgacttacgagacaaaatag

SEQ ID NO: 1105 - DNA, 885 bp, Pichia pastoris
atgagattatcgtatgaatgtctgttttctgtgttcttggttttggcataccatttaaagggcaccaaagccactcctccggcatgtgtatttgaatgtgtttcggtagtctctaattcatgccctaaacgtgaaacagacactgaatgtctttgtgctcagaaggattctattattggatgcctcgttgacatatgcaagcccctagatttctcgggtgccagagatcatatcaacgaaacatgtttgaacctgaaggaagggaatcaacatcgagaaaagtgtcagttgagtcatgagcatgacgattcgtgtgggggtaatttgtgggattgtgagttgaatcataagcataacaatacatgtgccaggaataatccatggaattgtgatttggagcaccaacataatgagttttgtgggaaaaaagacccacaatgtgaactgaacgaagatggaatttgtagaaataattctacctatacagaaaacaatcttgaagtctcattacagcttgaagactggaactcagatcccgataatgaaagtcttgaggatgtctccgaagattcaagttccgatgaggaatccacttgttctgatgaagcagattccgattgtgattctgagtatgatccgtatgaatatgaaccctatggatacagaaagagagatatggacaagcccatatctaagagcgaaagaccattactcaccaggagcaaaaagcaacttgataagcaactgaggccttctgcaaaagcagctcatgccaacccaatatatcccttcaaagacaagatacctatccaatcgctaccaaaactcaataaactcaattctgtttcaaacagtgttgaaaactcccttgaatctctcctttag

SEQ ID NO: 1106 - DNA, 1320 bp, Pichia pastoris
atggaaacgatattgcctttacttctcggatacggaaattcactattgaggtttccggtggaaggaaacgtatctagtctatttcgtctccaaagcactctacgatggcatgaatttctggcggggctaatcagagtcaacaaactatcgaactcactcgaattcgatacagatatctacaaattctatgcagaagcacttactgatgttgaggatcagtccaagtcttataattgttcagtcagaataaaaaacatcaactgtctagcattggaaatcctggaggaaaatctgcctggtctgaatgtatcaaccgatcttaaggagaacaagaaaaaaccacgagctctaagactttctaacgaaaaaatgaaagaagagaccaaagaagaaccaacattcgaaatctgcaatcaatccaagcatgcagaaattttagcaggtatcgatatcgatagatgtgccgaatctctgaaaagaagtcgaaagacccagttgctaaagtgtcttgaaaccaagatccattttgtaccgattatcaaatcgcatacagaccctaaattgggcgactgttcgtaccttgatacatgccataagctgaaaacttgcaaatatctgcactactatcaaactgttccaaccctagcagctaataagccccctcctcccaatagcccaacacttgaagtgttagccagttacaccaaaggagaaccaatcagcaagacattgtgtaaacagctgccggcacagtggatcaattgtgatgtaagaaagcttaatttcaacagactgggtaagtttgctgcgataatagcagatcctccttggaacattcacacaaattccattgaatcgaatgaaactgaattactgaagattccagttgatcagatacaagacgagggcatctttttactttgggttacagtaaggtctactagcatcgggagagcctggctactggaaaatggttacactgtatcaagcgaactgatctgggtaaaaacaaatcaactgggacgaaacatctgtactggacgtacaggtcattggctaaaccactcaaaagaacatctgttagtgggcatcaagggcagatgcacatggcttcaaagagggttgttcgacgacatcattctagcctcaacaagagaaactggtcgaaaaccagacgagttatatgtaatggtagaaaaaatggtgggagaacatgcacgcaaactagaaatctttggcaagcaacacaatgtaagaccgggatggttaacaatcggaaaccaactagaaggtaacaatgtcgttgaagatctcatttag

SEQ ID NO: 1107 - DNA, 423 bp, Pichia pastoris
atgtcggaaagaggtcagcccggtggaccaaacccgactatcaaggataaccgactagttatgaacataactacatctgagcctcgtgacctgctgatgatagaaagaaattgtctcagtatggtcaaatttggggttgttctctcattaacaagtattgccatgcttgttaactttggcttcgggaaacgtgaaaagcttgaaggggacaaaaagattctctttacgatatttggttccatttttatgcttctctcgttgctgtcattagtattaggtgctctgaattattatcactctatcggtcgatataccaaagagaaggtggaggtctttaaccatatccctattactggctttgtgttttcgtgttttgtaatgatcttcacagtgagtgtggtattattgactcagagcttatga

SEQ ID NO: 1108 - DNA, 648 bp, Pichia pastoris
atgcgtggtccaagtttgtctttgtttgttcccacaaaaaagtttaaaggtaaggacatgactagtgaagacagaccaactgaatcccttcaattcattgaaatgttaaaatcgaacgatcgaaaggtcaatgatgaaaaattggccagatttggacttccaccgaaagagaaacttttcaagtatgagattgttccccaacatgaagcagaaaccatttttgcaagcaagacgaaattgatgcctctgaatatactttttgaaggcaatgaatcattgtcaccggaagctaccagtcctttctatgcagagagtgatcccttaacttcgtattgttcagaaggtcaaaatttaccttgcaaagttcgaccgtgtaaaacaccatttcctagctcccccttgcctctttcaagctctccttcacaacagcataattctgatcttatatcagagctggaattttcgtctgaacctcagtcccaattctcagaactaattcatagtgaaacgatttacacagcagaaacgactttcgattcgaagcccaatcttaacgaatcaactgatcctctggattccagccaggaacaccttattagtaccgatactgtcataagctctgagtcaataataccacactcactgtga

SEQ ID NO: 1109 - DNA, 840 bp, Pichia pastoris
atgtcttttcaagatgatatcatcaatgacataaactctttgaaaactgagattgcccagctgcaagcccagtataatagtacctccagagaactagacgaccttcgaaaaggggtgccgcaacaagttcaacacgagcactttgaatccctgttaggtaacttcatcaatgaacccccacagtccaaatcggcaatcaaactaatgagcaggaagaaggcatacaaacaaattcacctggagaacctgtatagaatggtaggagtaaccatgtttccggtcagtaatcgtgacgagctcttagggatacgatttgacatatttgatggagagcagaaaaagttcacagtaccccactatattatcctacagaaacattcgaaaaccgaacaatggaagatacacagaaccaccataccaagatatgttccactgcaatcgatcgcaaaacaatggctaaaccaagatttaaacaagtttgcaaaattggtgaggaagcatcttgtccacatacagaataaaaaatctattgtagaaagggtgaatggtaaactccaggggatagccacgctagagtgggatctagacttcaccaagattcgtctgcacgttaaagagaagttcagtcttttgctcttgtgcgacttgacaaatgtagtcagtgtggtggaatatcaggttaagccagaatgggtccaagcagtaggtgagcaagaatcagaagggatcatcagaagaatgaagactcttttgaagaccaaagtggtttatttggaagtgttgggtgaactatttgatcccgaaaaccagaataaatcttatcggtcgctccttgaataa

SEQ ID NO: 1110 - DNA, 378 bp, Pichia pastoris
atgataacagtagggagaaaaaactctacaaagtggattccttgggcaagagtctcattgaaagtatcgggtgtcaaaagttctggcagctggatggagttgatactgatgacagtcggcccattctccacccccattaccggagccctcggctggatcggctgctttagcaaaagctattgccaaaagactggccacgatagattttgcaactttcatggtgactgttgtcagaatgaaacggtttgtgctatgctgtccttatcaagggtttgtaactgtagaacggtagtaatctacggaaggcaaagccaatcgcgaacagatagatgtctcgtgtctagtttttcgtgtctggtcctggtattgtgcatatga

SEQ ID NO: 1111 - DNA, 693 bp, Pichia pastoris
atgtcaaccgaagaagccggcataaggacgcaggcacagttgcttgacacagaacttaacaagtacatgtccacgaggacgcaagtttgggacttggctaatgtggtaaaactgggtaacaagttaacagaagatcagattcaaaagatacagagtttaaaggcagacataaacagaagcgaagcattccttaagttgaacttgagatcacaacaattagaattccgaacgatttatgaacagaacaaagacgttgaagaaatcgttaatgaaaaattgcaatccaaattgtcagaaatagaagcccaaaatgcgaagctacagtctcaagttgacacagtttcggagctgatcgataaaagaaatcaaattaccgacttgttaaacctttttatttcgggaaatcaagatttggaattgtccaaagatgaactagagaaaacgttccaagggtacgacatggaaccagtgtacaaaatggcaaaaagatcaggaaagatttacaggttcagaaaactacacttgaaagaatcagtgcagcaattgaatgcaaaaatcaaggacaaagaggctcaaattcaaaaattaaaagcaaatatcagagaaaagaaagctaggtgggacaggttgtcaaaaataatagcctccaacttggagagtttaaaggaagatctggtaacagaacttcgataa

SEQ ID NO: 1112 - DNA, 507 bp, Pichia pastoris
atgcttagactaatacggctatcctcgtcattgccgaaggtaaatatacccaaggcaaataagatgccggcaagacctacgattgctgagggcgacatcaaggaaaagttcataaagggcggatctggtaaaggcggacaaaagatcaacaagactaactccaaagtgcaacttacacatatagctacagggattgtagtaacttctcaggcaacgaggtcaagggaacagaaccgcaaaatagcaagggagatactggctttgaaacttcaagacttggaagatccagcaaacagtaggcaaagaattgtgattgaaagacagaaaatggtaaaggctagaaagaataagagaacaaaggctaaatacgaaacattagaaaagaacaaacaggaaaaagaggatttactggagggaatagacgagatagtttttattgatgagaactctgagccgattcaaattgacaccaagcaatctaaacagaaactactaaaacaattgtaa

SEQ ID NO: 1113 - DNA, 1143 bp, Pichia pastoris
atgtctgggctctccgtctacaaggaactcaaccagtcgttgataaatagaggttatctgtctgaaggagtgatctttgaagatgaaaatactgtgagaaaccagaaagtggctcaggtcattgaacgtcttctagactccatagacaataacagaacaatcagagacgatcttctcttacgggaaaaagatcatttacaagtgatagactccctgaaaactgaccaatctctcttgaagaagcgtattagcactttggaggccaagtcaacttctcaagagagacatattaaccagttaacagcacagatcgatgaattgacaagttcagtgcaaacaaacattaaacaacacaacaagactaaatcacaactacaaactgtactccaatcatctaatgcagaattcaggaggaaagaccttcagattgatcaactccaagaaaagctagtcgcaaaacagttgggtattaaagggaaagtattctccctatacagtcttcctatcatgcctgatgatcaaccaaagaagagacaaaaaatagccgagtcttcaacggagactcaaaagttaaccccagtggagagatttcccgtagcacagaaagaaaccatgactttgctgtctgatttatatgatataatctactcactgattcaagataataactctaaaaccaggtacttgactatttacaacaatttcatcaagaatttagtaaggttcatttcaaagattgcaaactacgacggcaaaatatcgtatgacctaagagaagagtatgcccaattgacttcaatggagataaattcccctcctgggtctgcctctacagttcatgagacaaaagaagagttggtgaagtctctacaattatcgaaaacagaatcagagaatattctcagacagttttcttcccaaatgaatgaactatacaactctttaggaaatgcttttgaactgaatgaactatctgcagactcggaagttgcctccagaaacggtctcaaacaacaactacatgaaagggagacacagattgaatctcttcgaaaagagctggaaagtgtaacacataattggaaggctgctattgaaacgatggagaagtggaaaaaatacagaacgaagaaaggcatatag

SEQ ID NO: 1114 - DNA, 1191 bp, Pichia pastoris
atgtctatggcttctgagattgccggtaccgtggaggaatacgaagtggaccttaatacaaggttcaaagcaggaaaggaaggcctagtaactaactccgtggtcgccagcaatgacatcagtttgaatcaaaggatgctgagcgcctgtgtcgggtcggtacttacttctctggttgttactccatttgatgtggtcagaataaggcagcagcagcaatatcttataacgccacccgccgttacgaatgcgggcgagtgttgtagaaaagtgttctggttagatacagtgaaggaggaagcgaggagcgttgcaatcaacgaattctgcgtctctcactcttgctctcaagatgtcaagtttgaaagtacatcagaggggttgtccaagataattcggaacgaaggctttgcttctctttaccgtgggcttagttttacccttttgatgggagtccctgctaatattgtctacttcagtggttatgagtacttgagagatcgatctccgtttcgaacttcaagcccaacattgaatcccctgatttgtggttctgtagccagagtgttagcagccacttgtgttgctccattggaattactcaaaactagattgcaatcaatcccttcatcactgaaaaataaccccacacatattaatgctaatcgaaaattgttttggaaagttctaaaaagatccggtgaggaaatgagttctagaggactgcgaagcctcttcactggactccagttaacgctgtggagagatgttccgtttagtggaatctattgggcatcgtatgaatttttctccaaaagagcaaatttttggaatttgccaagtctaaacgacgatgatgctttgagacagcacaaaggattggatctcggagtttttgcaagatctttcctaagtggttccatatctggagtaatagctgctgtaatcactaatcctttcgatgtagggaaaactagactacagatttcagaggaaagtgtttcgtctctcaatgttagaaagccagagaaatcaatgtttcagtttctctactccatagtaaaagccgaaggagtgagagccctatacgtcggacttttccccagatgcttgaaggtggcaccctcatgtgccattatgatctccacttacgaaatgtcaaaaacgttgtttcttaatcaaaaattatag

SEQ ID NO: 1115 - DNA, 2220 bp, Pichia pastoris
atgtactggaaaaactctgagaattccaggtacctcagatcaattgctcggtttgatcagtttgacactattgactggataaatgagacactcaagtccaaccagcatcgtttttcatcctggatcatcgattggctctgcttagcatcaatcggagttttcgttggaattatcgctgggtgtctaaatatcattacggaatggctgacctctatcaagaacgggtattgctctactgcgtggtatttgaatagggagttttgttgtatgggactttcacatgacgactgcccattctggaacccttggccagcaagctatctgctctacattggatggagtgtactttttgcctcaattggtgcaatcttggtcaagacttactctaagacagcagctggttcagggatatcggaaatcaagatcattgttagtgggttcgatttcaaggcatttctcaatcaagctacacttttcatcaaatcattgacgttacccttggtcatcgcctctggactgagtgttggtaaggaaggacctagtgttcactatgctgcctgtgtaggtagtgtggttcctagtgttttattttccaaatatttcaatggtttggccttcaataggagacatttcatcactgctgccacggctgcgggagtaggtgtggccttcggttctccaattggaggcgtattgtttgccatagaagagatttccaacttcccattattgtccactttttggaaatgctatttctgcgctttatgtgcgactgcaacgttggcttcaattgacccctttcggaacggtcagctggttttgttccaaattacctacaaccaaacttggtactcttttgagattcctgtctttatgctgctgggactatttggtggtctctatggtattgtggtttcaaaattgaatatcaaagtagtccatttcagaaaccgctttttgattccacacgcaataaaagaggttgtctacttgactttactgacgagcctcatctgctataacaacgtttttctgaaagatgaaatgacaaaaactatgcagttgttgttcaaagaatgctctcctgactcacattctctcctttgcaccaatgacaacagtcacaaatcatggttggtattatcattgctcgttgctactttgattcgatcggtattggtgattatttcatatggatgcaaagttcctgcaggaatatttgtgccctcaatggcggtgggtgcaacttttggtcgatccgtgggtttaataatggagatactctatgccagtagagaaacatcttggttgtttgcatcgtgtcctaaagacggttcatcatgtattactggagggtcctatgctttaatcggtgcagcttccgcactgagcggaatcactcatctgacagttactgtagtcattgtaatgttcgaacttacgggagctgtcaactacatcatccctatcatgattgcgattgcggtgactaaaaccataaatgaccgatatggtgctggaggtattgctgatcaaatgataaaattcaacgggatgccatttatagattccaaggaagagcatgagtttttccaggacaacgctacccataaagctatgacccttgaaacagtttacttccctcttagactttcctaccacgatctggaggttattttagcggacacagactataaagcctaccctgtgttagaccaagaaggtttctgctcagggctggtccaacgagagcagctagttgccgagattggaaggctcaaagggcaagatcggttgcagttggaaacaatgtgcatgttctctgaagactcatctacaaacccttttatagaagatttacaggactcagaaacatgttatttggatcatctaatcaagcgggatcccgtttctgtcatgacatcaactcccttggagatcagtttagatatctttgtcaaactggggccaaggctaatactggtgaagaatagtgggggtaagctagcgggacttctctccagaaaagatatcataaaatatgaaaactacttgcattctactacacattccatagatgaaaacgaacagattttacttgacgaagaacagaattatatcgaagacagagtttggagtttcttctgtttgattggatccaaatttcccaagataggacgaaaagaatatgaaccgcttgaaactcctaatacacgctga

SEQ ID NO: 1116 - DNA, 351 bp, Pichia pastoris
atgcaaaagaaatcccaacaattgatggataagcttgactcaaacgtcactttgatggtccaaaagtaccagagcattttagaactcgtgacgtcaagcgataaatctattggaacccagtcagtagagactcttcaaattgagtcaaatgcatccacaattattagactaagtgaagaactgctatccatgacaagaactctgaaagaatcttgggttttaggccaacttccgaaaatcaacgaagactcagatctgagtaacgaacacttgcgggaaaaaatgaaccagttattggaattggttagtgatgaaacaaagcagccgaaggaggaagaatccgatctttag

SEQ ID NO: 1117 - DNA, 567 bp, Pichia pastoris
atgaccagcagattgtacccgaacatcataataacaggcactcctggttgcggtaaaacctctcattgtgagagcttggtcgagagcttgaacgacgagttgagatcgcactttcagcatctagaaatcagcaaagtagcaagagaaagaggctgtatcgacgggttcgaccaagagagagacagtagcatcgtggatgaggataaattggtggactccttggagccagatctcagagaaggcggtaaaatcatcgattggcactgctgcgacgtctttccagagagattgattgatttggtggttgtggtcacatgcgacaattctgttctctttgatcgtctttctcaaagaggataccccgattccaagatcacagaaaatattgactgtgaaataatgcaagtgatcctgcaagaagccaaagattcttatgctccagagattgtcattgaactgtcaagtgaggacctggaaacgatggacgacaacgttgagcgaatcatccaatggatcaacagctggagagaaaacaacccagacggcgcaagcaatgagctagactga

SEQ ID NO: 1118 - DNA, 957 bp, Pichia pastoris
atgagtacccagaagccagttggaattctaacgtcgactaacatcaatgatgctggaactccgtctcatgtcgttgcgtcaaaaataaatggggatctcttgctctatcagattgaagacatggacacaccttccaaccaaatcacgctggatactggtgtattatcgtcttgttggcatccgacctccaacacgaaggcctacacgggacatctagatggaaatatattggaaattgacattgaaaagtcgattgccaatctaacaaactcctcacacatgttgggtgttcgaaaactgatttttctagatgagaatcagatcttaagtggatcctgggataaatcgttggcattgacagatatacgctctccgctcaatcacaaataccgtgttggattaccagggaaggtgcttgctatggattccagcttcaatggctacgaaactgttgtttcaatgacagatagaattattcatgtctatgacaaaagggatttctccaaaccagttaacgtaagagaaagcggattgaggtaccaagtccgggatctaaaaattctacccaacaggaaaggctatgctacttgttctattgaaggaaaggcttctattgagtatttttcagaacacgatctccatctaaactacgcattcaaatgtcacagaaccccccaggaagaagcagatcttgtatcaccggttaattgcattcaattcgatgaaaaagaaaggctattcactggaggatctgactgtagaatatgtgaatgggattatcatcaaaagaaaagactaaagcagttttcgaaggaaccatggtcagtgctgacgatgagcatcagggaaaagtatctggtttatggagtgagtgatgatgggtacaaaaacatggtttctgaacgcagacagtactccgttgagggatccttggttggacttaagatcttagagtag

SEQ ID NO: 1119 - DNA, 1509 bp, Pichia pastoris
atgcaacgttcatcgatgtatgcacgaatatgcacgtctacagaacttacaatagaatttggaaccccagaatctttaatcatcgtaaataaagtacaaaatcttgatctacaatgtctatcaccaaaccatactcaagtcatgtattcatttagggaggattcctcattgtccgccagtttagctataaacgtggaccccaatcttgtcattcgcaacaacacgtccgatctgatagtagagatgcagaacgtgtacagttcgaacaaagagttcaactttgatatgccaggtacagagcaagatccgttaaatgacaattgtcttgcaactagctttcaacctgactttgaaaccaatatttttatgggctcctctactgaaagtgaggtgacgacacaccaacgtataattagccaggatccccaacaggcccaaagagcagattcgaatgaaagcttcgacacaagtccaaaagcgggcagtcacattatatgttttcaattggacaaccgaagtagtttcaaggaagccaatccaggattagtcaatccgttcgaaactaccccaccattgagagaagacctattgttatccctcccgcctcaaaatttcatctccacataccttctaaaaaatagaggggatgacggggtgggagttaatgagcatgtctctgagacgaaaccagtcaatatggatgagattggtccaactggaaacaatatcgatgatttctcgtccagtttcacagcagaaaatatgaggcatactagcgttgttttactgaacagcagtgaattctgcacagagatcagtcaacaactagattttttgaaagaacaacaggagttcgaagagtcaaacagtgtggtttccaaccagcactccctggcctccccagaagaggagtgctcacttgctagcctcaggattcccaacaatatctcattgcatcacttgaagaaggaatcaaaatttcactatgcaactcaaaaccagggatatttgaccacatactctcctcgggtctataggacacccaagaacaacaaaaatggaactcaagggatgtgcccctactgtgttttcgattgctcagatgttgaagagcagaacttacttttcttcggaatgaaagattcaagctacgttcatcatttgggcaaaaatcacggcatatatgcagatggaagtgtaatgcctgatcccatgttcattatacctaattatgctttcactgaagccaaacggggcaagaagaagaaatctcaagggtcctcggagacaaaaaccgtaatcgccaatggggccatatgtcctaacccatcatgtgttgagggaacgaggcatatcattccaatcaaagtcggagatcagatgcagggttcaagaagttctaacaagtttctagcctatctcagacaccactacgagcagcataagaaggatactcgagtgactaataaatcgatagcatatgtcaaacagaaaatgagacatcaatga

SEQ ID NO: 1120 - DNA, 3624 bp, Pichia pastoris
atggactataggtatgaactagacatatcttggttaaaacagtcatctcccgagcaggcaaaacacaatgactatataagcgacacaccccctgctttgccagagaaaccaccccgtcattttctggaagcgatcagaaaagaatcaatatctaatgacctcctactccatgatttggagtctgcaagttacaagaacccattgaaaggaccaagggttttgcctcaagaatcttatcatattccaacccaacctctgaaggttcctagtcaaaagaagcttcctaacccattgtcgatctctccaaatgcaatgaaccccatacaacaacctctccagtcccttaactccccacagcacctctattctcctcccaaactgccaactttacctcaattaccattgaagatgcttaaaagtgactctcctcctcacgtttctgatatgtatactaagccattaccaaagaccccaatggagagggacccctccagtgtaagggtccttccaccagagccactttcttctgagagacgcaaaagcttgtctcccctgagagtcgaaacatctgattcatttggggtgtttgggagaaaatcctcgccattaaagtccacgcctacggaaagcccttcaaaaaggagttggccctcaccaactaaaatataccaaaaattaactccagagagatctttcaggaacagagatagttattcatccgatgaagatgaaagtataccgaatgatcagtttaccttttctgatgatatcgagatatatcctgaagagacgaacctggatgataccttggatgagataacttaccttcttgaagagaacaggcttaatcccagccaaaccttgcctgagctaccattcacacccaatagccttctcccttctgattttgatgctttagaatactcaaatttattgagcagtatatgggattggtgtatacggctttttgaaaagaacttaagaaaactgccaaactataatgatctcttgaaatgtttataccttttgttaaactattggtttcctacgctttcacattattacttggaagaacaggctggcttgatactacaagaactgattcaacaaggcgcaatatctctctcagaggataaccttcaaatagtacccaattatgatgcttacgtcaacggagtaatgctaggattagtttgctgttatggtcagcactatgataacggagactattctcaatgctaccgaccgtcttgtgcatatggtaaaaatacattcaatattcagctttccaaaccaccattagataaggttgattcttcgttaccggttcaagaaagaataatacagtacacaagtggaagttgggatgatttctggggagtttcacttgaacaagtgaaagggttgcctcctaaaacttacgaattacaggcaactatttttgagttgatcctttctgaattgagaacagccagaaatgcgaaagtattgacagatgtttattcctccaagttcttgaaagaacacccttccattattaaaaagggtgaaaggatctatgaagggctatttcagccattgcaagtatggaatgatgtacatcggcagtatttggttgattcattgcttgaaactatcaagtcacagggaaaattcatctccaaattcgcctcgatatatatacaatgggcaaccagagctgaagcagtgtcgattgcttatgtgtcaaagtcgtttctttctctcaagattcttgaagctgaaaagaaacgcccaggatccaagctcataaagtggtttgaggatatatctcgcagtgtccaaagctctcttattgacgattactccatgataatacgagcacccatctttcgtcccattaagttacaaccaactatcgaaagaatattgaaattgacaaatgataatgacccagagaaggctgagttggccaaggccttgaatatgagccgcactttaatgaaaaatgttgaaaatgcagtcaacgttttagattcacagcatagtataggcattttgaaaagggaattggacagtaaacacagtatcgattatttaaatcttgaccgaaaagggcgatatgttgccgaaagtggagatgttaaacgcaagagtatcattgacaaatcaagttatcatttaattcttttagacaactacctactaattacagagagaattcacgatgatcctgtaaaaaagttcaaaattgtcgaatctccaattcccgtcgagtacttgcttttcagggctaaggataaagagaccagctccaattcagggcaaccaaatgctgcattggatgaagctgatcagttttcgtttaaaatcaagcaactaggttctgatacgtctcacactttttatacacagacccgagaggatagaaacaaatggctgttttcgattagtacggtgaagcaacgtctttcagaaaaagtcaaaaggtatgagccgttttcattgagtgttgtctccgatcgagagtttacatactctcaaagtgacactgttaacaaaatcaatcctcttcctaaagatggcgcattagatgttgcaattagatctgttgaggatttcgacgatacctctactaagatccaaagcaacgtattatcggcttgtagttttaggtacaacaaccaggattatgttttcttgggtctgtcacttgccggttacgtaagtttgaaaggccagccaaactctgcaaagcgattgttagaactttcaaacatcaagcagtgtgcagtactggaagaatatgacttactgattgtcctttcagataaaaagttgctgtactttaacttaactgatgtcatgaaagtttattttggaacttcccattctgtggagggagatagattttcaagacaaagtgtttcattttttgctgttgcaagaaattatgaaaacaccacgatgatcttttttatgaaaccaaaggcaagagtttcgaattttaagattctagttccaataagagatagcgtttcaaaaaaatttgacttcttccttgagcataagaagttttgcgtcgattgcgatacttacaagatgaccctattcaaaaactcatttgtcgtacacacttccaaaggatttgaattgatgtcattgtctgtgctaaagcctcatccgatccctgctcttcactattcggatctttttgtcgacggccacacatctggtaactacagcagcgttaaaaaaagattgaattccaacaatctgaaaccagtggggattttccgactttatagtagtggaaagtttctgttggtgtactcacaatttgctgtatttgtgaaccgagaatctgaaatcgttggtgaatgcattgaatttcaattcaagtgtaagagcgccgctcttgatcatgactacctaattgtaactaacgaccaagttattgaagtctggatgattgggaacgatgatgcgaaaattgttcaattttttacaggagagaatgttgtattacttgatgatacacctggcgaagctttggtttcgatgacccacccaaaacaccccgagcggcaactggtactgagtttttgtttgaagaatcagttcaagagagttgttcaatactaa

SEQ ID NO: 1121 - DNA, 2157 bp, Pichia pastoris
atggatttcgatactagcgtagaccaaagattgattctagtcatttcatatcacctcaagctattctatgaacatgacgccccaatagagtctcttatgtttctgctttctttgcctcaaaaaatcaagcagaattgcttgttctttagtcctttagggaaagaactgaaggatttaactggcagggtacgtcaccatcctttgaagccagagagttcgtctaacgatgtgaaataccagttcctgctatcgaaatcccaactaaatgagtcctttctaaacatggtaacggataccacttattcaagattgatttctatgagaagtgtgaaaagcttccctgatatcgaccaaagctttctctttctttatgattcaagggagtcaattccaagctttataaaacacaggactaaaatcatttacattggatccaatgtttcatccattctcctcacacaatgtctggaagagcatctaccaatttgtattccttttctggagtactattcctatactcctggccgtttgttcaaacctgtatcggcagatcatctgcagttcttgtctttgactgtgctgaggctttatcagttcccagatatgaaaagttttgagatagactgtcccaatttaaaaagtttggacatttcatttggaaacatagagctaataaagggaaaatttgaaaacttaaagagtctgaaactggcccattgttcaacgaaaacttttgatcttattgctcctaagatgaaaaacataataatccatttctcaaacgtgcataatgttcacggtatctttccgagtatgaatgtttgtgatctctacgcaaattcgcatcagcgtctctccatgcaagctccttgtcttgaatctctaaccttgagcaaaattcggggacttgagacgttttatgggtcatttccttgcctccaggctgtcgacttagaaggtagtaaagatctaaggcgtttggtaatttctgaggctcggattcagaacatcaacgctgacggctgcactaatttagttatgtcctatttcttggttgatggaaggagattgccaaatgaagggccgtttcgacatgttgacgtactaaaaggtaacttcactcatctgaaaagtatgagtcttaattatgtgcctgtctcttcaatcaacatcgttgctcctcaattagaaaagctcagtcttcagggaactccgttggttgacttggtaggggatttgagagtcttgaaggaacttaacttggacaattgttcaacttttcaatctatgatcagtcatgcagctcccacaagaatgaaagtcacattcacagaagacatggatttcaacttgaatggttattcccatgtcttgaaatctttgtcgatcaacgaaacccctttagcatgtgtggagtacacttcgaagtcattggttcagttgagcctaaaaggatgtcacaacttgataagcttgaaaggacaaatggagaacatcaaaagattggatctgagttcatcatctttggaggacttcggaattcatgcaccgtcactggaaatgataaacttatctaaaacatcaaacttgaaagtgattgcagggtattttccaaacttgctgaaactggatctaagctattccgcagtcgagtcgattgcagtggacgcatttcaattgcgtaaattgattctctttggagaagatcttccgattgttaaaattggatcgtatcctaatttgaagacggtgtacatttcaccaagctctactcttactgaagcaagatggatcagctctgtaggagagcaaaaccatgtatttaaggcaactatgattaaaattgagggagccagcaaactgtttcacaaagtaacacgtcaaaagtttcaactattcacacaatcaaaagagaaatatgtgtattttgagagcagggagatttgctatgtttgtcaagaagatatcttggaacttgagtcagttttcattttgaattgcggacattttatgcattattcttgtactatgacctacttccgagaaggatttaaggtatgctcaatttgtaatcaaaagatgatcagctttcctgagtttcgaagatgctacgagccattcaaccataacctgctagaaatgacagaaaattggtag

SEQ ID NO: 1122 - DNA, 588 bp, Pichia pastoris
atgcctgatgtcccacccgatcctaatacgtatccgaaagatggcattacgatcgacactgccgacatagagcaaacattaagaggggtgaacgtattagaaagacaacggctaatggatcagctaccaaactacaacgataggcttttcttcaccaaattttttaaagcatacattgctttgccagagacatgtggacagttactgatggactgtgagacatctcaatccgtcaattcgaatggaaacgcaactcagagtagagaccaaacagactgtgggattgaatacgacccagagtcaaacgactttttaaaatacgaaagagaaatggaactggaaatgatcctacgggaaaaagtcgaaaaaatattgaagtcggacgttttaagatcaggtaataagctctgtagctcaacttcagtgcaaggatcaacttgttctatcaaaccgagaagaaaagacatggttgaatacgattatgagggtaattcatttttccagaaattatggaggaagttaagcaagaaaattggtgaaggtggtccttgctactactactcccaaaaacgaaggaccgcaaattaa

SEQ ID NO: 1123 - DNA, 1650 bp, Pichia pastoris
atgggagaattcaacgaaatattgaatgacccctcagttgtgtcgctttctgtggatgacacacctcaattaaacaatgatattcctggcaatcagcaagagacctctaacaatagtgaactagatgtcattacaaagttgcttgaaagcgcatctttagcagctgcaaaggagtccaaggagaagattaatttgtcagttgagaaggaccgtattgtgtacaagccccatgttctattgaaattggccgattctccaatggtggcccaattggcaccaactctggaactgcctgagcaaagcttttggagattaaaatctgcccgcgaggcaactaataataatggaagtttctctaatacaaaatcaagaaaggccaagagggaaccgaagaagcttaaacagcagaagaagaatgaccagcaggaggactcagaaactcctcagtggatgctggataatgacggtcctgtaggtaactctttacaagactttgaggtgtggaggttgaaaatgagactcagtgaaaaaaagagaaatggcattgaagtgactaaggaagaacttgaagagcttgacagattgaccagcggcagcacttcgataaagaatggtatcctcgaagagcctttagaggatggggaggttctagaaccagataatgacctagagactgaatcctcaattcagggaaattctattgataacttctttggtgctatgattggagaatatccttcagatttaaaagatgaacagaaacacaagaatgccaattcaaggtttagttcattgttcaaacctgaatcggaagacaaacatgtctcttcccctgactcagtggactccccagaaattcgtcgtccaaaccaacagcaaacgcaacatccgaatctacgacaacaagaacagaatcttcctcactcacatacttctcaatctcatgtgctaccaattcagcaatcgcagttacaaacaccaccaccgccccaacagcttgcaaaccaatcacatcactcatctccacatccgcaacaacctcaacaccctcaacacactcaacaccatcagcacccccaacaccatcaacaccctcaacatcctcaacatccctcacatcttcaacattcaccacatcctcagcacccacaacaagagcaacgacagcaactacagcaacaacatcaacagcagcagcaacaacaacccccatcatctaatgatcattttttcatgaaccttttgaacagatccaagaatccagatgatcctgctcaaggtaacagatctaatcaaccattacctatgggttatcctcctggaatgcctcctccaaacttcttcccccctggattaatgggaggacatcctaatggaccccatggaatgcctcctggcataccaattccaactggtcagcacggagtgccccctggaatggctccaaatgcaaactctggaggtgcacccccatatgggcttccaccaaatttacctcctaactttatgccaaatccaaacatgcaaaactttgcaccaatgccgttccccccgggcatgtctcctcaacagcttaacatgcctcctcaaaaaattccaaattttatgctcccacctgagttacagcacatggaatccgagaaaaggtga

SEQ ID NO: 1124 - DNA, 492 bp, Pichia pastoris
atgtcagataagtcccctcagattaggaagcagttattccgaagcattagtaaccgaatttcagacactgaggagcctgccaacaagaccccgacaaatcacagaatactttcctcttttgcctacaagtcaaaaacaacaccagaaacagcatcagagggaaacaccacagatagagtgttgttaaaccaatcagccaatgagctagattacatagattacgattaccgaatattcaacacaaagcatcctctgcgttggagcaagatcaaggccttggaacagagtgagactactaccaattactttttcgacacggagagtgaatctacagatagaatacatacactaaactatggacttcatagttctgccaccaatgatgatgatgataatgatgacgataatgacgactcggattcggagtcaaacagagtgctagagataataccagggctgaccaaagccctgacaaaacaggtacttgactaa

SEQ ID NO: 1125 - DNA, 1020 bp, Pichia pastoris
atgttgagagaagagctcgtcaagtctatcactaaacagaaactaaccaattttcaactgctttcgatatgtcgaaactgtggattgccaattggagcatctaataaagcacagttaatcgaggatatcagcctctgccttgcaagagagtctttgtttaccgaaaacaagaaatactccatagtttccattgatgttggagttaagaactttgcctttacaaggttgcaattggagggtggaaatgttttcaaatcaagatcctcactaccatccatattagagtggtttaagctggacttggaacaatttgaaggaatgaaaactttctcccctttagcatactcaagaatggcatactatttggtggaaaagctgatttgcaaatcatcagatacaggactgctcaccccttcagtactgctcatagaacgtcaacgatttcgaagtaatggagggtcttcagtattggaatctgttatcaagtccaatattatcgaaaatatgataatctccaacgtttacgcaatgggtcaaatgaacaacgactacaaaacaaatataatctcgtcttctccagcaagtatggtgaacttttggacaaactacaaaatgagtgacggatccacatatctttctatgaactctaaaaactccaagaatagcagaatggtacttgtggatagatggtttgatgcacttttgaaaggaacaccagcaagttttttgctgggtgaccaactttcaaatagaatcaagagcaaggagttggctatacttgcgagatgtagcaacccctcaagacgtatctatctactcatggaaatgttgaacaaaccttcaatcggatcaagtgttgttaaaggggatgaccttgctgatagcctgttgcatggtctcagcttattgagatttgagcagaataaaatgaagctaagggaaaatttagaggatttgcatgccacgattaatcaaattgaacaaagtcacgtacaggagatatcaatcatcaatcaatag

SEQ ID NO: 1126 - DNA, 936 bp, Pichia pastoris
atgaatagtgacagctttctttccattcttagaagaaagtctctcagtaatccctcagtagtggacggagaagaatattgtaatactaatactctcaaagatctagaatgcggtgaaaactccttgagatctgttccatcctgcgagacaacaggaagaagcactctttttcatagagtaggttcatttcgaaggaaaatgtcacacataacacgcaaaaatgatcaagaaaataaaactgtagataatacggcatcgaacaaatctgaacaatgtggttcacaatcgtctggagacgaattaaatttgcgatctattgccttgttgagtaagcccactttcgaaattctgttgtcaaaggatgacagaacaatatacgaggcacaaagggattcgatcatggacaaaatggataaccccccgcttgtgtatgaatgggaggtgtttgaaagagtgcaggatgcacaactggaaaaaacagataccttcatctactacaaccaagtaaagaaattcatcagctcgagaaaagattcagcattcatgctagactcgacatataagttgttgattcttcgaaaagggttgtctccagtcttgtgcaagtttcatgacaatgtggtgtctcaaatattcttcagaatccacataaaaaacagatgtgatattctgtttgaacaggtctgtttgatgttggttaggaattatcttaacaagttgtcctccatacaaatcgtagggctgacttgggtagtgaagctaagtggaaactactctctagtttcttttttgttgaataagcctattccgtgcaaggatgaagttgaaactatctgtactactattagagatagtttgaatgaaaacatcaaaaactgtgtcaatgagttgatgattattgacggagggcacaacacaattattcatggaccataa

SEQ ID NO: 1127 - DNA, 678 bp, Pichia pastoris
atgttttcctttcttgagggaagtcaacaccacaagtatctgagaatgaaagaaaaaatacacttgcaagttcaggatgtggcgtttctccaaaaaaggtttctagaagcttcgtttaaaaaattggacctccatctccccaatgaatccgaaagtaaaagagaccccttgaaagagcaagttcgagaacttctgtctgagtttgttgacgacttgttcgaactaaacaaagacaatctgctcattgacgatttgcattcttctacgatcaaagaggctcttaaaagcatcaggaaggaaaaacaggaaccttttgacgacgtattgaaccaacggttacggaaaacgtataatgagttagaggaacaaactgtaaaagtcagccaactacgcaagacatatccgatccttgccaaacaaaaagtgaaacaatatgcgatgccagatcagctaaattcaatcattcaggatactgttatcgaagatggagacgatcaggatgatacggaagacaaaggaacagtgtcaattcccgaccagtctacaaatgttgaacaatttgagacttcacttttggagctctccatgctgaaagaaacaataggtgaaaccagccagaaatgtcgcaaattggagcagctaattgacgtcttgggaaaccgccacaaattagagtag

SEQ ID NO: 1128 - DNA, 291 bp, Pichia pastoris
atgattgaagatttgatccaaatctccagagagtacccagaatacttcaagaagctgacattggaaggtgattgggagcctgagggtgattataggaaagcaggtctattctgtcaaacgtttgaaggaaaagactacaacataacaatctcacctcaaggctggaccgtagatgatgagacgtattatcccacctttgaagctctagcccatcggatatccaaaagctttagcgtaaaatggaatgaagagctaatgaagaagctggagtcggtcatagagtccgattga

SEQ ID NO: 1129 - DNA, 735 bp, Pichia pastoris
atgatcacgaggctaaagaacaaaagtaaggagaggacagccgctttgaagggcaaaaagcgggcacaggaaggtattgaagcgcaagaacggaaagatctaccacccagtaagattacgcaaaggacgaagagctcaaataaagtcaccaagatgggaaaacagagctggtataacgatctttcaaagtacaatcacattaaaccattgacgtccaaagttagaggaatggtcagtaatatgactaattacaatcatctcttgatgagatctattgagaatcctcactatagacagaaactattagacattgaagaaaggaagctgcgcttgaatagctatccgctgcccaaggtacaaaatgaccagagcttgaaagatgccttgaaccactttagaattgatagacagggcagatcaattccgatactggatagaaatcctcatgtgtgttcttcattcaaagagaataagcatttgtatgccaaagcacgtactacccacaatgatgcactgatggaagacccagtactgagaaacttcttcgaagtccactcaaggcagatgtttggtgtgggatatattgacgtggatcacgagaagaaacgagtcgatctattgacattgaaaaaaattgtcgacgatgaccagtttgtaaatgaagaggatgtgtttagaggactgaagttggaggatttcacggaagttcaaacatttggttttgagccaatatga

SEQ ID NO: 1130 - DNA, 711 bp, Pichia pastoris
atgaaatcactcattttgaacatcatttcagtaactttagctatcacatcaactgcggccagtgcgccagtggaaagcatttttgctaaccaacctgattcatcactcactgatactaatgatggtgtcggcgttggcatgtctacaatcaaagaagaagattttggcaaacattttgttgaaaaccaaattcttgatgaggccgtaatcatgtcattgaagttaagaaagggagtaaacttgttttttctagatgacatcggattagctaccgagcttataggtaacaagatagcacagattgaggctattgatttgtcagaaagactggcacaaagttggacaaacatcaggaagaaccgcctatttggcaagagagaagcagaagcagaggcagaagcagaagcgttcagatggaggaacaacgagaagaaccaaccatttggcaagcgagaagccgaagcagaagccgaagcaggaagcagaagcagaagcgttcagatggaggaacaacgagaagaaccaaccatttggcaagcgagaagccgaagccgaagcagaagcagaagcgttcagatggaggaacaacgagaagaaccaaccatttggcaagagagaagcagacgcagaagcagaagcagaagcagaagcgttcagatggaggaacaacgagaagaaccaaccatttggcaagagagaggcttccattga

SEQ ID NO: 1131 - DNA, 1524 bp, Pichia pastoris
atgcagctactgtcagcaagttcaagcactccattcgtcgctatgtcgacagtaaacgctgggaacgagtgttatcttaggaccaacaatagtaacagcaacggtatcagcgataaccgcttcagaaaaaaaaagctttctgaggatttgttgaaagccgattttgtcgaagacacagccggtaacccaatgatttaccccatggttttatctgctccaacatatataaaaactgaacatctccaagaattggagcataaacagcaaggatcaaatctgttgtctgaaatgtttaccaaaaatattttcaattcacattctgcaatgtttgtttactctgaaatccctcaaataagttcggttcagtcattcattggttctgacacctctgtccttgttgctgatgcctcttcagaaaaaaattcattgtttgtgtactcaaatactggtatatcttttgatccgtcagatgaggatccatgcccttacgaggctaattttgatccaggacaactattctcagcggtatccgcagtagaagacggttctatggcaacattgacagctcccactatgtcattagaaggtgtcgttaattccaaaaaaggaatatgtcaacttagacagcataacagaatcgagggatttgattcttcccatgaattcaaagtcttgggatcaatgttccttaaccattcgtacgtaccgctggttcgtggacgtagtttcggaggaaacaattgtagacctcccaaagagccattaattcctggaacccggtacgttgctgcccatctaagattggaaaacaatacctgcgaggatatgtgtctcccagaatggaacaagcatgagcttgaagatagtagaagaatcattcgtatagagagaagataccagtcgaatgaaattgtggcctctttttctatagttgggtctgctaaagagaatccacaaacaaagccttcaagcgatcctgacgtgaaagttttggaagtctcgtgtctgaaatgtttcatcaacggcaacgaatctgacgagcaatttgtgactgaatgtcagtcagatgaagcgcattatggcttcacagagttaccaaaacaaaactttagcagaaaatcaaaaggctgcagccacaaaatggcaaataacacgattgcatgccaatactatattaccagcgtcgaagtcatcaagattattgaattactggtcggaggctatacagtttctgatcctcggcagaggaggaaagaaagaggccgcgtgagatcaaacttggctcaattctggtccaaacacttagtttcttcttccaagaaaacgatgaagcgccctgcgatgctagcatgcaacgaggattatcttgcagagctggaacagcgtatcaacacctatgacgtgagaaagccgcgactatttgataagagcgttaagattctcgaatggcctaatcttggaccagctttgcagcgggctattcagagctattacatggtgcaactggaagaatccagcaactag

SEQ ID NO: 1132 - DNA, 201 bp, Pichia pastoris
atgcatgcagtagtgggcgtgattgcttcgctgcatacaggtgcttttgtaagataccttgctggtgacccgaagcagcaatttcgaatattcactcgctgtctcaacaaggtattctactccgttggaaatccagatgaactaactgtactagtgtgtcaagctgatcggagcctcttaaaaatgaaggctcattactga

SEQ ID NO: 1133 - DNA, 795 bp, Pichia pastoris
atgaccaagtacaaaaagttgccagtttcttgtcataattgtcggaagagcaagacaaaatgcgatagaaactacccttgttccaaatgctacttaaaggatattgagtgctcctaccctgacaagttcaggtccttaagattagacaagctgataaagtcgaagtcgtcaggggaaactgtaaagactgaaagctcttccattctaggttatgactcaaataaaatgcagcagataacaccaccagaagagttttatatggaagacttgtcagccttctcaactgctagctctgactcaaaatctcacagtacagattgtgagacgagaatagacattcctggtatcaaaaagagtatccagttttctcatcagtctgacctcatgtttcttgacacaagctttgaagtttcagggagtttggtctctgttacccagtatcccgagggaatggacaaccctcttgagtttccacagtttgtgcaggacaaagaaaagaacattacattgattaaaaccttacttcatgaatactttcgcgttgctgaccttcctacgttcagctttcccattcgtttcgaagagatgtctagaataatagatgatgctgaaaagaataatacgtggcatctccataaagatcatctttttttggctatatcaattctacttcgtatactcaacattataccgttggaacatcctcttctcactaactgtgtgtttttgaaggataaagaagttcaggttgatctcttcaagagattttttttttacgaaatcttcttatattag

SEQ ID NO: 1134 - DNA, 657 bp, Pichia pastoris
atgattttgagcaagctgtcgtttagacacgtcaaatcaaggattagccagccgtatgttaacattagtgtattgaggccttattcctccaaaaagagtgcaaacaaatggattttaccaaacttgacaaaacttaacgaaactaaggaacacacagtgacaaaacagaaaagaataacgaaaagtggtttagacgaatcagacagagagcttttagtgtccttgaactctggacctcgtatgcatgctgattggaggaaaatgaaaacgcttccggaatggaaaaggcaaaagtttgcacttgtggaaaagctgcaagggtccaagtggaaccccaaaaagaagttgagcagagatacaatcgaaggaattcgtttacttaaagagaagctacccgagttgaaagctgattactttgccgaacagtttcaagtttcacctgaagcagtgaggagaatcttgaaatctcgatgggagccaactttggaggaacgggaaaacatagaggaacgatggaaaaggaggggagttaagcatctacaattgaaaattaaagaacaattattaaagacagttaaagaaaagggggaaaaatccgaggacgaccggaaaacaattgaaagcgagtttgaagatgatgtcattgttaataaataa

SEQ ID NO: 1135 - DNA, 201 bp, Pichia pastoris
atggatggtattaatttatcgaaagtattaggcgagcggtgggtggaattgggattaggtgcggtgcagtgcggttgcgcatgtgttatttacattttactgccagaaagaaaagatatcaggggtcgtctgcacgcaacactgcagcgactcagctgtgcacttacacttacagctaacaaatctagagttcaacggtag

SEQ ID NO: 1136 - DNA, 456 bp, Pichia pastoris
atgaaagtgctctccttatacttgctgaacaaatcgggtgggctaatttatcaacgcgacttcaatccagagtccaatggaatcaacaagctaagctctaacgattacttaatcactgcgggcactttacactcaattcacgctatagttgcaggcctaacacctccagttctctaccctatacaagaaaatcagacgggaaatcagaaccaaacggggctgtttcaagtggaaactgaaaaattcaacctgttcatttaccagacattgactggtttaaagatcatctccattgtccagaagggggtgagccaagagacggccacgagattcatggccaatgtgcattctatttattcagattacgttatgaaaaacccgttttacactttagacatgcctattaaatgccagttattcagcaacaaagtgttattgttgagtgaggctagttga

SEQ ID NO: 1137 - DNA, 2523 bp, Pichia pastoris
atgagtagtttcctcagaaaggggggacccaggttcacacccaaagtcactaagcgggaaatcaaggttgacactaaacaaaaaaatggaactgaaactgagaaaaaagtaacgtttgaagaacccgagaagtctgcaatatcagaagtgaaagaactaccagaaatagaaaatgtgaaagcagaagttatatcacagaaagaacaacaggaacaagcaagaccagtcgctcagcaagaaagtcctaaagtgattaagaagaaagcgaaagtgggtggagaggataaggaaactgaatacgttttccctcatacagtaattcatcaggaagaactacatataaaagtatcagatagtcagatagaacgatcgatggatctttccagagaactgccagaaaaggcaaaaacagccacagataataactttgaaccccccaactcaagaaccaagaagggttcagatttgacaaaattctcttttcctccaagcatcactggcgcattcaggcaaaaaaggttaccttccattagctccggtttgggtactggtatgctactgaaaaatgcctctggatctaacaataaaaccagcttccctcccaagagtgtgcgtatccccgatatactgaaaactaagacagataagtcatcagcggaaaacatcaagttatctcaattatttgtcgatgaagccgaagaagtgcaagaggagaaagacgaaggcgacgacgttgatgacgaaaatgaggatatacacacttcaaaacctccaaccaaaaataaaagaagggttatgaaggtaagtggatcctccaagcatgcaagaggtgaggaggatgatggtcaagactcggaggaactcacttctgattcggatggtacgcccggtgcgtcaaagaagaaacctataactaacgaaccgaacagtaaacgcagaaaaacgcacagtaagaaagttgctataatgtttacaactgaaggtaataaacaactagcaatggtacaaaacatcaatgtgcttttgaaggacaagcgttttctgaagaatggagatttgtcaaagttgcgcatagatgagaatgtcatctcattggcagagctgtgcaagccagccctgccaatcggtgaaatttccgataattttgaaatagccgaagatgctctaaaatcccgaagactgaaatctgcagaaagaagattaatcagagaaaaggcaagggaagaaaatactactctggaagaagttaagaagaagatcgaagaagaaaggctgaagattgtacaaagtaacagtgatgttaatgaacttgaggtcacttccactgttaaaattttggcaccagaggctccatctacaaattccgttaacacagtgcaattgcagattcaacaagacggtacaattggtgtggactctgaatcacttatgttaaaccgccacaaaaatgaaggcaacgaagacaaagaacgtgaagaagaaaacaaattcaagaatccagtcaattttggaacgtacggaaagtttacatacagtgagcgatggtcgtctgaagaaactttaaggttctaccaagcgttagcgtcctggggaactgacttttcgattcttcaacaattgtttccctatcgtacaagaaaacaggtcaagaataagtttaatttagaagagaggaggaatcctgaattgattggcatggcactgatgcgtaaactgcccccgaatctagaaaagtattgtcaggataccaataatagtttcaagactttggaacagtacaaccaggaactgaaggaactgaaggtgaatcacgaaagacaattgaaggagatgaaggagctacaagagaagtcaagattagaggacattgagtctcagagattgagagaaattggccgtagaactggaacgaagaaagttaccagagcacagatgattcaagaattgcgtgccaatcagacggtcgtcggtaccatagatgaccggtacaactatcatgtattccccaaaggaggtttgaactcttcattcaccgagcatgtagtcatttactcgcagatcttgaagcacaccatgaaattgagctattttgctttgtcgatcggagtttccatattgattgtctctcggtttcagttggacgcaaggtattcgattgggtctgtaatcggcctactcattatggcaaatcacttgtatcagtatttaagctttgaaatcaaagaatcactgttggttattccaaatacgggtatacaaataacttccacacggatcaacgatggtattgccaggagctccaaaacattagattcgcatttcatttctaatgaatacctctccgatattgtgatcaatgaggcttttcaaggaaatcaagttgtatactacatggtggctgtaacgaggaagaacgataaaatcaaactgctggttatattcccaaagctcttacctagactaaacattttgcagaaaatcctcgcaaacgtaggaaacccagtggaggtcagccaagaataa

SEQ ID NO: 1138 - DNA, 852 bp, Pichia pastoris
atgtcggccagctattggtctagctcgcaacgattacattggcaattcaccagaaacgaactcaatgaacacagagaacagatacaagcattggaaaagaacttaaacgtgccaggctctgatctttccaggataaatattaagtatgacaccaatatgagaatctatctccataacctgatgcataaactgggaagaaaactggtattaagacaggttattctgagcacagctgaggtatttatgacccgattcttgctcaaagtttctatcaaagaagtgaacatttacttgctggtggcaacttgcatatatgttgcctgcaagatggaggagtgtccacaacatatacggaatctagtaagtgaagcaaggaattgttggcctgaatttattcctaatgatttgacgaaactggccgaattcgaattttacctaatagaagaactggactgtttcttgctggttcatcatccatacaactcattgatatcaatagtgaaagatgtcttgaaagatccacggtataatattgccatcaccactgacgaattgcaaacatgctggtcaattataaacgatagttatatcacggacatgcatctcttattccctcctcacattgtcgccataacatccctttatatgactttggtgacgttttcaaaggattccaaaaagctacagacttttgtgaaatttcttgcccattgcaaagtggacttggacgagatcatagaaagcacacaagaattattaacactatatgaatactggaatagttatgacgaactgagtctgagaaaggcagtccatcgtcttctcctaactttgaacaacagtaaccaataa

SEQ ID NO: 1139 - DNA, 444 bp, Pichia pastoris
atgatttactcgttttggatatttgatagacactgtaattgtatttacaatagggattttgctcaacataagcccgcatcaaaagatactgtgaataggaataacgataaagacgaggctaaacttttgttcggtgcaatattctccatgtcaaggctaagttcgaagctaagcgatggaaacgttcttcaaagtttcagaaccggaaagtacaaagcacatctgaaggaaactgcaactggtttgaggttcattttaataagcgactcgaacgttggtgatctcagtgggttattgaatcaactatactcagacttatatctgaatacaatagtgaagaatggcttatctccagttgatttcaaagaggggatggtcatcaagaatatgtcgtttatcaatggcgctgatgaattaattacccaaaatggggactttatctaa

SEQ ID NO: 1140 - DNA, 360 bp, Pichia pastoris
atggagctactgacactgtctaatactgatgcgtctttacgcgtatttccaaatgggctacgcaaactaaaaaccagatactccagctgggaacgatactatacacaaatctacaacgcttgcataaaaaatgctccgaacgagcagttcttcacccttatagatcatcactactcttcaagccatttctctttaacctcagacgcaatgacagttttgtcttttaggggaattgagaaaaaaagcccatcaaatgttctgaaattaatgctcaacctggctcacgcagttctaaacgtcttcctctcagtgatgcaaaagaaaaagagcaagaaggataaacccccattgttgaagtga

SEQ ID NO: 1141 - DNA, 1344 bp, Pichia pastoris
atgcaatccctacttttggatggttttcttaatcaaatatcccctaaagagctactgaaaatagagacagaggcctcatataatgacctgagcctgatatctgatgattcgttgaatactgcaactagcaatgtcaaattttctcaagggttcaagtttgacagtcaacctcacaagaattccatatcatgtttagacttggaaactatgaacagtcaattcttactttccgggagtactgatagctcgttgaaactatggaacattcggctgttgcaagaaaataaacaaaccgacgattatcaatggcaaagattctaccatttcaaaagacaacatttgcaaagcgttaccaacttggtgtcggtacccagaaagacaatccacgactttggcatctcacaccttcagtggtggccatttgatcctggaatgtttgttactggatcttatgataacagcgtgaaggtgtttgatacggagaactttgaacaagttttctcgtttgatttgaaaaataaggtctacaattttgatatcaatgctacaggccaacatgtattagttggggtagcatcagaatctcccatggttaagttactagatcttcgaactacatctgattctcatatattgatgggccataaatctactgttttgtctgtgaagtggtccccaactgattcgaatataatcgccaccggagatattctcggaaagattaacttgtgggatattcgacgaagcaaatcatgtgtctgtgagcttgaccaatataacactacaggaaacccaaatccgagtagcagtgccgtggaaacggttaaagctcaccaaggtgctgtaaatggtatccaatttaacgagcttggttctaagctagttagttgtggattagacgaaaaaatcagatcatgggatttaactcaaccaggaggcgttaatgagctcttgaattttggccctctcatcagaaacaaatctcaccaatataagaaattcatactttcacccagcacagaaacggatcttcaatttttgctatttcccaacgacaatggagaacttctagtttaccgcctagctaatgggaagttagtgaaacgactgactaaaggcaataaggttaacctcaaattaaactccattgtctacactggtttctcgtcagccacatacataactggagattcaaaagggaatctcgacgtttggggtccagaatcagagtatgaaattcatcaaaacgatggcgaggcagagagaagcgaagaccgaaatgtgttagatgacatcaacgatgagttaatcgctcgcaagaagatgaagaccaacccgttctaa

SEQ ID NO: 1142 - DNA, 456 bp, Pichia pastoris
atgtcagacctcactgcctcccgttttcgggagtataaggtgatgtataccacagagatcactcaaaagcgtaaacggtggcatgatgggactttaagggtgtttgactttaacaataagtgtttcctgaaagatgatattctcggtcaactcgtggagacatcctttgttgatggctccatagctttcaatgacggagccctggtcaatcttgaaggcgttctcatcgaggttgagtatttgctagctgtttacgagagagatgcaagttccgtcatatgcgggtcacttgggacacatcctcaagacgttaaacccattacgaaggttctttgggaatccgagaaacatcaaagtcatgacgactacaaggtagttgataacgttaccaagcgggttgagcaacgtccaagatggagaccagtggggctaccacgtcctcgttctaagaagtaa

SEQ ID NO: 1143 - DNA, 1209 bp, Pichia pastoris
atgacactctgccatccgatctggaccaaccatgttgaagggcttgatatgtcttacataaccacacaaatggtagttggaggggagccagcttcatcatttcctaggacattgtacagagatcaggtcaaagtaatcctggagtacttgataagcaaagttggagacaatttcacatgggtcaatctacagctggagccttcagattatgattttgatttgatacaaaactttaaggagggcgctttcattcattttcctttggaagatcatcaacctatcccaatttcaaaacttctccagataatctacaagatacacgagacctatcaagaaaacgacaatgaccatcttatttacattcattgtaaacagggaaagggaagatctgggacagtggcgtgtgcctatctattgttcaagtatcagtatctctccacacccgacgagatcttcagcagattcgaacagattagaatggccagagggtttcaccagatttatagcttttcccagaaaagatatctggagtatttctatgatctgttgattagttctgaaagacagcaattattcaatctatggtatggttctggagtgcaggctcaagtaattcaaattcaaatccatggattatacttgccttttcaacaacaggtggaggtagcgcttgacgagcgaaaccttcttcaagaaagtgaactcatagtaaagagagatactttgttgattaaccttaatcatgttgttgatcaaagtggtgacttaaaactacaacttaagacatcctgctttggtgtcccttctagtttttcatctctgtctattaatgttttgtttgagacaatgaataaccctaaaatcactgactgcactgattcgtttgtaaagttcctcaaaaaaaaccaaaagacagaaattatcattcctgatgaaattaacgcagagcaacagccaacagctacaaatatgaagttctcttctatgagccccgtggagatacaagtcccacaatgcaaatttgatggcataaagggaactaaccaaaaagggttgaaattttttgagtacatcagactcgttgtgaaattagaatctagcgatacccgtctcttaaccaaatcaatgcaggctgttcaagcatttaacagtaagcttttgcatcacatggctaagtcagaacaccaattttcagttttggggaattga

SEQ ID NO: 1144 - DNA, 714 bp, Pichia pastoris
atgaagagctggcagtttgatgaggaaatagctcttctccgtgcagcatgttacaatcgtcctgtaggaaaggacaaagccaagcatttggaggctttggtaaaggttttatctgatgctgggtatgcagtaaccgaaaaggatgcctgggataagttagcggagtactacgatttcaagcaattggaaaacttggatctatccgaccagtctccaaatgaagaggacattgcttcaagagatgtgtccaatgacgaggcacaaaacgaagacgagactgatgccaccggtgttggcgaacccgagcacatgttagaacgagaaggaacaccaagaactcgaacaagatcaactaagattgaaaaaactctcacaccaacaaccaagggccgtaagcgaatagataattcagacgaatctgacagatcggatagggagcggagtagaacgcccgtcaataaaggaattggatatagaacaagacggagaactcccaaagaccgtctaaaagatcaagatgatgttgacggcagcagtagaaactctaatgacgaagacacgaggaacaacgatagtgagctagatgatacagatacacccaaaagagtcactagagcgtcttctagaatatctagaagaactccacgcaaggacaaagacaccattaaagaccccaaagatacaacgagcaagaggcgaactcgggcaaggtaa

SEQ ID NO: 1145 - DNA, 978 bp, Pichia pastoris
atgacttacgcacatcccttgcaagcggatatcaacccctacttacgaactccattagtggaatcagtttcactcagcaggctggctggctgtagagtatttctcaaatacgaatgctcacagccttcaggctcattcaaatcaagaggactgggtatgttagtgcaccattctgtcaacgaagcaaagaaactgggatacgaacaacgccctcatttttattcatcctccggtggaaatgcaggatatgcaacagctctcgcatgtactctctacgacgctccttgtactgtggtgatgccagcaacgggagctaaggtaattctccatgggaacaacattcaagaggcagacttatatctaagagggcttttaaacaaacgaaaagaagaggatgatttcaattgtgtgtattgccatccttttgacaaccccgtgatctgggaggggcattcaaccattgttgatgagattattgatgcagatataaacatatctaaactgcgagcagttgcatgcagtgtaggaggaggaggtctccttaatggaattgttcaaggacttttaagaaatggattgacaattcccgtaataggaatagaaactgaaggcgctcctactcttcagaagactatggagaagaatcaagtgactcacctggaaacatttgatactgtcgctacttcattggcatgtaagtacgtgcctcagaagacgcttgagtattgtcagaattatgatattagatcagttcttgtttctgataaacaggcggtgacaagttgcatcaaatttagttttgatcataatgtgatagttgaaccagcgtgtggagcttgtttggcctcaatttacttcagcaagctggaccatctaggcttgaatttgcaacccgatgatgctgtagttattattgtatgtggagggtcaagcactactttcgaagaccttcatgagttcgcgatatctctcgcttga

SEQ ID NO: 1146 - DNA, 585 bp, Pichia pastoris
atgtttctgacctcaaaaaacatggttttcttaaatgcaatggaggatttctacgaaatcacttactcatctacgcttaatccacattctggttgcaaaggtctagttgctgcaaaatctttcactttcttgcgaagaaactatgattgcggtgacgtattgactgtaggacaagttgcatcttccaagtccaactcgaaagaaaatgtcatcctaccaaagattgcaaggcccagacctgatgttcgccagaagaaagaccaagcgctgcgcactaatgcattgggggatgttatttttgttccattcatatacgttttcaaaccaagtatacttcgaaatgaattgccagctagtatcatttattttctattggttggccttatgcatactgcaatcctgttcgcgttaatagcctttcgtgcatgcaaatactatttgaaacctgcagagagttccaggttccactttgcctcgcagttggtgttgtctgtgtctcctgctctacaagggtttgaacagccatgcaaaagtaaagtaactttagagttaaagttgaaagtgtttgctaccttggcaaaataa

SEQ ID NO: 1147 - DNA, 1614 bp, Pichia pastoris
atgcaattgtttttagcaactctaggaattccgttcaccggcacattaccagccattgctggtaacgaggatcatagcagtgccaacaacaacaatggcaacggtttcagttatgactggcatggaaatgatacgctttttgcggaactcttggaaactgacttttttgatcatccgattgatgacgcaatgctctgctccttgttatcccctccaagagctgctgagactgagcaacagcaagatacagaatgggagcaacaaaaacacacaaatctctttggttgctgccagaaacacaaagttgaaatggccaaacagcaagaactgtatttgctgccagataagcttaccaagaatattttcaattcagagtcgcctgtgttcatatgcaccaagatcccacaaacaagttcggttcagtcgttcgtagatgttgatgcttctttgcttgccactgactcctccctaagtaaagattcattctctgcagactcaacagttgatgtattgtttgagcagtcagttcaagagccatacttttaccgttcaaactctgcggaaacagcacctccatccacagcatgctcctcagcgactctcgatctggtatccactttggaagcaaccacaacgttatttgaggaagccgccaactccaaaaaacaaatgattgggcttaaacagcaatccaagatcgaagatctcagtttttcctgcaaactaaatttctcagcatcaatgttccttgaccattcatgcataccgctggtgcgtgggcgtagctttggaggaaatagcagacctcccaagacgccattaattcctgggacgcggtacgttactgcccgtctaagactggagaacagtacaagtgaagatatgtgttttccccactggagcgagcgggaacttagcgactcaagaagaatcattcgtattgagagaagttaccagtccaatgaaattgtagcatcttttttcatagttggatcggccatagatcacccggagactaaaccttcatctgaattagacgtgaaagttttagaagtttcgtgtctaagatgttttatcaacgacaatgaatctgaggaggagcgatttgtcagtgaatatacctcagatgaagcacgagcacaacatgccttaacagaaccgctaacgtcaggcttgaacaaagaaccgaatggccataaccctaaaacggctgggaattcaattggatgcaggtactatataaccagtgttgaagtcatcaagataatagaactactgattggaagctattcaacctcagaccctgtgcaaaggagaaaagaaagaggccgtatgagatcgaacttggtgcagttctggtccaaacacctagtgtcttcctccaaggacactatgaagcgccgttccgtgccaacatgcaacgatgattatctttcggagctggaacatcgtattaacacatatgacgtgagaaaacctcgaaaatttgacaagagcgttaagattctggaatggtccaaacttgggccagctttgcagcgggctatccaaagctattacatggtccgattagataattccagcaataaaactgcagcaacaaatagcagctaa

SEQ ID NO: 1148 - DNA, 1710 bp, Pichia pastoris
atggcttttctaactctgcccaagaatgtttttactagtacaaagtcagaacactccacagaagagtttcaagaaaacgtggagaaaagtagcagcttagagaaagaaactgtcggggaacagactatcgaacttgataccggagacagaagaattggattggtgactgccgcattcttaatcaccaacagaattttaggtgctggtatttttgctactccaagtacaattctgcttatgtctggatcggttggaactgcgctcatgttatgggttcttggaatgcttatcgccctcagtgggctatttgtatacgcggagttcggatcttacccatcccgtctactgcagagaaacggtggagagaaaaactacctagagtatgcctactcacgtccaaagtacctggttacttgcatgtatgctctgtatatcttactcaccggtgggtctgcaggtatctgtgttgtgtttggtgagtacattttgagagctgcgcaagtggagccaaccgagtgggcagctagaggccttggaattgcaagcgtttgtttcgcattcttggtaaacacattaaatgtgaaggttggtatattcgttttgaatgttttaggtactttcaagatcgtcattgtacttcttatcgcagtaactgggtgggttgcattaggcggaggaataaaaaacgaggagttcacacctacacatgccttctccaatgctttccaaggaacgtcgccgacagcttatggtgtagtgatatcgctgtacaatgttatctggtcgttcatggggtactcaaacgtcaactacaacttgtctgaagtcaagaaccctatcaaggcattgaaatactctgctccaatagcagttgtatcactgggtattatttacattcttgtaaacattgcctactttgcggtcgtgccctttgatgtgatgacgaactccggaagaatcttagcggcagacttcttcagaattgcatttggaacgagagcagaaagggcatgctccgtattcattgctttaagtgcacttggtaatgtaattgctgccacgttctctcaaggtcgaattgtacagcagtttggaagggagggtattctaccatactctgccttctgggcttcccaaaaaccattcaactcccccttcacgggattgctggaacactgtatcattattatcatcactattgttgcgcctcctgcaggtgatgcttacgactttgtgctgaacctgatctcatacccaatgaacataatcaatttttttgttgctggtgctttattgtggttgcgttatgaggcccgcaaaggccgcagagaatggataccgaatattaaaacaccggtaccagttattgtgtttttcctgctctcttcgttatacctgatcattgctccgtacattccaccggcaaaaggacagagttcagtgtacaatcacatgccttactggattcactgtgtagcagcctggggtatctttgcgctgggagttctgtactggataatatggggacgagtcattcctaaggttggaaagtatcgccttatttcacgagatgtacacgatactgatggctactggagaaacaaattcttcaagattccgtactcataccagcaatcagatgaggagtttattgcacaagagctccagaagcaggcggacaaagaaacgttttctgagaagccaatctaa

SEQ ID NO: 1149 - DNA, 390 bp, Pichia pastoris
atgagtgcctctgatcgaagatcaagccattacatcgtgaataaatgggtaatcaaaatactaatacagaggatgaaacttctattccatatatggcgtagcaaaacattaccgaaagcctgtcactacccattcgccggaaattttggtatacacatcgttggtagctaccttctttttggttgtttgaaaagccgaaaaaggcgacctcccgtgacgttaaagctgatgtggcggagacgtgcggtgcagaaagttacacatcttgtcccgctaaagttatcaagctatcagatgaaaccatctgagcttattttttatgccatccaaactgatcaaaagagccttggttgcaaatcaaatcagatttctggagaattgactatctaa

SEQ ID NO: 1150 - DNA, 153 bp, Pichia pastoris
atgccctgccatagacgtatgatggacattaggaaggttatcaagttcagtgatgtaggggacattacgatggcagtctgtggtatacacttccgttgccgtctgttttccttcaacaagggaatccggcgacagtcatattcgactatctag

SEQ ID NO: 1151 - DNA, 774 bp, Pichia pastoris
atggataaacggcaagcaagaccaaagtcttatctttccgttcatgattcaattaagaaccaggtgtccattgtaaagaagcctctaatcatctccaaagacttgaacgaaatattgaaaactcaacatcagtatgaaccgaatcaagctaaacatctcagtccccttgcattgaatagactaatcagaagtgttaattttctacttaaagctcgttacgccagcatatttaacagacaggccattcatttggtatctttgcaatacattgagagcgagaaaaggatggaaatcgaacgattggacgagtttttgaaactttattaccttctggaacctttcaattctcaagatcacagtgcaaacaatgttcacggtttactacttgttcaaaaagaacactttatggacaaagtgcacaaactcccaccttctagcactgtggcgcatctattaaagcaaagatcagacatcaccccgcttctggccagttatgacaaagtgaaagagaacctaatctccaaagaaaataaggttgaagcgctcaaacagaaattatcacactacaatgacatcttgaaattactgactagcagtttatcagacccagaaagactccagcaaaatttagtgattagtagcaacacagagctcacagctcagattaatcagctacggattcttctcagcagactggagtataaactacgggaccccaaagtgaagctacaagtcagtaacactttgaaagcccttccctcaaaagtaaactaa

SEQ ID NO: 1152 - DNA, 1098 bp, Pichia pastoris
atggctctagatctggggtcgatcttgtggtatttgcctctcaaagtctatggcacggcccaagtgatggtagccattttaagtttcctgatctggcaaccaataatgagcgttatcgacgtgctcttctatggtttgatcaggcttcccatgtcaatactattgtttaagcttctactgattgaggatgaaaaactccaagtacatgctggccgtgtttgggaattctccaagataatgtatcaattcctcagcgctgcctttatcgttggcacttgcgttggagtctggctagggctcagtctcatattggttagctacctgctactttgggaaaaaccaatcttcacccctttcaaaatttccaatgtcctcaagtcaattgctgagtacttgggattcgcagatttatggtccaagattgtcagttctttcggagaaccaaatgctgaaggccgagaacataagaccaaacgatatgtcctaagtttgaccagtgaacaattgaaggcaatgttggttggagataggaagaatgtaaacccagctctaagcgaaggttctacgttggttgaaagaacacaaagttcaagaaacaagattgcacgttctgtttccaacaactttagcaagttcaacaattccccaagaagattttctcctttatcaccgaaatccaatattgaagttgtcaaccagaacttccaaagaccgagtagttctggaactacacggacctctacaagcacgatggattcagcagcttctactctaactgagacttcactacccaagggcaattcaccagtgagccatccagtacccccagagttaacagttaatccattagcaattcctacacagccgttttggaggtcaccgtcaacatcagacgtgcagcagttgacagaaaccccgagatcatcacgaagccccagagactcagtaacctcaatagtggacccgcaatatgacgacgataggtatttcactccaattgtctcaccgcaggccccaagatcgtctttttcggcatcgaataaccccgagagctctcgaagtatatccgattatgtcattccagaagaggaagaatga

SEQ ID NO: 1153 - DNA, 1212 bp, Pichia pastoris
atggagcttcgtatctctaaagtaccaacctctctatcactcaacagtagaagtcgttcactggaagatcatgtccattgcgaagcctttaaggatgaggagaacttcagtagcacctattacgacagcggcatgcctcaatatcgcaagcatcacatagaattggcgttcttaatgaaaaatgacaatctttctttagcctgccgtcttcaaaaaatttctgacattctcctgatgaatgcaagatccagaaatttttcactcatactcaagcctcggatatcaaaactactacagaaaacagtgttaccatccacggtgcaagtaatggaaaacattcagctctacttggaagaagagccagagatagtaaatagtctcatgcaaataattgaatccatttacattttggaaaatgctcaagagtgccagccttttgagcccactatttccgtgctaacagacttttacatttttttgacaatgcttcaagaagccgaaaatacccatacgttggatgtatggtgtttgaaagtgctggatactgttgcagttgtaactgaaacctcaagaaattttgaggaaatcattagttggctcgtggatttcttgaaccaaatgaaaggcaagcaaacttccatttggcaaaactcctttgatcttttgagtaaagttttgaaacacatgtctagcttatgtgaagcaccgctatctgatgcactggagagaagtgaaaatggaaaaattttgaaactttcactagagtctcaatataaggagtacgtaacatttgattattcaactgccaagtattttccactgaacatttctgaaacccttaatgacatcaaggtttggaagtatttggagactgaaaaaaaattcccttccttcgtagctctctttgaggcaacacaaaatagttcgtatctttccaagaacactgcattgcatcttcgtcaacctgactcgttgtcgaacaacaaaaatcacagtccaaacgttgaaaaagagaacctcaacactcacaaaagtatccttgggattctgtgtaggaaactcaaacattcactagctaaacgtgttgcatattccaagcagattctcaattcatttcttggtggtgacattcttgttccatcaattggaaaaacagatagcagtgcattcaaaaaggatgtttgcaatgaatctgtacttgacgtaatttaa

SEQ ID NO: 1154 - DNA, 729 bp, Pichia pastoris
atgtgggctacgtgtccaggaagaattcaacttgaacgtggcgaggcagaagagttagacttggaagagatgagaaagactgcgacttggggacgagagacaaggcaaaaattgatccgctattcttttcagaagagctctaaattgtccatactaaagcccaacataaaaatggatcttacctattctgcatggaaggaacgagtgaggacacgaaattacatcttgtcaaaacctgatcaagagaagccgtccaccttcactaggctgtataggaaagtggtgaggaattggaaaaagtccacaatggacgaaacccaaacacccaaaggccaaagttctcccatgaactgcactatattttccagtagtttgaatcagaagtacatgtcatcagattatgagtattcaattccaagacgagggtctttgagagattctgaagaatcttcactagcttcaattgtcagtccaggatcaggcatcattcctttaaaaaaggatcactcttttcgacgtcaaaaatctcaactgagtcgttattcttataaacctgctgattttggagcaatatttgacaatcttccagaatccactgacaacgacagtcaaacattcattgcttctcctctgagtgattcaagtccaaaccaagacctatggaatcatctccccattagaccgttcagagcaatagatgatggacttgaagtagaagaaagtgactaa

SEQ ID NO: 1155 - DNA, 591 bp, Pichia pastoris
atggagaaacaagatcatcagctccccataactaaaggttcatacacaaactatccaaagtccaaaaacaccagcatctattatgcgatctttctggaaatactgatattatacggtatagtaaccaactatcaacagttgtatgaacacagcgagtatcttgcgggagtgtgtctggggtcgttttctacattattttcacaatcaatatcacagttatacaggcaatctttcagctttgacaaacacttcaagttctttctctggggttgcataaacagtctcatttccaacttttggatcggaatacttttgcattccttggacaataatatccaccgattccttcttgatcaaacggtgggagttctaactggacagcttatatttgtgttcttcaatgcattttgggaatcttcactcaattatgcgtccttgaaatccacatatctgacatgtttgagatattcttacatgatttggcccctagtttcgttccttagttttttccatcttcacgaggattacatatttccactaaattgctttgtgacattgatctggaacataattttggccatgatatcctaa

SEQ ID NO: 1156 - DNA, 1533 bp, Pichia pastoris
atgttgagacttctgaccattggaagtatagcagtgtcccttttccctgcttctgctgagattccacctttaagaggggtagctcctgaccttttggagaagtacgttcctgataaggatggaaattggaagtgtctcggtcatcctgagatcgttctgcatttcgatcaagtaaatgacgactactgtgattgtccagatggatcagatgagccaggaactgcagcgtgtgaaaatggaaagttttactgtgcaaatgaaggctttgaaccgaatttcatacctaccttcttggtggatgatggagtgtgcgattacaaggtgtgctgtgatggttcagatgaaaaatctggtaaatgccctaacaggtgccttgaactagctgagaaggcggaattgctgcggttggaaagaaaggcacgattggaaaacggattgaaagcaaagagagatttaattgtccaatcccagaataaattaagagaaatctcccaaagacgcgccgagctggagaaaacaatccaattggaacaacagcaactaaactatcttaatgagcaagatccaaatgattctgccttgcgaaaggaagtggatccccaattagaaaaagtcgtacagattctgaaagttcaaaaagatgaaattttacttctcaaaaccaaagcagattcgttagagagattactcaaggagctagagaaaaactacaacccaaactttaatgacgccgctgtgaaggcagcagttcaagggttcagagattattcaagtaattctaacgatgactcttattctgacttggattctgttgaaccggaaaatatcgtcaaagatatccaaaagaccattaacacatttgctttcgacacttcaaacgattctaaatacgaatcgatttggagcttctggaaagaggtattagcagacaaaatcgttaagatttatcaagagtttaccgcggtgccgctgaaaacagcttcaaagcctttgaaacccatatctggaacagctcaagagatacagaaaagcattgattcgcataataaggaaatagtgaaaattgattctgatttagagaattcagaaagccgatacggacttgaagacattttcagagcatatgacgggagatgtttcgttgaaaaaattggagattatgattatgaatactgctttacgggttccttgacccaaatttcttctaatggccaaagggtttcgattgggactagagataagatagaggtgttggaagacgaacaaagtgttggtggttattcctatagagtttactatgaaaagggagctaaatgttggaacggccctgttagaaaggcaatagccgttgtgcaatgtggtgatgttgaacaattggtttctgtgtcggaaccagagaagtgtgaataccatctcgtggtgcggagcccagttggatgtttcagtgaagacaatgtttatctggtaaaggagattgctgaaggagagtcacatgcccctttcaaggtgatacctttcaaagatgaactctaa

SEQ ID NO: 1157 - DNA, 1479 bp, Pichia pastoris
atgctatatttggtgacagttcttttgtttctcgtgcatgtggtccttggctatatccatcccatcaccattaaggggaagcacttttatgactctcttacgggtgagcttttcatggtcaagggagttgattatcagccaggaggtgcctctggagtttcaacggacaaagatcctttatcagaaatagaggaatgtgctagagatattctcttgttccaggaacttggaataaatactattagagtttattcggttaatcctgacttgaatcatgacaaatgcatgtcgcttttggcttctgctgggatatacttgatcttggatgttaattcacctttgccaaatcaaagcattaatagatatgagccttggagctcctataatcatgattatctataccatatcttcaaagtggttgaacaattttctcattataacaataccttggccttttttgctggtaatgaagtcgtgaatgataaggtctccgccacacattcttctaactatatgaaagcagttgtaagagatttgaaaacatacatcacacatcatagcgatagacctatccctgttggatattctgcagccgatgatctttcttttcgaattccattggcaaagtacctagaatgctcaaatagtacagctgaattggatagcgttgacttttatggagtcaacagctaccaatggtgtggctatcaaaacatgcaaacgagcggctatgaccagttggtagctcattatgcggattataccaaaccaatcatgttctcagaatacggatgtaacgaagtgactccaagaattttccaagaggtggaggctatttattcttctaagatgagctctgttttcaacggaggtcttgcttatgagtttgcccaagaaccgaataattatggaatggtggaatatctttcagatgggagagttaaactattgaaggattttgaaactttcaagaaccaattagctaaggcctcagaaacttaccacataaagcagatgaatgaaaatgttagatccgcaccgcttaaatgtcagggcacttatgaaaatttgggggacaaattggttgttcctcaaagtctaggaatggccttcattacgcagggagtcaaaggtgagaaaggctcctacgtagagttgagtgatgatgattttgttgtaaagaaagaaatctttctatcagatggaacaaaattccagaagagcaaaattgttgctacccataatttgaatggaccagatacacagcaaacagttccagaaaaatcccagggctcaaaaaatggacaaataacaaacccaaatcccaaacccaaaccccaaaccaggaagattccaaacaaaaagaccaaaccaaagcagaataaacaggaaaagtcaaaggtacagaagcaaattgcaagagaaaaaaaaatcagagcaatcaggcaaaggcaacaggaatggaactttaaggtttga

SEQ ID NO: 1158 - DNA, 876 bp, Pichia pastoris
atgtcaaatatgacattcactcttgttgtcctcctattgtctttctatcacccagttggcccttgtcttcaattactgacaacaagtatccctcctagttttctaactatggtccctgaacactacattggttccaaatccgtagatgaagtcccaacttcggaagacccacgggtcaatgcctgcccatacatctgtgacattggtgattgttccagaggctactctcgtgcttcccatctaaaaaggcataaggagacatttcacctaaaaacccgtgtgttccattgccctatcgaaggttgtggtagatcgttcaatcgcaaagatgtcagagatcgccattacaggagacatgctgcagatatttctgataatagtcttggatcgggtccccatacaatctcaattgtaggcatagaaagaaccgatgaaaacactaatcccattgaggcacagtcaatagaatccctagagctgatgagttccactcctttaacaccgaaaagcataacatattcaacgcaaaaacagtaccacgttgtccaaactccaaagtttatcttgggaaatttgatctgtactgggagaatctttggcatcaatggaagaaaagggagcattcctcaaactaccacggatcagactcatcatgcaattcgaaatgtatgtgatgttttaagggaggctaaagcttccttggatgaggttattcgagtaagtgtctttttagtatgcttggaagagtgcaccgcagtccaaagtatatgttcccagtattttcctgatggagcagtttatgactttattcacataaaattttctcctggtgaatgctttagggtgcaattgcaagtggttggtagaggtgaatag

SEQ ID NO: 1159 - DNA, 1038 bp, Pichia pastoris
atgcacagaattcctcttttgagcagattaagcgaccaagcagttgtgtcaaataatcccgccctgcgtcgaagtagtaatagcactgtggacccaacacattcactatcacataggcgactcagtcaagagacactcacaacacttataaaccccttagcggcaacaggaacctcaccagcaatagttgaaaatgtcacaatgttaaatatggaatcacgaattgactctgatacagagtcattgcaggccactttgaccgaagatgcattcggctcagtgtttgaagtaccagcgatttcttatacttacattaggaaattaccaattgtcacaagcaatttttttggcaagtcagttcatgtgtttgcaagcaaattagatgtcgagcagtttaaggcacaggggaaaaatggcgaagtaactcctattttgacattgcattctcaacgagggattcagtcactaaagaagaacagccctcaatgcatactgtacagttatgacggaaaggatagagttgagcacgcccgtatgtatcatgacattctcaaaaataataatcacaagtataccatggtattccgagactcatcaatagttgtgctgatcaattctaagtctggaccttttaccgattgtgagttcaaatctactagattaaggtttcttgggacaactggaagttattccacatttggatcaagagctatcacagcagttactgttacaaacaatgatattgagcttttaacagatggttattcagttgatgaactggcgtcctctaatgatttgaaaccaaagttgaacaaagttgcggtgaaaaatatcaaagagttgtccaagtttattccttttgccacattgagattggagccaacttcagtcatcacaaaacgaatacagaaagtaggcgagattcaaacatttgatcatgtggactcaagaattccaagttccaattgcatggcaatgttggcagtactcttggtactaagggagcaagaaactatgaaaatacagagaaatgattaa

SEQ ID NO: 1160 - DNA, 870 bp, Pichia pastoris
atgatagaaagaatacgggatctaatagccagttggaacggaaataaatttattttgaaatggcgtatatgtgacgtaatatctttggtcattataatcgtactgaattttattttccacagagctaaaccgttccaaagacagttcaccattaacgatccaacattatcacatccccttgtcgagatagaacgagtctcaggaacaatgtgctgggtttatgccatgtttattccttttggatttatcgggatcgtgtgtctcgtcgtgacggaacgacaaagtgcagcccacatggcctttatctcgttgttgggattaactagttctgtgttcacgacatcctttatcactggaatactgaaaggctggataggaagatgtcgtccagattttttagagcgttgtttgccatcggagacagcgctggagggcgtgtggtatgaagctcctgacgtttgtaccaccgacgacttggcagcattgtatgatggattcaaaaccactccttctggtcattcttcggtttcatttgccggcctctcctacagtgcgttttggcttgcagggcagctaggtgcaggggttgaaggcagtgatacttggaagtcatgggtgtctagcatgcccctttttggcgcatgctacatcgcactatcaagaactcaagactacaggcatcattttgttgatgtgatcattggggcaattataggcatcgtgtttgcttatacatattatagaaagtacttccctggcttgcggagtgaagtctccaatatcccaatgatcttagaacaattcaaaaatactgatccatccactctcgaggaggaagctcctgactttgaactccaagaactaccctga

SEQ ID NO: 1161 - DNA, 2409 bp, Pichia pastoris
atgcttgcatcattaaactctcagcagtatgaggcagtgactgcagatattcataagccattgcaaataattgctggacctggaactgggaagaccaaagttttgacctcacgcgtagcttatcttttgatagagcacaagatccctccttcgaatattattgtcacaacctttacaaagaaggcagccaacgagatggtagaaagactgcaggttctatttgcaaaagagaaccttgatcccgacaaatatctaaaaggtctcttgataggcacttttcattcaatttgtgtcaagttattgagaagatatggaacccaaattgggttgactcccaagtttaaaatagccgatgaacgggattctaacactattttaagcaaaattttgaccaccttgtcagatgatgttgttagattaaaatttcatccatcttctgtttcagttgacatctatcaaaaggatcccaaagagactgataaattgcatggatatgatctgaaaaaggcaaaatcgcagatctccaaacttaaatcgttgactaccacgccgcagacatatagtactacttctgcaagatcatttgatcttgctgtgatttactctttataccaggagagtctacgaaagcataatcttattgactttgatgattgtctcttgtacacttatttgcttctttcagagacaagaaaaaagggacgcgttttactaaaggaactgaagcacgtcctggtagatgaatttcaagacacgaacaaaattcaaatggagctgctctatcttctaggacagtgcactgatgatcaaaattttgaggacaatgtcacggttgtgggagactctgatcaaagtatctacatgtttcgaaacgcagtggcttcaaattttgaaaacatgatcattcactatcaaaactgtcaggaaataaccttgaaggagaactatagatcgacttctaatatccttaatttttctgagcagatcatgacccaacagaaagacaggaaacaaaagtcattaagatcacaaatttcacatctaaatatcccgattgtttatgtgaggactcagaataccttcaaagaagcagaccacatagcttcagaagtagctaagcttggattaatgtccggtctattaaccagctataacgatattgctatccttttacgttcttcttttcagtctcgtgtcatcgaacagagtttggtgaccaatcgcataccttatgaagtcgtacatggaagagcattctgggaactaaaggaaattcgtgtagcaatggactatttgagagcaattgttaacaattcagacaacctggccattctccggactttgaacttccccccaagaggagtaggaaacaaaactctacaaagactagaagaattgattgacaagtccgattgtcctgtcatcgaaacccttgaaatggcaatacatgacaagaagaatggatttttgaatgtgaaatccgaaagtggagtgagacaatatatagacattctaaaggaatgtggtagactactagattctacatctttagattgcgaagcaagtttggaagcctgttttgatcaaattgtccaactagcaaacttgaaagagattaagaaaacgcctgagacttcaaagggaactcatgattcagaaaatgccctcaaagctgtagaggaaaacttgaatgagttcaagcgacaattaatagagtataagccaatcattgaccagatcattactgcagaagctggtgatactccgctcactactagggatgtcctttccagctttttggattcaatcgacttgtatgaaacatcgaacaacgagaacaaaaaagattcaaaaaagggaagagtgacgatatctacaattcatggtgcgaagggtttggaatggccggtagtatttattccaggttgcaccgacggtgttattccctccaaatggactttagaagatgatggtcccgattcgtctacaaatttggacgaagatagacgatgtttttatgttgcactaacaagagcaaaatcaatgctatatttatcatcatacaaagagagatcaaccccctggagtggagaagaatcaaatgaagtatcgtgctttttaaaaccaacccttaaaatgtttcaaaatcagctggttacttcaatcagcaacatgtccaaaaactcttggagggatctgtacgaagcaatgggtaaagagtacaagccagtgtcaaatattttaacagaatcaaacagatcaagaaatcacatcgtctcaaccaaagattttctcaaaaataagcaattcaaatcacctttgctaactaaaagcaccacagcgccatcatatgtacctgacagatcaaataacaaaaagagaagactaggagtcagaaggcgaatataa

SEQ ID NO: 1162 - DNA, 816 bp, Pichia pastoris
atgccgcctcctcagcccaaacgacaaggactgttacaattagcgaagtctgcccagttatactggtttttgggtcatgcctttgccattctattcactgcattgacatttgccacgtctttcttccgatctccattttcggacactccattaggcttttataagaatgcactaaatgcgatcatcatcacatatgtcattgtgcttagacaggtacacaagggcaagccagtcacaatgattatttcacaattacggtccctcctgaaagaaagtaacgttcagtatttgctactggctcttgttttcaggctgacagccactgatccaggtccagtctttggtgggttgtatccattcactatttactctttgtttcatttcttgaattatttggatactactctgctggcaactctaccagtctcaaacgcagaccaggttcgcaatttgattagaatgttcgtgagctcttacaatgaaaagtccatgtaccttgcggctagttgtgaattatttttagttccttctttgttgctatcctctttgaagtcgattatattgctggaatggtatagggctcccttttcatttatcaggcaattaatcgtggtattctccgtgatctcgtttctgagattaagatatcaacagaatgtttacatgaaacaattagttgatagttatgatttgaagatcagtcaactcttataccatccccaacttcctcaaggattcaggttgggatatttacgatttaagagtctattaacaagcacgctaggatacttagaattggaaaaaaagaccagataa

SEQ ID NO: 1163 - DNA, 1380 bp, Pichia pastoris
atgctttgtgagtatgaaaatgaccccaagttggaatttaatgctcatgagagggatgtcttgtctgaaatcgtagttaatgaaaataatagtcaagaatcgttggtcacaactaaagagaaaatacgagctcaccaatcaacagaatacgaactggatacctttagtgttaaattgtatgaagataagatcaacttggcatcaaaaatagggcgacctgtgctggacccgatatctcgttgggactttgacgttgaagaactaccatacgctccaattgtgaaaataatagatttttatgagtttgatggtactcttttcaaatccccagttttaaatgatgaactgttccgtcgtagttcgatacatatgatagaatcaggagcagggctaagagatattgactggtggaactttcatgaagcctggagctgttataccaatgaatctgtcagagataataagaaatggaaggattgttggtctcttcctatacgggagttaatgaagagttccaagcaaagtgataccactgtgtgcgtattgatttgttctttaagagacgcagaaatgtacaacgatctacgtgaagtactagcctccgaagacatagcggcagatgctattattacccgaccaaagcatataccaacggctgattttaagaagatcgtcgtactggatttcttacactactatagcatgtgtcaagaggtcaacatttacgattgggataaagaatttttaacctcaatggaccaattatttctgaaatggtcgaataatggagattccatgattgatggcactaccgtgattactccccgtttatattcacatctggatccactcatagaaagacaattggtggagaacctcattgatgaacacaaccgaagactagtagaattccaagatcaaaatttagattgcttgaccgttagacagtcgttgttaggtacagtgtattttttgactcaaactacaaggatagaagttttgaagcattgcattgagaaccaaaaagactttctaccggatgatactgacagtttagtgtttgagtgtgaggaaatctatatttccctgaacaattcccagagtgcaatcaaagctcttggggggataggagctcagattagatttggagtttcccattatgggtcgtttgatgatcaattctatgctctcaagttgttaggagacaaagaacttcctagcttgactaagagccctatattgttgatagcccgacatactgatgcaattgtgaagccattagattgtgacaagatcaccaactggcaagtgatggacgatctcttattggtaaacactgttgtggggaataaaggatatcttaaagtgaaaaagatgtag

SEQ ID NO: 1164 - DNA, 858 bp, Pichia pastoris
atgaacaccggcactccatcccagtcgtcagctggctcatggtctgcgcacgcaacaggatcactgacgaattctaaagtcaatgaaaatcgaagtgaaaaaatatttcaacaacttgataacctagaacaggatctatccaaattggtcacttcaatcaatagattccaaccgtccaaggaagctgcacatagactcgtctcagacgtggatgaacttaattacacaatagatgatcttttatacattcatgacaagcgccggagtcaagttttgaaccaagaagtcgaaaacagacatttaaataagagcatgataaacattatgatagggctgactgaatgccgtaaagaactcaagaaattgccaaatctaacagaagaacaactagagaaagtgtacacagagaagttgaaaagagagatgaatgatggtgatgtcgatatggacgctcctattaagccactaccctcagccgaagagaatctaaaagatgtggaaacgttactagaatatgctatgaaattatccaaattttccaagattcctgctagtgtagacccaaacactctaaaccccagaaatttcatttggcctggcgaagactctatgcgtagaggaatgttagcattggcatcgatacaccatgaacgtttaattgaaaccctaaatgaatccacaattaacccaggaggagaatcaactataaacaacgaacaagaagttgcagaaactcctagtccttctaaaagcactaaggaacataataacaccactacaaaggggcccaaccaagagactgatgctcaagctgccatcgatggtttagatttgttcgactcagacgaggatttatag

SEQ ID NO: 1165 - DNA, 1332 bp, Pichia pastoris
atggctcattttaggataaacatgcttcaaaaacgatccgtccgtcgtcaaattgttatcgttggtgctggcagttatgggatcgctctagctaaagaattggcaccgctggtagaatctatggccgatgttgtgctggtttcagactctgaacaagttatctttctaccatcattggttcgattggatgctcttaaaaacgttgctaatctattcgttggtctcgagggtctttttgctaaaaccaaggtaaagctggtcgtggaccatgttgtcaacatcacgaaaaggggagtgcaattggagcatacaggattactccaatatgattatctggttattgccacaggtgccgtttgggacaactctattttacctgcaccaacttacaatggagatacaaatagctttcccggagaagctattcaggaggctagagatattgtaattgcaggtggcggtcctttgggagtggaactcgctggcgagtatgcatcctactttcaggaaaaatctgtaactctagtgcactccagagaaaagttactaaacgatagttaccttgataaagtccgtgacagagctttcctacaacttcataagctgggagtaaaaataatcttgaatagaagggcaacgataaaagatcaatctgtgtttttagatgacttccaactgaagtgtgattacttgatcaattgcacagggccaaaggctaatccaccgccaaattctttcaagaattttgttaatgataagaatgaaattattattggaaccaaatttagaagcttgacaaatccacaagtttttgcaataggagatgttaccaacttccctcggaaaggattagaacatcgtgcagcttgtataaaagttgttgttcacaacttaagacaagttcttaaaggtacatcgagttatcttatcgttaagtggaggcctgattttatgccgtcatctgccatcagcattggaccgtctggaggtgtgggtcaacggcactctctattaagaggcgtcgtcagtatggggaaaagacaatcagcaaaagccaaaaagcatgagcgatatcctcaacaattagaagatatgatttgtggagactattatcgctttgcatttgctggagggtgtgattcagggcgtggaggcactgccaaagatattcgcaatagttggagcgaagtaaaaggtagcgttcggcgcagaagaggagacggaggaggaggagcaggaggaggggggtatgtagggtatggaggagacggagggtgtggaggagacggaggtggtggtggtggagggtgcgggggagatggaggtggataa

SEQ ID NO: 1166 - DNA, 1815 bp, Pichia pastoris
atgaaattcaacgtttttcgtaagagccagaacgaaagcgcttcaggttctccggaaagccaaaataccgatacggaagctcaaactcacgtcacattgcttccaggtagagcttacactccatacgccacatcctcattcaggcaacactctatgttaacaactgcaacagttgtatacaagatcgtatgtgtcatttcacttccatgggttgcgcgtatagtagactgcttcagtagagtgactgggttcttcattgccctggtattcttgatagctacttacgttatgtttgctgcctccaaaaacgttggaatgtacttggcttcacaaattttcctgggtattggtattccttcttatgtcatgatggagagggtgttcattgctgacaccactcagatcttgaacagaggattgtggactgctctgccaacagctgttgcttctattcccaccctttacgtcgcctctattgtagcagaaaagatgctggagcattccacctggagatggggctacggaatgtgggctatcatcattcctgtttctttggcaccgttgattcttattatgtggaaattggatagaagggccaagagatatggcgtcacacataacattaaatccaccttaaatcttcccgaaggcagctggtacaaaaaagtggctcacctgttgtacgttgagctagatatagttggaggcctgttgatgcttactggtctttctctcttcttcctcccctttacccttacaggatcagcatcaatcttaagatggaatgaagccactacaattgtcctcttagtcattggttttctaattttggtgttatttgtgttgtgggtcctctcaaagtttcccaagagaccgttcctcagtgtaagcattttgaaacgcccatcggttttgatggcatgcacattaccgctttttgatgctattaatacttccttatcaggagcctactttccttccgtactgcaagtgtcaggtcacttcacagttggagaagctgccagaatccctagagccgccaacgtttgtcaaatggtcggtgcggtcctggttggcctcttgataaagtacaccaagactgcaaaagtatttatggtctcaggagtatgcttaattgtcctcactcaagggttcttctgctatcttgctaacaataatggtggatttggctcagagcttcattggactgtaattaaagtgtttgaaggtttcggaaggggtttctacaacattcccacaattatttccgtgcaagctaactcggatccatcacagatagctccatccattgcaatgtttaccatgttcaatcaaatgggtgccgtaattggtaattctatttcggcatcagtttggaatgaacttgtaattaaaagactgacgcagtatcttccagaagcgtctaagagcagagctagagagatttttggaaacatcagggttgcaattggctacgcggagggaactccagaaagagaggctatcgatagggcgtacagagaggttttgcagaaacagggatacatttcgctcgggttcctaattccagctcttattttagtatttttcatcaaagggttcgatccgacacagcgaacatcagtcaatgttggtgatgatggagaagtggtattgacatcagctcctggaaaggacggcgaagcacagctaaataccatagctgcgaacttatcttcctctccatctaactctgatatttcagaggaacgagaaagttcggagattacttcacaggagaaaaaaagtgaactcaatgagtcggaggccaagtag

SEQ ID NO: 1167 - DNA, 714 bp, Pichia pastoris
atgaccagcttacaaactgccgtttgtaccgtcagcctctcagcagttgtgttgggctatgaatttgaaggcgtgcttttcctgttcatactattaattaatattagcttagcagttcccatggagtgcaaggttttgagtgcgagtcaacgcttagacgactctgtggttcaaaacgtctacttagaggcaggagacgacgatgcgttaagtgctgagactattctactgagaacacaaaggaacaatgtctatgtctcctatgatggaggaattgttttccaccagatcgaattaagagataaggggagaattattgacattatcgtgaataagcactttcctgcctatgtctatctgatcactgtggatggttatatctatatttcttccaatggtgcagtttctttcaagagagtgaaagctccttcgaaaagaagcgttgattttgctctcatgaagaaccctctctccttccacaagtatgatcccaagaaatttatttacgctggaatgaagggctgtcatttctggaataatgttgcagactgccgaacgtcttctgtgaacagtcttatgctaatggagagacacctccaaatccacgtctgcttgttagctctgattattttaaatctgatcgacgagaagtgctcagtaatactctccaacccatcgaaactgctcatgtcttgtggcaccaactatcgttga

SEQ ID NO: 1168 - DNA, 618 bp, Pichia pastoris
atgataacattcaacaaacgaatagcaacattagcggcaacgttattttcattcattgtgctttatactctctttaacagtggagctcaattttccaaccaactagatcagcctgttcccctcaaaactccagagctcatcataccgaatcagagtactgagaatgatccccctcttccattcatgccaaaaatggctaacgaaactttgaaagcagaacttggaaatgcttcctggaaactctttcacactattcttgctagatatcctgaatccccatcggagaatcaaaaatcaaccttaaatgactacatttatttgtttgcacaggtttatccatgtggagactgtgcaagacatttcaatttattgctgcagaaataccctccacaattgtcctcaagacaggtggctgcagtgtggggatgtcatattcacaatcaggtcaataagagattggagaaaccacaatacgactgctccaatattctagaggattacgattgtggatgtggctctgatgaaaaggaagtagatgacactctgaataacgaaacaatagaacacttgcaaagtatcaaaattactgaaaaagagagtgaacaatttggtcgatga

SEQ ID NO: 1169 - DNA, 1023 bp, Pichia pastoris
atggaagaccccgaaaataagtttgatgactacattgtgattggtcaagttagagataagctggagatacaggcttcaccaagatttcaaaagtatttggacaatttatcattggtgtttcaatatcttttggagaatccgaatcgtaacatactcaatgatttaactagtaaaacttctccaattgaacttagatctccgccgccaacaaatggatttcaaccaccaatgaacgaacctacacaaatgttcaccattgacctgcaaaataagttctctatgaatgagcaatacaagatgtatttcaacctgcttcaacaaattgtctgcaaagaaattgcaaagctatggatcaaggtgattgaacccaaaaaacagacaaagtttccgtacaaaggaggatactgtacgaggcctccgtggtggccaaatgaagttccacatagggaacctgaccaccttaacaaatctgacagaattactcttttgatcactatttgccatcttgatgtgacgtacttgcaagatctttacaaatccactcagtctgtggaattcacacctgaaaaaagggagttatacaatgagttattttatcttctctataaagagtttgacttccaaagacataggactgactcaaaggtggtggtgagtttgttttctaggaaacaaaaacaattgagtaaaaataggaccgcaaagagtcaaccaagacgaaaatcgatttcgaaaccaccgctcaagaaggccaatgatgagaatctccaaatggccaaacttttatatgagcacttgaatcttacagcaaaccctgagaacccatcatccattaacgatattgatatcacaaatgagtatttgatttcttcggctccttcgcattccaatgtaaatttcaataattctttcggtctcggctttaatgagggccacgatttacctgatcaaacggaccattactctatctacaacaaaagcccaattttgccaacagacaagcagccaaatatacccctgtga

SEQ ID NO: 1170 - DNA, 918 bp, Pichia pastoris
atgtttgaccaacccatcttcggtatcaagtccgtagagattatttcgggacttaatgccggactttgctctaccttggtcaatcatccacttgatctgatcaagttgagattacaattgaattcccatcaaacttccttatcagggggtattagttccgttgtgaaagatattgttcatttatctaccaaaaatggaaaacttgaccctaaagtgctagtcaaggagttttacagaggaatcactccaaatttggttggaaatatggcatcttgggccttatactttatgtgttataacgaatataaaacgttcttcagaaatccaacgtcctcaacgtatctgatgagtggattcttagcaggatggtctacttcaatcctcacgaaccctgtatgggtgctgaagacgagaatggttgcaactcatcattctacccccgagggttacaactcgttgtgggaaggtgcgtcgcaaatactcaagaaagaaggtatatcaggattctggaagggtcttacaccggcgttattaaacgtctcccaaggggctctacagttcacgttatacgacacactcaaggacagcctgtatcctgaaaaccaaaaggtcctttcgacctaccagtacatctatgtcagtggcatttccaagattattgctacagtagcattctatccattgcaagtcttacgctcaagaatgcaaggcttcgaattgctcaaaaataggcagagcatgtctcatttggtgattgaaattatcacaaaagaaggcgtaccaggactttataaagggctagtccccaacatgatgagggtcctccctgccacttgcataaccttaacggtttacgaaaacacgaaaaatcttcttaacggtacatcgaatagaaaaaacaatatcgataataattaa

SEQ ID NO: 1171 - DNA, 1065 bp, Pichia pastoris
atggtttcaaaggttttattgacaggtgcttctggttacatcgcccaacacatcactaatgaattactctcccatggctttcatgtcattggaactgtaagaagacaggagcaggcagaccaattgcataagcaattcacagaagaaaatccagctttgcagagggatccctcccttttgacctatgtgcttgttccagatattggtgctccagacgcttttgatgaggtattgaagtcaacatctgacattacctatgttcttcatactgcttctccagttgctctcaatgatgatagagctctcgaggacgtttatttaaagcccgccgttgagggaactaaaaacatcttaagtgctatcaagaagtttgctaatgtcagtgtcaagaacgtcgtagtgaccgcttctcttgcttgtatcatgaaccttgataaggctgaagacaaaagtttcatccacactgaaaaggtgtggaacaacaatacttgggatcaaaccaaaggcggggataaaattgttgcttacatcgtttccaagaaggaggctgagaaagctgcctgggacttcgttgagaaggagaaaccaaacttcaaattgacgacagtaaaccctccttatgtcttcggtcctcagaaattcgatgcttcggctaagaaggaatctttgaacacctcagctgagatcgttggatctctgttgcgcacgaagtatccatctgatgacaagttgtttgatgatcccgtgagtatatcagtggatgttagagatgttgctctctaccatgtgctgccacttctagatgctgatctggcttcgaagagattgtttgttgttcaatccaagttcagtgctcagagaatcctgaacattatcaacgagaattttcctgacttaaagggcaagattgctgttggaaagcccgaggaaacggcaagattggaagctctcaaggcacccgagtataacaacagtgttactgtagggttaacgggagttgaccccatcccactggagaagacgattgtggactctgtcaaacagatattgcgagcaaacaagtaa

SEQ ID NO: 1172 - DNA, 312 bp, Pichia pastoris
atggctgataacatcgaaaccatccgtcctggaatcaactaccaggacaaactattgaccgaaatagacattcttgatgatgttaaacaactgtcaacgcagatggaacaggaagggaaaggattcgtcttccctaaagatcattactccaagataaaatcactaaaggggttgcaagtgaagctgttgaaagaaatgcaagagttggctgaaattcagcagtctaggcatcaagacgaaactgcatacaggcagaagcttcaagacttggaagatactacatcagaacttagaaacgttgctttgacgtaa

SEQ ID NO: 1173 - DNA, 774 bp, Pichia pastoris
atgtccctatcagatttcacattaatcggaaaggatgatgtctatgaccatgtataccttttatactcagactcgaagctgaacaacgatctaggctattaccctagtaaggcggataagtttgtgatacccatcggcgacttggatatagaggttgaacagtccaagtccggagtttattccaggcatggcacaggtacgactgggttttacctctggaacgtttcccctctatttgcagaatggatgttgtaccataaacatcccctaagcgatatgttcaatggttgcggagttgtggttgagttggggtcaggggttgttggagttttggcatcaactctgagcaccagatgtgaactgttcgtagctacagatcaaaaacatgtcttgaaattactggccaaaaatatagaaaacaatagacaaccgaaagctaataccaagattgtcgagtttgattgggagaatatcgaatttggagtttccaatttggagtcaactttagagagaagacaagttgatttcgtcctggcatttgataccatctacaatagctttcttctagaccatttcattgctgctacaaagactatttgtaacagtgaaacaatcgttgtggtaggcatccagttaagagacgaggatgtattatcagaattcttggaaaaaatgttggataagtcgtttcaatgctatcatgtggaccaagaatggctatcttctgatttgaaaaatggatacagtatatattgcttcaaactgtgttcttag

SEQ ID NO: 1174 - DNA, 1701 bp, Pichia pastoris
atgttcaaaaaggacccagatttgaaaccactgtctaatctaaagaattcagaccgaaagaagctattcgcaaaggttgtggaagattacaaagtttctaatgtgccgattgactatcttttccccagtgactccaaacagggcaacttcaagtcaccgcttaagatttcgggaactatctacacagatgcagagagtactccaacgtggtttaaaacgaaagattccaatgttctgccttccataatgacgctgtggaggtacccttccctcatcccaatagttctaacgaacgacatggttatcgggaaactgatcaatggagcagacttaatgttgccaggctgcattcctccttttgactctaggtgtgttaaggggagtattgtcggagttgctagttataaacagccaaatgttgtatatgccgtgggggagtgtttgctaggtttaagtgatgtggaggaaactgttggtaaatctggtgttgccgtaagagtttaccaccatttcgaagaccatttgtgtcaattggcaaaaatcacgcttaaacctcccaaagaagaggaagccttagagactatccttcagtttcaagatgtgacttcggaacaaccagtagaagaagatggcttgcacaataatgcagaagccctcaatagtgaggttcaagacgaaaccatcgagcatgaggcatccgattctaatgaattggcggaagttttgacggagctaacagtggaagatgtcgatatgttttttgaaagagctttgcttcagaccatcactcaagacaaaatctcacttccaatttctgcatctaatttcatgaaccatatcctcaaaaatatgccccctatagactccagcctggttactatgaagaagacttcttggaaaaaaactagtaagtatttgaaagccatgcaaaaactaaagctgttagatctaaagggtaaaggggaagatctaacaattatttccgtagcaagttctgacaatgaaaaagtcaggaagtttgtgccatatacggttaaaagtgtcaactcgtctaagcagagtcagaacaaaccttccaaagataagcttaccattctgttttactataaacccaatagttgcactagaagtttctttaatgacaatgataaagtgaccaatgttttatactcgcagcaagaattgaagaacattttaaatgagtatattcgaagcaaagatctagtgcgagagaagaataagatatttttaaaccctcctcttcaggaaattgtcaaactgaaagagggaagaactattgcacgagacaaaatattttctgagttccttaaaggttttactattaaccataagataattccaattaacactccagatgaagaagtagaatcaatcaagattaaaaaagggaatgttccaaaagtggaaatcgtgacagagatgaggattggcaggaaagtcgtcacaagaatatccaattttgaggtctatcacataaaggcgcaggaacttgccaatgaattaagagtcaaatgttccggctctaccaccataggggaaaatatccaaagtaagtcgaccgaggttactgtacaaggacctcatgaaaagatcgttcaagagttgttggcagcaaagggtttgagtccagcttggttcaatgtgactaacaaactgaaagcaaagaaaaagagaacttaa

SEQ ID NO: 1175 - DNA, 345 bp, Pichia pastoris
atgctgctacgttcgacacaaaagacactggtcagtttcctgaccagtcacgatgccgtaaatgacacgaaagcaggaatgcaacgttgtctccgcaagttcaagcctaggtcattcgacgccaagctcaccactggtgtttgtcttgccctgaagcaaattacccaaagtcggaaaaaacgtccagcttgcggaatgcttcgtttactcagcgtccacacttcaggtttagtcctagaaggataccctagagtggaatgcgccccgccacaactagcgaaaagggctgtgcgccacaccaaagaggaaaactccggccaagtcacatgtctaaaaaaagtttga

SEQ ID NO: 1176 - DNA, 2670 bp, Pichia pastoris
atgtctgagggaactggtggtgttagcattagaaggcagcatattaactggtcagatgatagtgatgatgagcagaaaaaagataccaaactcgaatctgtagatgacttggatgatgatgaaaaacaaagagatgagttttcgaaaagactgaaagatcaagataaaactgcgaataaagcacccaaaccacgagctgatgataccacagatatgaaagaattgagaagactagcgagggagcagtatctaactaaaagagagaaggacaagttcctacttttgaaacgagaggttaatgaactagaggaagatgtagccaagtatggatgggagaatttgacagagaaggaacgctctgaaatcagttttaagaaggaaattttagagatctttgagaaaagatctgaacttttgaaggacggagaaaactaccaattgccagatgattccacagcggatagaaagagaaaggctgatgtactttattcaaaggaaaaatatgaggctacaaaacaaaccagagatcaagcttgggaaagtcaacagattagaatggctactactggaaaagaacttaatttggaggaatttagcctgccagacagtaagaattatgattttgtctttgatgaaaagttccatgtcaatttcactggaaacagtgaagaaccggctattaaacaagcggaacagatggagattcaagatcttaagaatcaagagatccgaaatatccaacaaactagagaatcccttcctgtttgcaggtatagagaacaacttttagaggccataaaggaccaccaagtactcataattgtcggtgaaacaggatcaggtaaaactactcaacttccccaatttcttcatgaagctgggtacacaaaaaatggaaaaaaagtaggatgtactcagccaagaagggtagcagccatgagcgttgcttctcgtgtatccaaagaagttggctgtcctgttggaactactgtgggttactctatcagatttgacgacagatccactgatcagacagtaattaagtatatgactgatggtatgttgttaagagagtttctcaatgaccctgaattaagtagttattcagccatgatgatcgatgaggctcacgagcgaacacttcacactgacattcttctgggattaatgaaagacatctgtaaatatagaaaggatctgagattattgatctcgtcagctacaatgaatgcggaaaagtttagcaaattcttcgacgatgctccaattttcaacgtccctggaagaagatttccagttgatattcattacaccattcaaccggaggcaaattacttacaagctgcgataactacaatatttcaaatacatacgaaccaaaaagaaactcctggggatatattggtatttctaacaggccaggatgaaattgaatacatgcaagaaaacataaccgacatatgtcgcaaactggggtccaaaattcaagaaatgatcatttgcccaatttatgccaatcttccccctgaaatgcaacagaaaatatttgagaagactcctcccaatgcaaggaaagtcgtcttagctactaatatcgcagagacatcaattaccattgacggcatcaaatatgtcatcgacccaggatttgttaaagagaatgtctacaatcctgcaactggtatggagagtctggtggtgactccatgctcccaagcatccgctgatcaaagggcaggtcgagcaggaagagtgggcccgggtaaatgtttcagattgtatacgaagtggtcctacgacaacgaactgcctaaaaatcctactccagagattctaaggacgaaccttaccagtgtggttttattattgctgactttggggatcaacgatctcttgcatttcgatttcatggatgcaccttctccagaggccttgatgaagtctctggagttactgtattctctaggagggctaaacgaaaaaggccggttgacaaaaacaggaaggcaaatggccgagtttccaacggatcctatgctagcaaggactctacttgccagtgatcaatacaattgtgttcaggaagttttgactatagtttccatgttgggagaatctagtgccttattcttcagaccaaagaaaaacaaagctatggctgataaggccaagcaagcattcgtagtcgagaacggaggggaccatatggtattgctaacaatcttcaatcaatgggtggacacaggatattcatatcagtggtgcaaggataacttcctgcaatttaaatcgctatcaagggctagaaacgtccgagatcagttagaaagagtgtgcgacagagttgaaatattgaatcacaaagaaaaatccgaacacggaatctcaaacccaggacaggatagcaaaaacagcaaactactgccgattcaacgagcgttcatcgccggtttcttccctaatacagctaaactgtctaaaagtgggacttataagtcgttaaaggaaaaccagttagtgtacattcatccttcctcgacattatttaaagctgtaccacctccaaggtatgttatctatcatgaattagtcttaacgagccagcagttcatgagaaactgtatccccgttgaagaaagacttcttaccccatatttgaatagaatgtga

SEQ ID NO: 1177 - DNA, 675 bp, Pichia pastoris
atggactttaacctgaacatacatacatcattggacatagtctcagatcatattgaagcacttctatggacaattttgtttcaaagattgtttggaacaatctctccctcccagtccacatttttggggataacttatccaaaggtggagctgcctatactacaaacactaatagactctaagatcagtcagttcaaaagggatatcatggaaagcaaaacccttagccagaatgatcacgatgacgataatgataaccagtcgttagaagatgaaaccgaactaggatcctttagactgtccttcttcgaaaagttctccaaaagggatagtaaaaacaccctactcaaattctggactaacgagacgaaagaatctagtgaagatatcactggtatagtcaatgatgatatacagagaggatccttccaagactgttgggaaacgtggaacttgacactgtatatttcatcaggaaaagattatgccaacagtttcttggaaagtatgtttcagatactagatattacagatattaacaagtcacatattccaacgattagatcggtggcgatagcaccattcccgttcaaaatcgcctacttggtgaaaaaagactcatccattggaagcagtatggagtacattacagaaaaagatgctcaggaggaataa

SEQ ID NO: 1178 - DNA, 4017 bp, Pichia pastoris
atgaaggacgagctagagcttccggctctgccaccgttagaggatcgaaaacgaaagtccaaaatctccatggacccttttgtttttgctagcgagtttgatgaagattcctacgactcatacaagaaacaatacacggaacatgtcaaagaaacaatagggttgtccagggaccctttcgatgtggaactccaaaagcatgaactgaaagacttaatacacgccattactaatgaaatcaagctaaagggcactcgtgcgccatattttttccttccattcagacctcagttgaatgattatagactgaaggtttttctgaacagagtgtttatagaaggaaaacctgcttctttgaaggtgattgaaaaagtcgtaaaaaagacggatgaattcacgttgacttctgctcttaagtttttatggtctagactccccaatggttacattgtaggatggaaatcgtacgcccagtttgcaaaactagaacaggaacaaaactatcctcaacgcgcttttttggatataatacctcaatgtttactatcaccatcccatgcctcaattgtttatgatttctttgatcttattgtagctattgcagctgacactaagcaaaacaagatgagtgcccgaaagatatcgaaaatgtgtggaatatgggcattcggtcctattaaagtctcccccaagggtgacacaagctatcacagaggaatcgcaaattggttgccagcttcggatgccatatttcacttactcttgtccttcgtacgttcaatgctacccgagtctccaaatgatgaatacaagctacccagaacgctgcaaaatctggttctttccaactcctacccaccagcagaaacagtcctaacgtcccgcagtaatctagtcgatgttccccttattactttgaaggttaataacccttctcgctcacctatagagatgctccacagggttggaaaaacactcaaatttgatgatacaaatctgttttatacgagagaagaatacatactgctaaagtctttattcaaagattatcaatccttacctcaaaagctatctagtgaaggaaaaagggtgatggacaatttttgtatgtttgatgaagacctaatatctgacggagcaggatctaaccatattcgatttaaactttgctctggatggagttcagaaatgttgcaaccatacgaaaattgggacgagtccaagggtgattattttactgccaatatctccaaaactctgatagatgattactttgtttggacatggttagcctcggtttcttcagagcagactagaataaaaaggaatatctttggaaaaacttatatcctggaaacagaaattagcccagggtacaagaaatgggttattgttgaagagattgatattagcagaaatggatatgacttggatattgagttaaaggaagagaagttaaagaagttacaaatgaacattgagaaactggagaaacgaaaatcgaacttattggaaaaggaataccgaaatcaaaagaaaacaaagcccaaaaagttgaataagatagaacctcctccgaaagacacgccatacgtatacagaggctttcctaaggactttccccagaatttggctgaaaaagagcttccacctacacctcctatcataaaagagtcattaccgcaaagcatggataagtcaggcgattatatttcgttgaatttgcctaaggatgaagaacaaagagtgactctgacatcgcctcacaaagcacagcagaaagtagcacctgctgtccgccagatctctgaaggagtaagtgaagaatcgaattcattgacgattagcgatgaacctgactcaagctcttccgtaaaccaagattacttacttattgagaacgatagaattgatgatcccatggatgacttacgtgacatcattgagcgtatcgatattgaagaaattgagcatcagaactatagcgaactggtatccaaagtctctccaacagttataacgacgagaccttcaatgaaagaggagaagagaggtagaaaagaggaaattcgtagaaaagaaccaaaaataattaatggacctaaggaattgggaggagatgtctatcgtgttcctggtgatattccagaatcagatgatagtttttatttgcaaaggaaacctccgtcagattcacttccccgacatttaaagggagtttctcctcctcctctttcaactgaacatagtcctcgtaaagtcaattctaccagcagttctccatcactacctgtacatgtttctacaaatttcactccgaaggttgaatctaaaaatacattgaaatctaacatttttaacgagattgaaaatttggaagcagaacttcaagatgttttgaatgatgatgtcagctccaaagatgttcgactaggattaacagccggaacttcaagcgtttacagttcggttatgtctcatagaattgaacgaaacgaatttccagcaagatctgagaatagttcagaacccctagatcataatcgaatcgaccctgtaatcacaaaatcaccggtagataaccagggcactcctcagactactccacaagtaagggatggagctgaactatcagatacaacgcctcaaaactcaagaatacgccagccccctactgtacgccaacagacatcaagtccactttcccctcttgatagaagaaatcctttgcagaactcctctcaagattttatcagtcccaaaaataaaccagagacatatcatacaccatcacctcaagaacactacccacatcaagtatacccaaatgcttctcaaggaccagctcctaatggcaattcattacaaacgtatccacctcaaaattatccacctcgagattacccgccacgaggttactctcctcaagctaatcttcaggaatactcgcccaaaggctatccaacagaaggttatccatcacaaggttatccaccacaaggttatccaccacaaggttatccaccgcaaggctatcctccacaaggctatcccccacaaggttatccgccacaaggctatcctccacaaggctatcctccatcggggtttcctcctcaatcatatccatcaccatctcacggacagggtcgtcgaatttaccaccctgttcaagggacccaaggttactaccctccacctaatcaagcacagtatcaacaaactcaattcctacatccacccagcccttatcaaggtggtgccggccaccagtcatcgtattcgttgacgagagacccccgttccgcatccaattcacctcgctcgtctaattcgcctgccagatcacaggatgcagcaacccctgagacgttctctcaaaagatggtagcaaacagctttgttccggctgcaaaggtaaataaactacatggacactctaacaagagtgccgataaaaagaacttgcgagatgcattaaataatgatgtactcattcccatcgcctacctactcccggaatatatcaaagcaatgaacgtaataacccttaaagtatctcccgaaaagctggagaagtttggaaaaatagatacgctagagatcaagcaacctagaccgttaaagaaattgactgtcacccttagtcaatccaacagtgcatccacaacaaaaccaagtacgccattatccaaaagagctttgcttggagacaggtcatctccgattccatcggattcaccttcctcgtcagcagctggaaatggaactcgatacaaaagtaaaggggcaccgggaggtcattctctttccttgtcaggaacgctagataaaacaggcgagcctagaaagtggtttcgtcaagccagagaaataaaatctttcagtggtttcataataccttttactacttggaaaggggaatggaagaaagaagatgatgaaaaagacacgaacactgatttcaaaaatgaaagcaataactccactcccataggaacaccaataccagaataa

SEQ ID NO: 1179 - DNA, 633 bp, Pichia pastoris
atgcctgttatattcgtcaagacaatgccaggtctggctgacttgagaatagtgacggactatgataccaccattgaagatctgaatcgaaaccttatgaacatgttacctctaactgtacagaaacgaggagttatcactaaaatggatggaagcccattactcaaattgaggaacgtaagtgagctaaagggcgactttgtggatttgcaattgaggattcctttatgcggtggaaaagggggatttggttcgaacttgaaattgaaagcaagaaaattgaaaggcaagaggaaagacgagcttaaggttgagacacagcatgaaatgaagactcagaaagtattaccactgccatcgctaagagacaagaaacgacttttaaaagccagaaaagacaaattgcaaagattggttgacatggatgttcgaagattactggatgataacgaacatttcaacgttccaaccctagaatcaatcttcgaagaagttgagaattctgttgcttctgtaagagaagctgtaatgaaaattaatgacaataggacaatggccaatgaagcgaacaaaactacgactagaaactatcaagctaagcatgatgtatttggtgatttctttgaagaataa

SEQ ID NO: 1180 - DNA, 564 bp, Pichia pastoris
atgaaatccacaaagagaaacactttttttggcttggcagcccttggggcactaggactggggtactctgtttacaagagttttataacgtccgacaaatcctcatctcttatcaacctaggcatcaaccaagagaggaaatcatatacgaggcaaaaagtcgccatcatcgtctcagagagtatactagcaatacaattacctatacaggagatcctcaaaaataccaaagacgtcgtgtttgtgctggcgccgacaatagccaaggacgaatttctacgagagaacgaggtggactctggtctctccttcaaagtcattgagacaggcactgcaataggttgtttccacgtattgaagcacattaaagctacttataacattttcaacttgcacgatttcttgccgagttcaacgaagacttcaagtgataatgaacagttgacttttgacttggaagaatatgtcaatctccatctcaataactttcttcaaaacgtagttgaactaccaagtgactcaacttctattcaagaaacagtgaatcaatatatatacaattag

SEQ ID NO: 1181 - DNA, 1014 bp, Pichia pastoris
atgggagtgctcaaacatgtcctttttatctgtgcagtgtctgtgagtgccgcttttgttggggctgaaacgcaagataataagaccgttggtctcaatgctacgggacaaaaaccacagatagagtacactgcgtcacaaacacaccaatcgataatcttgactgaagatcaaaagatccacatcaaatctttattaggagatgatgttttcgcaagatctgtacttccactcaaagagctgactgaggtaaattctcaatctaccaagctaggtaaaatttggaaatggctcttgaataaccataatggcccagttgtttttgaaaagcaattgatgttcaaggacagtgtcgtgtttatgccagatggaagctccgctcccgtggatcttcaaagtattcaggaggtgcgggactttttcgaagatgaattgaacaaagtcctgaggtattgcatgtttcggaggcagacagagtacgaaattctggaagccaaagaaattgtggaaaccacaatatccccgtgtaccaaataccaatatggtagattctttcacaaagagcaatacgttgttggaagattagagatgtatgaagatgctgtagtaccttcaacatatgattccactattatacaagaccttattcaagacgaattccggttgtctccacgattgtcttcttccaaaaagatcaagatcaaatgtcctatcacacctcaaactccgttcggatcatccactgcagtaatcaagcgagttgtcgcaattgtaaggaaaaaaacagtgtacttcaataactgcgacctattccctcgtattgaagaagattggagtcaacctcgtaaactgtttttcacatttgacgaaaacgatgtgcaactcacctgtcaaacgagcgaagatgattcaatatgcggaaaagacagtaatcccctctcggataacatattgctcatagattatgaacttaaatcatggcagctaaagttcaatcgtttaataagttcataa

SEQ ID NO: 1182 - DNA, 465 bp, Pichia pastoris
atgcccagtccatttcagtcatttcaatcaaacctgtctccttctaagcatacgcagtcctttcaagagctctacggcgaaccagagaactttcttgaaattgaagtaataaaccccataacacacggatcaggttctagcatgtacacggactatgaaatcgtttgcagaaccaacataccgatgtttaaatttaaggaatcaagggtgcggagaaaatactcagattttgactcgttcagaaaggtactagagtcccagacaaataacgtcgtgatccctaaacttcctgagaaatcgttcttcaactaccatcgcttcaatgatgacttcattgaggagcgcagacagggtttacaacagttcttaaaggtgattgccggccatccacttcttcaaacgggctctaaagctttaacttcatttgtgcaggatgaacattggaataaatctaagttcttataa

SEQ ID NO: 1183 - DNA, 2535 bp, Pichia pastoris
atgcaaaacaaatcagacctgagatatgaggaattcagcatagctccaggtcagtctggcatttttcaaggtggaggattcaaaggaagagtgaagaaaatagcatgtgtggaatgtagacaacagaaatgcaaatgtgacgcttctgataaagcaccgaaaccttgcacaagatgtaccaaaaaacagttagtgtgtactctgcaaagtgacttcaaaagaactgttaaaagagctagaatggcccaaatagagaaagagttcattgatttaagacgctctttacaagaaggagctgtaaacggagttcctttgagagggcagagttatgggccttcattcgaacctcccaatcaacttccaaacaattccactttaccaccgattagaaatgttgttttgaataatcctactgagaatgtgatgactcctttcagtaatttcatcggctcagagtcacctccagtgcctagcggattgaaggacgatggccgtatttcacagatcgccagtaccaagatgaagctgaacagcaactcaagtaaacctactccagctattcatagactgggcaatactaatcacagtagaaatgaaccaatcgttttagccccagaagttttaagttgcaccgataaaacgctggatgattttactattgagtcccaacacatcaaacaactatatcaagaatttgtagacaattatcatccaattttaccagttgttgatatctataagggcccggagaggatatatcgactgtgcccggttttattttggacaatcattttcatctctctcagaagattcaaatcaaacgaattaaacagggaagctagtctcaatctttacatgaaacttggccccattttgaaatctgcaatggctgagctcactattgcgcccattacaaggttcgaacctaccgaagtcaacgagcctatattgaacgtttctagtgtttattcagtacaaagctttcttctgtacactttctggcccccacttacatcatctttatctgctgacacttcctggaatacaatcggcattgctatttttcaagctattcgtattgggttacacagtgcaggccaattaaactctaacgaaaaggcagaattggtcacagaacagatacgtacatggatcgcctgtaacgttgtttctcaaactattgcttcagcatttggatttccagcgtttacatcttttgatgccggagttttatcgatttgtcgagctggctcaaacgctaacattcctcagagtttaattcaaatgatggaattagagcatctagaagatcaggctgccaaaacgttgaactcaaaccctgcagaccatcttggtttagttgatgctacggaacgaatacctttactacaaatgctaggaaaccaaactgatgagctggagattaaaatgtcttttcttcaaccactggatgatgttagaaggtttcagcttctgtccaccagaatgcggatactaacttactattttttggatactacaaaagtggcaacttttgagctgcagagaggcttgatcaaggttttcaacgcttctttggccctaatcgcacacaccagagattctacggaaagatcaaaaaagttcatcaaatatctaccaggagtatatatactaactatttggcaagcatcagttattgtcaacagaataacgaattctccaatgaactcacttattgatgttggcgctggtaagcaactataccagatagctattgatttgacatcgaaagcatcggtggtcaaatatgatatggcgtatcgatcatctggtataatgaggagtatgtgggcattattccatactttgaactcccagaattttttcaaaggaatcaatgtcaacattcgtagtcgattatcggccagtgtattctttgacagcctgttgatcttgaaagagcaatgtggtgtgatgaaatttgtacccaagaaactccatagcacactggcggatgccacaagggatccagcaactgcctttgaaagcgattcggataatgatgttgaggaaaatgataccaaagtgaacaatgtggattcaaacgataaacagcatccacaacagaaagttaatgcgaacggtaaattttcaacaaccgaatcaagaaagaaacagcgatccttatccagcacaattcacccagaatcttcggcacgtagaattatcaatacgattcccttggatccgcaaccaatagaggctccaattgccaatcaaaaacagaatttatcaaaacatgttctccattcaaaatccaaccaaactccaaccgcttcagacgcaatccaatccaatcaacagtctttcaaaggaggcccaacctctattcaatcgaaccttaccgactctccatcgtcttccaacttagatgcaagtgcagggttggggtttgatatttgggattcaacacaaaactgggacactgacctgttgtggaaagacattgacaacgttatgaatgagtttggttttcatgctgacatggtttaa

SEQ ID NO: 1184 - DNA, 1605 bp, Pichia pastoris
atggcaaacattcacttgattttactagttcacggtctttggggaaaggccgatcatttgtcttatatccaatcagaaatcgagtctgatccaactgtctccctccattccaaagagaaaatcgtcgtatacagaactggatccaatgagggttacaagacctacgacggaattgacctttgtggcaaaagagtgggtgaagaggtggaaaaggaaatcgcacggctgaacaatggtgaagacacagtcacacatctgtctgtcatggggtactccttaggagggctcattgcccgctatgcaatcggtgttctgtacatcaaagggtactttaaatcgattgaaccagtcaacttcaccaccttttgctcccctcatgtgggggtcttggctcctggagatggtatgtccgttaagatctttaattgcttggttccttatcttctggcaaacagtggtaaacagatgtttttgatggataaagtcagggtgattgattatgtaaatcttggcgaagaggaaacacctgcgtcgcctctgttgaaaacaaactataactatcaacctcttctgctcttaatggccaatcctgcttcggttttccacaaggcattgaacggcttcaagtacaagtcattgtatgccaacgtgacaaatgacaaaaggacatcgtggtggactgcaggaatctccactatgaatccctttgaaatattggacaagaatcccaacgttcagatcgataagaatggtgccatcaagatggagaacgggtcgaaaatgagtttccactttatcaaggactttgaacctaacattctagatgtcaagaaaacaatcacggtatccaagactacccccaaggatactattttagaagagcaagatgtgttcgagtccaccgaacagattgctgaaaattttttcaagagaaaggccaaatggttttttgtctttttcaacatagtcatttacgttccttgctgggttatagcttttattttcactaacttaattcaaagatttcaatccactgtcagagttatcaaagcctcagcggcagagactgacttttggaaggatctgtatcaacttacaaacgaagacgagcagaagcctgttattcggagaagaccatctctttcaaggcgcttaagcgagtcttatgatgagtttgaaaaatcggtgcaggataatatccagaaccaaacagaagacctgatcgaaagtgtgtgggatgccatgacttctaagagatgggatgagcccgttctgttcgaagatggacagcctgaggaaagtcaggattctttatccgtcactttggaagaactatccactcttgagttcaaggatttctcgtcctccaaagacatgaaccaggacttagaatttttcagaccatttcaactgaaactctctccacctcaaaaggaaatcgttcacaatctcaacaagctaaattggaacaaatttcccgtttacattaccaaaaccacttcatctcacgccgcggtgattgtcaggcaggaagacccggattttatagagggcaaggcaattgtccaacactggataaggaacgtactcaagtttcccaattga

SEQ ID NO: 1185 - DNA, 423 bp, Pichia pastoris
atgttagtactaaagtctaattctgtgcggaaccagcttactaacgacccaaagttcttcatgtttggcctgtttcttccactactttggctcttcaatgtagctatcatgttgaccatgatgacccaatacaaacaagcggctcagtactctgaggaagcctgttactctgagcgggaacgggataatgagatgtttcaacctctcagggaaagtgttgatttggaagcgattataaaaactgaggtcctcgattacacttatctgagaacagtgaagcacagagatgattcatcacacacgtaccatgatgagatctacaagcacatttctcggtacggctacatgtcgtctctggggttgagcatctatcttgtgtttgggattggcctttatcttgttctatgtcaatcaaactactga

SEQ ID NO: 1186 - DNA, 1695 bp, Pichia pastoris
atggtttggatcacagttgtcttcagctgtatcctggtaatcatgctatggcattttttgtcatctatcggtctcgtgttcaatcaggactctgaaatcaaaaacattcctagcataccaggccttcctttcttcggcaatacttttgatactctctcaaatccacatctgaaataccaggagtggtgccaaaggtacggatacgacatctttcaagttcgcattggtaccaagcggatagttattgttaattcttatgactccatccagaaactctggactgaaaattgcagttcaaataactctagaccagttctttacactttccataaggtactttccaaaaatgcactgtatacaatcgggacaaccccatttggccagtcgttcaagcgaaagaagaagacgatcgcaagccatctgaactacaaaaacttgtatggttataatgagctaattcaaagggagtcagacttggcaatgtaccgtttgatgaaagatctggcctccaaccattgtaacgaaactgatttgctaaagtttttccagtacttccatcttcaactcagtgtttacatgacgtatggctatcagttagacttggatcattcggaaaaggagcttgctgacgagataattgaagttgagaatagtatcatcaagataaggtcacatacctcttccaacttgcaggattatttcccgatcctaagatacatcaactctcaaaataagtacaagaaagctaacctccttagagaaagaagacaagtttacatggacaagttcatgaggttcacaataaaccaaatggaacaaaaaaagttcaacgagaagcgtcaaatgaagtgcggaactaacatgagaaatcaacagtcgttctatgataggaacatggataccagtcttgtggctcacaatttgaccaatgccaaactgtccttttcagagctgcaaagtatctgcttaaccatggtatctgctgggctggacaacacggctttaaatctaaattacctgatgggtcaattttcacatccgattaaaggaccttcattgcaaactaaggctgtgaatgaattactgaaatgtcatggtaacgactattgggaagcttggtgtcactccgaagaagagtcgaactgtaattatatcatggcactgattcatgaaacactgagatatttcaccgttctaccgacatccttaccccgatatactacacgggacattgtattgaataacagcgtcgtcatcccccaaggcaccacccttttcatgaacgcttggaacggcaaccacgacgataagaaattctcccatccaatggaatttgatccagaaagatacttggatcaagaaggcaaactcatatcaaacgaaaaggggttattccatttttcattcggagctggagccaggatgtgttctggatcgaaactagcccttaaggaaatgtatgtcattatttgcaaaatgctgttgttgtttgaaatcggaccaccgaaagcagaagaaatgctggcagagttggatcccaataaatctaacaaattcccgacttcttctgccattgaacccaggaagttcctcgtggcactgaaacccagaaatcctcttttctaccaaggagtatctagacacattcaacagaccctgttagaggattacaaattgaaaatgcaaaataagtaa

SEQ ID NO: 1187 - DNA, 408 bp, Pichia pastoris
atgacaggtaacattggcagagacgtagccaatatcatagtggatccccagatttacacaacccaatttctgttgttactctgccaaagcattcatttgacgttacaagaggtggacggagagagtgttgatgaagatgcgatgtcccaaataattgaaaaactcaaccatcattctctgatagctagggacaacccagctgtaaacaaaattcgtctcaagccgtcagaggccttggaattgtactacaatttactcaagcaacacaatatcaaccaagaggaagggttagagggaaataaagaaatttgtgaattgttatatgctactcggatcaaggaattggaggacaatttgagatcacaggagagcatattcaaagaacaagttaaatatctacaaggatga

SEQ ID NO: 1188 - DNA, 303 bp, Pichia pastoris
atgtgttatccgatccttagagggaatctccgtgtaagggacatccagcatcttgccaatttttcaaaagcaattctcagatctttggcacctgacgtcctagtccacgacaagagatacgttcttcctgggggtggtttcaacggcctgagcttgcacttattacaattggcaatcgagctggtattatttctcgcatgtagcaggatcatacaacatccagacaccccaacccatatccctaattaccacgttctcacatgcgctcaacaaaaaactcgtaaccctcgtttatttttttaa

SEQ ID NO: 1189 - DNA, 1347 bp, Pichia pastoris
atgttctctaggatatttgataccttcaagctatcatcgacgatcaccaacgaagatgtgatattatatccaagtgacactataaaaggcatattagatgttgacgtcgtcaacaaggcaaaagtgaaacgaatagagggttcattaaagggagagctgttccttcagtatttcagtgtgtcatccaacaaaatggagacaagaaccgttacgtttctagctcgtcctttggcattcaatgaggaagatgaatcggaaaaatcattgaatattgatgaagtttggtacaaggattctttccatcaagtaacctttagcgtcaaaattccggattacataattttagacgaaggagaaggctcttggtggagtcattttggatatcccaaaagctctgaggggacaacttgctgtttgcctccatctataaactactatggaagtcatgaagagcaatacaagatcaattattcgatcgacatataccttgtgacggacaacatggtgttctcaaggcattaccacgaaatcaaactagtcatcgagagtaggcttaccaaacgacaattgaacataataaaagaggcaaacagcgacatggatgaggctcaactaatagaggcaaacgccaaatggtcaagccatccaagaaaactgataaaggctgacgaagaccacatggaagatgaggttgatcacatagttagttccaacctaactggaagctacaaatattcaaagtacattcggcagttttacgatgataagtttatcccctccaattacaaacagctcgtttgtgatgtgcacatgaaagttcagttaacaatgagttccaagcattgctatatcggaggtccgttaccacgtttgggcgttaggatcaaggtagccaatccgagctcagattttctcataccgggaacccaacagtcgtcacttctgggagaattttttgtcaagaaagttacactggatttggttgaaaagtccaccattttgtacaatagaagatcccttacaaagagaaggactttatttcagaatgtttattacggcttcaagtttgacttggcgacagttggtgacgactacctgattccgtatgatcagatatttggatccgaagatgatataatattgaatccgaacacaccactgggggaacaatttaaaaagggaacttctaaaaatcaagggctacgattaaccaacgatctagaagtatttcagctgctacagaagagacatatactggaatttacactcatactgtcaaatttggagacaggaggaagaactcgaacagtttatttgaaatcagacttgatcgtacttcgaaggtga

SEQ ID NO: 1190 - DNA, 519 bp, Pichia pastoris
atgcaattcgccacttcctcgtcaaggagcaacaactctttataccgctctcgtacagtttcagataacgcttcatctggcttcattacgatggaactgtttttctgttcgcactcagaatcagattcgccctgcgataagccatccaggggtttctctctggattcattattccaagtcgcaattgctagacaatcaaaacctgctaaagagaggtcctcattcacgttccatttagggtcattgatttcctctcccatgtcaaattgtggcagttccgtcccaagtttgtggtcttttcttttcttatcttttctcttatctttctttttcttttccttctttgcctttcgtttttcctttcgtctctcccctctacattcattaacaggatcatcagtgctcacaactagtcttattaaattgaatgagaactcactaaggctatcgacaaatctaacaaagtcgtttaacgtccttagtggatacaaaacaccctcacctttcttcttccagtag

SEQ ID NO: 1191 - DNA, 1713 bp, Pichia pastoris
atgagtacagctgacttatctcatataccgggaatcaatgccaactctaaaattatatctcccctcagcagcgacaactcttcatctagtcccaaaagactctttctcaatagagcagtaaaagctttgacgtccaaaaactcctctggaactaatcattcaagcgaaattgagtccataattgagccaaggaacaaaaaaaattccagtatgagacactctcacgcatctcttccttgtcttagtactaccagtataacagctcttccattgactcgatcacatttcttggatgtttatagtaaaggcaagtggaacttatccacagttccagctccaccatgttttgagggaattggtattcttaaacctccagaagcctaccacgaggcagtacgtctcggaattctagactcacttataaatgcgaaacaatgggagaaccatagtgctgaatttcttgaaatcattaaaaaggtaacaagaattttcggagttaaaggtgcctctatttcacttatttcatgcaagtttcaagaagtaaaatatcaacacaaccttggttttgacaagtgtcctagatttttgtcaattgatgcccatgccatattgtctatgtcggattttgtactgcttgacgcctctaaagattggagaactcaaaaaaatccattggttcaaggacctcctatgatcaaattctattgcggggtaccaatctgcagtcgaacaggacatgtgatgggaatactcgcaatttttgatgacatgccccgttcttcatttgatacgaatcaaatcaaagttcttcagggccatgtctcaaagatctggcagttgttggaaactagtgataatatgctagacgaaaaagataaggacaaaaaaatggagtcgatagcctcgcctgcgggaagtaaacctctgttgccaacaaatggaactgctaaccccctattccagcagatcggcagagcgacaagcaactctatctctaacacaagtttcaaacttgcaggggatattttatttgacaaagatagatcaggatctgcatatcagtccagcaagaacttctccatttcaaaacatgatttggcttgtgtttaccgagacagatttgataaatgcctctggcaaaaactattggaaagcaaaagtatgagaaaagctgctggcatcttgtgtgaacaaatttgcatacaaaacggaattaaccttgcatatgttgcggaaataagagtcgtcgaaagattcaaaatccgtcagtcattctttcccccaaagaataattcaatcctgtatgataattacaaatatcaggatcagttggtaaaaagtggagaaccacgatgtgcaattcgagtctacgggaccaactctgataggaggtcgagcgtaccaaatttgagcctggacacacaattgcatctgtctggcttcaagtcaaagttaggactagcctttcaaggcagggatccaaagtcatacgttaaatcaggtatggtcgttccattcttcaaaggcaatgctaaattggttaaaaaaaaacctgagaaaaagtatctggatactgatatggtcgaattgaacttaaaatccaacggctttgttatagtctgtgttaacgataatccgaataaaatcgcagaagaaaaagttgatgggatactaaaaaatgcattcttgttcagaaagatttttctggtgtag

SEQ ID NO: 1192 - DNA, 1347 bp, Pichia pastoris
atgaccagtgacacgaataggagaggcatcaataatgaaaagagacaagaatcatccaacaaaaggaccaaatataatgcaactcaaaacgagcatgtcgtcgagtctcctatgaaaatagaagttagtcaagactttcaaatgaatgaggatacaaatgcagaattgaaaaatgttgatgatgcagaagaagttaaagactgtaaggtgtctgaaaggaattcgaacgatgaagaaaataaatatatcacagagtttgacttttacggagaaaaatacacgttcaaagaaagaccagcagttattgaggaaaaggagggtaaaattgaatttagagtagtaaacaacgataacaccaaggaaagtattatggttctgactgggttgaaaaacatttttcagaaacagcttcctaaaatgccaagagaatatatatctcgcctggtgtatgatcgaagtcatttatcgattgcaattatcaagaagcctttaactgtagttggggggatcacttataaacctttcaatcagagggaatttgcagaaattgtgttttgcgccattagttctactgaacaagtccgcggttacggagcacacctaatgaatcatctaaaagactacgttaaagcaacaagcaacatcaaacattttttaacatacgcagacaactatgctattggctatttcaaaaagcagggatttagtaaggagatatcacttgacaaaagggtttggatggggtatatcaaggattatgaaggtggcactttgatgcaatgttctattctacctaaaattcgatacctagattcttctaaaatcttgctcttacagaaagcggccatattgaagaaaatcagatctatatccaaatctaatattgttcatccgggcctgaaacagttcaagtctgcaaatgtgattaaggctgtcgacccaatgcaaattcctggattaaaggaggcagggtgggtccgggaaatggacgagttggctcaattgcccaaaagaggtccccatcatgcattcatggctaatctcataaccgaactacaaaatcagccttcctcgtggccatttctgcaatcggtgaatcgtgaggaagtacctgattactacgaagtgatcaaagagcctatggacctctctacaatggagacgaagcttgaaaatgatcattaccatacactagaagatttcatctatgatgcgacattgatattcaacaattgtagatcgtacaacaatgagagcacaacatattacaagaacgcgaataagcttgaaaagtttatgaagagcaagataagagaggtaccagagtacgccgatatggttgactga

SEQ ID NO: 1193 - DNA, 312 bp, Pichia pastoris
atgctattaagcacattcaattttttcgactaccaagaatcatcggcgtcctggactttgtcctcccacagtgtaggtcgttatcttttgaaccaggaatggcccggtagtgccgcctcggataaacttactctcggtcactttgcatgcaagcatttcccacagaaaaaattcgtcgctgctaatcaatttcccggttgctcggcagttggcaatagtcgtacccttccgattattgtgcgaagtaggtactatcagtgcagtattttatttttctctccagttggcattccggtaaaaaacattccttaa

SEQ ID NO: 1194 - DNA, 417 bp, Pichia pastoris
atgacaagaagagtctttaaagctgaattaagcccatttatgggcggtcctttcttattgtatttagaaacgccatcattggaagaaatcaaaacgagctcgagatgtcgaatccccatgactcttcacctcagtgagaatggaaccgatgacaatttaggatgttacgtattaggaatcccagatagaacaggaaatgtccatcagacgttactcaacggaaatcaagagctattagatgtgacgaaacgcctatcctatctgctcaccaagaaataccaagtggttacatatgtctccatctccggaaactttacagacgaaagtattagggatgttattttagaggtggacaagttattgaaagatggtagaggtacccagaacccattgtcatcaacagtgaatgaagcataa

SEQ ID NO: 1195 - DNA, 1575 bp, Pichia pastoris
atgcggttgtctttagcaacacgagaaacaccgtctaccggtacatcgccggtgtttgctggtgacgaagatcatagcagtgccaacaatagcagtagcaacactttcaactatgactactatataaaagaagaactctctggaaatctcctggaaacagccttttttgaatctccgattaatgatacaatgctctgctccatgttatcgtatccaaaaattgctggtactgagaaaatacaagaaccagaccatgaactgcagcaacacaggaatcccttcggttgctgccaggaactcaaagctgaattggccgaacagcaagagctgtatctgctgccaaataaacttaccaagaatatttttaattcagggtctcctgtgttcatatacaccaagatcccacaaacaagctcggttcagtcatttgtggatgttagcaattctttatttgccactgactccgccttgcctacaagttcatttcgtgtagactcaacagtcgacatatcgtttgagcactcaattcaagattcatactgttaccgttcaaactctgcagaaatagcacctccatccacagcactctcttcagggactcacgacctggtatccaccgtggaagcatccacgacgttactggaggcagccgtcaactctaaaagacgaatgcttgaacttagacagcaaaacagaatcgaggatctcagtttttcaacatcaatattccttgaccattcacgcctaccgttggttcgtgggcgtagctttggaggaaatagcagtagacctcccaagacgccattgattcctgggacgcggtacgttactgcccgtttaagactggaaaacagcacaagtgaggatatgtgtttgccccagtggaacaaggcggaactcaaagactctagaagaataatccgtattgaaagaagataccagtctgatgaaattgtcgcttccttttccatagttggatcggccatagagtacccaaagactaagcctgcattcgatcctgacgtcaaggttttggaagtctcgtgtctaaaatgtcccaccaacgaaaatgaacctaacgaggagcgatttgtcagtgaatgtacgtcagatgaagcacgaacacaacatgccttaacagaacccctaacgtcaggcttcaacagagaaccgaatggccataaccctaaaacggctgggaattcaattggatgcaggtactatattaccagtgtcgaagtcatcaagataatagaactactgattggaagctattcaacctcagaccccgtgcaaaggagaaaagagagaggccgtatacgatctaacttggtgcagttctggtccaaacacctagtcttttcctcgaagaactctatgaagcgccgttccgtgccaacaggcaacgatgcttatcttacggagctggagcatcgtattaacacttatgatgtgagaaaacctcgactatttgataagagtgtcaagattctggaatggtctaaacttggacctgctttgcgtcgggctatccaaagctattacatggtacgactagacgaatccagcaactaa

SEQ ID NO: 1196 - DNA, 573 bp, Pichia pastoris
atgttcggcgatacagctaataagctcatcttggatgccaaaagatctagagcactagatggtgttccaatgtaccaagaacacgatgtcagagacatcataagggaaactcgtgatttacagaaagaatctgacatcattgcatcccaggataccaatgcacaagaccgcgtcaaacaatgtcagttattcgtaacgcacttatctatgcgtcgcaacaagcgttgtctattgggttatcagagatctagagtcgaaaaactcatggaagtcgcatggaatggtcaggaaatggatccgcaacaaatggagaatttatcgcatcacgagcaagagtacttcaagaaatacagtaacctagtagcattatacaaaagcccttttcaagacgtggatgttagcggctctttggaaccacctaaagaagtatttatcgatgtgcgtgtattgaaagatgcaggagaaatattgacagagtatggagtgtttaacttgactaaagattctcaattcttcgtcagacaagcagacgtggagaagttaattcagcagggctacttggagaagttataa

SEQ ID NO: 1197 - DNA, 1893 bp, Pichia pastoris
atgcttaccgctgctggggtgctctcagcatttgactcgagagatcccggtacaagtgaactcgctggtctattacaggctacgagctacatcgctggtgtgtctggaggaagttggcttttgagctcattgatcaccaatgatttcaagcctgtcgtagatatgaaaaatcaaatatggaattttgaaatgcccttgctggagggtttatcatggctggaacggtatgcggacaacgaagggaggaataatcctaaacaggtattagggggaggaaatatgcgaaagagagagcttgagcttcacaacctgtggtttaagaatatatcaatgagctcttcattgtctgcaaaagtacaatcatacttactagaaacacaggaacaatatcataaaacactcaaccccaaaataccagtcacagagagtcaagaattgaaaatgaaaatcagtgcaacctcaaaggttaaagacaacgcattcagttcatttctcaaacgtcttttcaacaaaggtcaagacacagataaaggacttcttcatacgccgaaaaatgttgacgacttttctgttctgaactattacctaaatttacatttggaggttaggtcaaagaaattggctggttttcaactatctctaactgactactggggaagagctttgatgagacgcatctctccagatgggccaagatcgatgaactttacattctctgaaatttattctttgccttcttttcattcatcggaacaaccatttccaattttgttagcagatatttatcagggctctagaaaccacagtagtattgattctcatgtattggagattaatccttttgaaatcggttcttgggaaccttacatgaaagcttacatgaaattgaggtacctaggctcaacattgataagaggtgagcccgtattttattctaaagggtcgacgcctgtttgtgttgaaaactatgacaacttaggatttcttacggccgcttcatcgtctctctttaactgtatattctggtacttgagcgaagctgtacagaaacaatcaccagatacgtacgcagcgtttaccagaatctttgatacttttggattgagtcctttgaaaccagattcgtatggaaatcattcggattatgcactaattaatcccaacccttttctgggttatcctagtatggatgacgaaataagctcttcttcgagtcttcacctcgtagatggaggagaagataaacagaatataccgtttgtgccactcttgtgggagaaaagagaagttgatgtgataatcgccgtagactctagctcagacattggcggatatcccaacggtaccaccctcgtggctaccaatcgtagattcaaccaaagcgcaaagattcaaaatcccacagtgtattacagacatcaaaacgattctgcttccgaaacaccaacccaacattcaatttttccagttgtgccatcttacgaagaaattgtacaaaagggattaaacaaaagacctaccttttttgggtgccatttggataaatccttcccactaacgggactgaataacacaagtgctgatattaaaaatttgagacttcctcctttgattgtgtacctcgccaacactctgagttcttttgcttcgaatacttcaacgttcaagttaagctacaatagagatgagatatctaaaatgattcaaaatggtcatgatattggtacatatagccattcaatggcctttgaggactatccgaaatgtttaggttgtgcactgctaaagagagagtttgataagaaaaccaggggaatggaatcaatcgttaaagataaggcaacactacctaaatattgcaaaagatgctttgcaaaatattgctatagctaa

SEQ ID NO: 1198 - DNA, 2301 bp, Pichia pastoris
atggggctgctagacaaactgaaagagaaaagtagggctaagtctggtggagcttcaaactatgagaatagtgagcaccagtcccaaactcatttgcgatattccagacccccggcaccattgcccaagtcatctaatagctctgccaatctcttctctaaaaactttcttcttaaccaagatgtgactacgttatttccggttgctgatcggtatccggtacccttacctgcaggatactcaagagcctcaagtccacttcctaccaattccttttacgaaacgttattgttggaagatcactcttgtccagtatggacccatccctactcattatggatccctcctaaagacatgaaccggccaggtcttgccttgaaccacgtagatgaacacatgaaagtttttggacctgacaataccttggagcatccccagttctttttcagccctgttgccattttgtcgttgtgtttatcggcaatggaatttggttcaagcccagttcaagtgtctgttaccaataccaaaaagttgtactgtcatttaagcttgtccaatggttacggatccaacataactgttccaataattcaggggatggcatttgttagtgccatttacgagaattgccagccaaggttgtattctaatgtcgggttccgtgaattgactgcagttggaactctcaacaatggaatgagaaaatatcgggccactttgaacgataatacgatatggtctttgtacgtatctactcactgtgatctgcaattcaattctccggaagaaatcacctcatgttcccaaggtccatttcaaggccaaactttggtccaagttgcgaaattagattccccccattacgatgagatatgcgggaatgttgtcactggaatgcacttgtacggggactcctctttggtgcagaatgaaaccactcagacaggcacttatggatttaactttgacctcttacaatccaatgggcccagtgacctcgcaatgtggacgttaccccatcaatacactgttctttcttgcgggaaggttacagatttatctctgaattccaccgtcaaagggccgatgagattagtgcgtacttccggaaaatctgtattaatgacagaacagcttccccctcatgagctccagtttgctccatggacttcgttacaccaaagtaacactagccatgctatatcaaagaaagcccaccaggaaatctgtcgtgttgccagatcagagtttgcagctgatcgaatagtagaatggagttgcacagactctatgtatacctcaggaaagatattggacaaggcagcataccaactatatgtcttagcttatgaagtccgtgatagagagctgactttagaggctttaagaagattagaggctgctttatcaagatttgttaacaacaagcaacctcagccactgtattatgatccgttttggaagggaatcgtgtctggtgctggccttgatggtaatattttcgtagattacgggaatacacattacaatgatcatcatttccattatgaataccatatacacgcagcagcattgctggtcaaggtggacaaggattttgattccggccagagagagcgatggattagaccctgggttgaagcactcttatcggatgttgcaacccctattgaagaccacagccaattcccccagtttcgatcttttgactggtttcacggccattcttgggctaccggtctttttgcacggggggacggtaaagatgaagagagttccagtgaagattacaatatgagttacgctctctattgctggggtctcgcagttgataataagcacttagtagcgatgggcaaactcatgctgggagttcaaagacatgctgttaacagctacatgctatactcggacgataatcaaataatgccgagacaatttgtgggaaacaaagtgagtggaatattgtttgaaaacaaaatagatcacactacttactttggccaacgtccagagtacatccatggaatccacatgcttcccctaactcctatttccagcttcattcgaaatcccaagttctgcaaggaagaatggaatcaaagactaggaaaagaatttgtgtcagcaattcccgaaggaggttggaaaggtctactgacgttatctactgtcttatttgagccagaatttgcatacgatttttttgtgcgtaaggattttgatcctttgaatctggacaacggaatgtctcaaagctggtctttgctccttgcagctcatgctgcccaaaaataa

SEQ ID NO: 1199 - DNA, 942 bp, Pichia pastoris
atgtcaaaagcaaaccccttatcatttctctcttaccttccttcttatacccctccaatgatctcgtttgtaaggaggtattccaatctcagtgaccgcataattacaaatgaatctcatataaaagcactgttaacctggaacccggacacgccgtacagctcccttcaactaccgaacggagcaatcgctaaagacgtgaaacagaggtaccaccagctggccaaaatatatcatcctgacttgcacaccaataccacacaggtcacctttaccgatacacatggacatcgcgtttgcatatcccggaaggagctagaagaacgcttccgacggatctcagctgcttatcaaatgctaagagatactaaagcccggagagaatatgacatttcaggaagaggatgggttacaccacacggccccggaagatccaggcattccacgcaggcatccaccaaccgatttggtggagctggagtttcggatcatgaattcttttatgctggtacatgggaagattttgctaggatgcgggctcagcaggatcctggggtagcgcggagagaaagggaagaactgaatcgcatttttcttactggagccttatcaatggcagcggctgtatcaattttgtggctagcttggtccgttggaggactagatgaaattgaagcgcaaaccacagaggttcacgaaaaatgtctctcggatcttgagaggtgttacactaattacgggtttgagcagaacaaagtgacacgaataaatcgatttctctggctccgtaaacttaacgaattaatcatggggaacataaatccaatgcatattcagcccgttgccttaagtactgatcgcttgatggattacaacacagattttgtcgcggctacctcccaatcgggcgcctccaccagcgcggaagatagtagacgatga

SEQ ID NO: 1200 - DNA, 3219 bp, Pichia pastoris
atggttgaaaatacagaaaattcagaaaagagctcaattgatctcagcacatctgatagagctagtcaaaaaccagaattacctgaagcagttttggttgatggcaataatgagttggcaaaagttgacgatagtggagaagaagaacggggcaaaaaagaacaagaacaacaagaagacaaggaaggagaagaagaaggacataaccagcaaaccgaggaagctaatgggtcgataaagacatccaaagcaaaagaagagaatggggccgcggtcagtgttcatgaggcatcgtccaaggatgacgaaacattagatgaacagaaagaggggcagaatggcgtggacaagacaacagaggcaagcaacaaagtagcacagcagcaacttgatgcatccgataacctagattctttagattcttctacctcagacctatccgatgaactccaatctcaatcggacgtcaatgataatcccgatgcagagctaccacagtttacattccataggataagccagttgcccccttcatttatgaagcatgatcctatatctgcttcctatattcatgaaaagttttttttatttgctactcacaacggctttattcacatttccgataataattttcaagagataagaacttttagagctcacagagcctccattctatcccttcatacagatggggaatactttgcatctgcttctatggatggaacagttgtagtcggttctattcttaacgacaaggatatagtagcttatgacttcaaacgtcctgtgcatgctgtgattattgatcggcagtacaaggtgaccaagtctttcatttccggaggaatgtcaggagaggttatcttgtcaacgagaaattggctgggccaacgagctgatacagtactagaaacagagcacggccctatcacttctatcaaatgtgtcgacgatttgataatttggactaatgacaagggcatcacattttatcaaacatctacccgaactatgcttttgaacacacctttgcccaaaggctttaacaggcctgatatttactggcctaagtactccttccctgaaacggatcggctcattgttggatggaatgatcatgtctggttctataaactaactattcctcaaactgttcagacactacaagctgccaattttctcagtacagcggcttctagctttaggataggcgctgtagagaaaagcgttgaacttgaatctcatgttcatttgccagatactatcattggtggaatttcctccataaatgacaatttaattgttttgaattacctagcacctgttgaagacaaaagcaacaattcaagaaggccaaaaatgaaatcggctcctcctgaactgcaagttatcgatccttggacgaaagaggaattgtcagtggatattattgaacctaaagattatgcaacgttgggggtaaacgattatcatcttgaaaaatcaattggcgaaatggtcagatggttcctaatctcacccaatgacgctatccttatcaaggaattctcgcttcatgaccagctagagtggtatattgaacacaagatgtatcagaaggcttggagtatttctgaatatattcttccaccattagagagaattactctaggggtgcagcaggtgcatgaatatatcaatagtgaaaaatggagcgaagcaggcgagcttcttaccaaagtgctagctcacagtgatgatacttcaaaagaacatcaagaatacattaaaggggaatgggcaaattttttagacctattttttgaaaaaggacatcaggaccaaatcgttgattgcatccccaaggtgtatttcccgaactcagcagtgaatattgaccccaagatatacgggaaatatttggaacattatctaactgactggaaaaatatacccaagtttttacagttgtatcatgactgggatcacagattactggatttgagatatttccagttcttgttggacaatactttgaatagcaatcaaaatgaatctaacaataaaatgccaatggtcgataagattcgctttttgtttattgaattgtgtctagaaattgatgatcctcagccagcagttaaacatttaatcataatgagggatcctggaactctacagttcttgataagcaatcacatacttggaaagtttgtcgatagacttccagagattttaacgttggagttgaatgatgaagaattacagtatgctactgtagactttattagagaaaagctgaccacaaatattgagctacttgccagcaagcacagggaaataatgccatcaaaaatcattgaattgaatgaaagggcaggattatctgtaatcaattacctgtatttggaaaaactttcccagctagataagctattgaccaaagattttgaagatgagatggttatgctttacgccaaatttaacgtttctttactttacaactttctttcaaagcacaacaattacaacatagattcagcaatagagatttgcgaagagatgcattgctataaagaactagtttatttatggggcaagattggtaaaaacaagaaggctgtcactctgattatagataaactggaagacccagatttggctattcaatttgttgcaactaacaatgattctgagctatgggactacctgttagaatattccatggataaacccaaatttatcaaggcgctgattacagctgctaacagttcgcagtatttcaataacatggacgacccgtttgtgctgaagattgaccccatttcaattgttaagcgaatcccagaaagaatcgagattgaagggctaaagcgtgccttgatgaatattacttacgataactatctggagttgaccatcaacaaaattatcttacaaatcattcaagaagagacacttgagattggaaatttttacaggaaagagagactaaaaggggcaactttggaaccaagacaaaattcaaaatttttgaaagagacggtgatcatgtactcggatcctgcaaagccactagtaacagagactgaagttgttggtgaaggaaatgagtggaagcaagtcgtgaatgaagatgataatgccactatagacatttccaccaagataagtcatttgaactacatcaggcagaaactggttttattaagattgagaagtgaaaacggtcgtacctga

SEQ ID NO: 1201 - DNA, 612 bp, Pichia pastoris
atgtcccttacttggaaacacgaagttttggaagctttgaaggaacgagacaggaaggagtcaagaagcaaagaaatatatgaatcatgtgagtatttgccctaccccattccctgcactcttatcaatactaacaattcgatagttcaattcagtgtggacaagttccaagaattgaagcgtcaattcgaatcgatagagaaaaaggattctcaaattcaattggaaaagacaatcagtcagttgaaggttcaaacagaatcattggactcaacgcagcggagactacgacaggcccaagataaaaagaatgagctggaaaaagctaattcggaacttacaaaggctctaaatgctgcagaagatcgattgaaacaaagtgtcaataaattgatggttttgaaagaggagtcgcaaaccaagaacgccagccttgaacttgttaatgacgaacttttatcgttacatatacaaaataatttgatgaatgataagattgagtcgcttacaagtgaaaatgacaaattagtgcagagatggatggaaaaagttactaaggatgcggaactactgaatgaagcaaacaaatatgcttcacgaggaagaaattga

SEQ ID NO: 1202 - DNA, 1107 bp, Pichia pastoris
atggcaaagtctcccgaaacaagaatgcggcctcccctggaggcttcatttcactcctcctccacaagacggtttagcgggcctaaaaatagtcttgccgagtccaccagcggattggcctccccattggctaccaaagagcttaaaatttcgaccagcaaacaaaatcagactccagtgaccatcagcaacgatatgctgaacataaatcctaatctcaagtcaattgtggagggtggaacgtctcctatagcagaatcgaatgtcggtgtggcagcgtttgcagctacagcaacggcagcatctttacaactgagtggctccaactcctctaaaagtcccacatcaaggaatttgtcgcatgttccctgcaaattctaccgtcaaggggcctgtcaagctggttcttcatgtcccttttcccacactttaacccaaacaagccaggcagcaacttgcaaatattttcagaaaggaacatgcaaattcggatcgaaatgtgcactggtgcatatttctccggagggaaaaaaggttaatctgaaggctctaaatcaagcttatcaggtgccaaaacatgaacgatctctgtcctcttcccagggtttaagtcagcagatacacaaagatccagaaacatctgatgatcaagcttccagcatgtcctctcctactcgaacagtaacatcacagatggcatcgtctcccttcagcaatacaaactccatttggtcaggcacaggttcaaaggaaaggcgattgtctggaccatctttttcgacagggtctttctctagaggttcgttttccagaggctctttttctaatcacacagtgtccaaagctgaactaaatcaactaatatctgggtgtgctatttcggacgacgaagttgatggtgccgaaaatatgaatgccctgggtgcagaggactttctgcccagcagtctctctgacctgctaacaccccaagaactaaaacggaaaaactcaaagtctggtagtagagccaacttgcgccatctcttcgatgctccactacatggaagacaaaacgaggctggaactcgtattgacgaagacactcaattttggatcgactattga

SEQ ID NO: 1203 - DNA, 660 bp, Pichia pastoris
atgaataaattctcctctgatagcagcagaaccactgctcaatcgacaataaataagctgttagtgaacctcatacccggatctcagctcaatgatgcaaaagtggccaaaaaggcaaagaaaagctccagtgctaaaattatcagtgatcagataggttccagaatggaatttaaaagaaatgaagagaaaaggaggaagtttctgaagcaaaataaccttaagaagagaaagatgaaaaggaagagcaaggatttagaagcccagctagaaagaatcgccaggctctcaaatatcaaagagcttcagcaaatgtctgaagattccaacgatcctctgctggatcaagtcattgataaaaagatcaccgcattgctatcttggaccacagacaactctgagttgggaactgagatagaaaaattaaagaaagacattttgaacaccgataatgaggaggttagaagaaggaagagctaccgtgatgaggaaagagaagaggcagaatttagatcagaggttgagaagggctccatcgcctatccaggtttgactcctggtttggctccagtcggattgagcgatgatgaggatgatgaggaggaggatgagtctgatggatttgataaagaggaagaggaagatcaattttcagaataa

SEQ ID NO: 1204 - DNA, 1902 bp, Pichia pastoris
atgaagtttgtggctctggtttcaggaggaaaagattcatgttttaacatatggcattgcttgagccagggacatgaactcatagccttagccaatttgtatcctcccccagagggctccgaggaattggactcgttcatgtaccaaacggtcggttatcaggcattggaacattatgaagaatgtattggagttccaatgcaccgaagagtaattgctggaacgtcaaagaatcagcaacttgagtacgaaaagacagaggatgatgaaatagaagacttgtatcaactcttgagcgatgtcaaggaatctcatccagaattggaagctgtcagtgtcggagccattctttcatcgtatcagaggactagagtagaagatgtctgtgcgagactgaatctggtagcactctcttacctgtggcagatgaatcaactagggcttatgggagagatgtgccaatcaggcatggatgcaagaattataaaagttgctgcaattggtctcgatgagaatgatttggggaaatctcttattgaaatgtaccccaaacttataaaactcaatgacatgtatgatgttcatatttgcggtgaaggtggtgaatttgagaccttggtttttgacgctccattctttctaaaaaaattatcaatcactcaccaagaggttattaagccatccaatgatgaagtttatcatctttccttgggttttacgactcaagagaaaagcaaggaagacggagatgctacaaaatttttgagtgctccgccactgctgaatgaagagatggaaagcatttatgatcaattaagttcaactaagttcaagatccccttagtagagaaagaagcccaatccgcactcgttgaatttgaagttacatcgaaacaagtcggtaatctactttatatctccaatttgtcatcccgggaggacgaaattgaatcacagatcactagcattttcactcagttgacagacattctcaacactcatggtctttcatatgaacacattcaaagtgtccagctgttcctacgtgatatggacgactttgccaaggttaatgccatttatcaacagtattttaccaaaccccttccctcatctcgggtatgtgtgcaaacgttgctacccgagaagaatcaagctttgttatcagccattgtcattcccaatttgaaagacaaatcaggagttcacgtcagaggaattagttactgggcgccccataacataggaccatactcacagtctattttgcataaacagcagagaactacggttgcattgataagtggacaaatccctctgatcccccaatccatggtcttagctgaccctaacgacagattactcaatgttgccttatcgcttcagcatttcgacagtgtaaagaagctcatctcacttgaccagaatgcttttgctatctgttatttcaaagacctagagtacctcccaattgccatagaagcttggaaactttatgaaccttcttctaaagtaccggtggtattcgctcaagtgacacaactccccaaatcagctccaatcgaatggagcgggtcagtgtatcaagagacaccaaactacgatgattactacggtgattcgtcagaaaatgaagatgagtccacacagattgccaacaacttgtcctcgctagaattacagggacaatcggtcacatttcaagacggctacgttagcttgacattcgccccaggcctatcagccacagcacacaacacggtaattttaaacaaggggcaggcaagcaagctggaaaccattccacaggaatattccgtcgacatcatccccgtcaacagactgttcgatttcacagggaaagatcaggacctagccgtactccacaggctgaacatctga

SEQ ID NO: 1205 - DNA, 780 bp, Pichia pastoris
atgagtagcacaggaacgccagcggaaacaccaacccatgaagactcaggtttgttaatagacgtggaaaaagaaactaggaagttagttaggttgagaaataaggctctcgtcaaagctgccacttcctcagacccagatacaatacgacgatatgaacgtcttagaaatgatagaatcctcagaagtgaaagatataagcaggaccaaatagcacaatggaaagaaaagggaagggtagatcttataccgaaggatgataattttggtagaatggcaaaccgattagcacaggcgaaaactggaaattcagacatcactagacaacataatgcaaggtcccgatacgtcttacaattaaagaaaattaggggatccgggggattcaaggattcggtaactccatatgggtttcagaaattatccaacgagggacagaacttagaaatcgaaccaatatcccctgtcatccagaaacctgagaattctgaatctactgtacaacatttgcccacaccgggccatcattcgttggcaccaccaccaccaccaccaacatcacagcatttttcttctattaatcctacaatccaatctaattctggtcctaaccaaaccttcgtacccccattccagttgtcatttgcatttcccctttcagcaccaccaccacctcctcctccgccattaccaccaccgccgcaacccgtggctgtaggagtgatacagcctaaaaataaccgtagaaaggctaggaaaagacccaagattgaatattaa

SEQ ID NO: 1206 - DNA, 474 bp, Pichia pastoris
atgtcttttgaaagtgctagttacaacgatcaattccaatatgttctgctgcagatcctgacacgtctttcaatctacttaaggcatgtctcctactggggatacaaagcttcagtcgaacaccctcaaattgtaagcgtgattataactcttttgggactgttcattaccttctttttgatcaaaaaactagtccagttgatcattaataccactgtatttgtattgaaattgtggattgcaattgctctcgttttcttggtttacaaattgttcgatagaggtactcttttcttcacagaggatctcaattatttttaccataatttggaaatctctcagaattggtctggatcgattcgttccatagacacgctgatcactaaagttatcaatcaagcaagattcttattgaagctactgctatctacctatttaaaggataacgagttcttgacattcttcagagactaa

SEQ ID NO: 1207 - DNA, 594 bp, Pichia pastoris
atgagtattaccttaaagcttacctccttattcataaggacggtctcaaaaccaatggctagcgccataaaactgcaggcgaaagagcatcctaaattcaagaaaacgtgcatcttagtggcacagtctttacatcaatgggactccaaattgaggatgcgtatcatgggccacgacgtaaccatacgaccgttgaacgatgccaaagctgttgagaatggagctaactttctctctgagtttgtcctgttttctgtagccggatctctcattttattcgaaagtcaacggcaacggaagaaagaggcagcccgaagagaaaatgtggctgacgatatctcaacacttcagcatgaaattgagtatctaaaacggaaaatggaagaatataacatgaagctagatgattacaaacctccacaggagttgaagcctagcatcttaaaacttgagcctaatgttgatgaatctcacagtcttcctacaagggaagatgcgatcagcagactaaacccaccggtcaagcagcaagataaagagaagagatttccagttaaagatgataatatcagagaagagtcaaaaagttcataa

SEQ ID NO: 1208 - DNA, 1740 bp, Pichia pastoris
atgtccaccctatttccagggtttgtgcccataacggccatgttttatgcggtgttccatcctacagagggaacaaaagtggttcatcaggtgcccagtggatccatggttccaacagatgcgcaggactcatcaagcgcagacgaaccgttgtttcactttgactcgattaagaattttattatcccgaaacctcaactctgcgataggctgatttctttcaaagtagaccaatttcgggtcgtaggatttccagtcaacatttatgggtctcattatgcaagaaattccttcagcttcaatttctgttttgtcttcccttatgatagagatattaccccgtataaaggaaatataaaacgtttgggtaaaatgtttcgggcactagaagagcaaagtcgaatcctctccaagaaatcaggcgagaattctggtgaaatcttcttcaaagacaaggaaagttccgattacctacaacaacaacattctaatcccttatttcaagtcaatcaaggcataacggaagatacaaaatatttaagaacagtgaacccaaatgtggagctacaagacattagggtaggaggtcacaaactaagtctaaactctatcgaatcattgattcagcagatttaccaggatcttaataactattctgaatgtcttatcccgattgatgcttcaaactctgttgatataaaactctttcctgtgttaccatcaccggctgatatccttccttctgatgttcccgtaccgaccatgaagctagattccatggtagacttgaattgggatcctaccatgatcaaaatcttaccgttcatcaacggtataaaccctgtttgccgaatttcacagttggctgatgcagactattatctgactaaaacttgtatccagcacctactgtattaccagtgtctgaatatggtttcaatattccaattctcaaacacttatgccccaacaccaaatgttagattattcctgacgcacccaaccatggctgcggaatgtcaagagtatgtcttatctgaagatgtgtcattctcagagcttcccatgcatacaccatcaccattacgaaatgaagaagaagattatttccatcgaccttcatctcattcccaatctgcttcagctgcttcagaaaaacaagttcgtattgtcgtcccatctcaatctagccttttcacgctctattcctctcttcatcagggccatactataaaagaatggtatattcatcatcaacggcatttgcgcaacatagacctaaggaggtttttactttttggggtgttgaaaggtatcatatatcacgttagagccatcccagtgttgcatacctctcacttagccctaggcagttctgccattgatgaagatccagcgcaggaaaacctcgttgcagaagaaccgacaagttctagccaacctgctttcaaaggcctgagaagctaccagctcaacgaggatatcagcgaaagtgtactcactgtgaattcagggaaggttcgttttagaggatctgctggccaagcagacttgtttcaagaaaagcccaacttcaagaaaatttctcaaaaatcacgtcaaaaacaacaactctttagacatatgcaaaaatccagagattttgactatatttgcaccgaattggcgtctagcaggagtgaagtcgaaagcctgttggatgaatactttggcagtgagtgggggcttctgctctgctga

SEQ ID NO: 1209 - DNA, 1344 bp, Pichia pastoris
atgacatctccctccccacccaataacaaagatttcaacaaaacaaacaagaaacgttccaatagatctggtagccggacgtttgtctgcacaggttatcccaactgcagcatgtcctttacacggtctgagcatctggcacgacatattcgcaagcatacaggtgagcgtccgtttaaatgtgaatattgtgcccgaaagttttctcgtatggacaatcttcgccaacacaaacagacagtgcatgcttacgaaaactttgtcatctcctatccaggaaggctaggtgatatgcaaattcaggaggagtcttctgcgccattggtaaatgaggtttcaggcccatcgcatcgcaaggccgaacttcctaaagccgcgtccgaggggctaattccccatagttcaatgcctcgctctccaccaatggcggccagtaagtcggaaagttatctctcgttgcccaattcggggcctaaccgaatgctgctctctgatcattcacaaattccccatggaaagcaacatgagaatcacgcactcccctctctcaatccccaacaaccaattcaacacagacctgccaatttttacacgaccaatcacccccaaatccagccctccaatcaacagcaagatgttcaaaacagcactgttcatggtttcacgaattcatcccaaccccagggtttacccagattcccaaacgtaagtttccttcaaggtgcatcgaatcatcaggaattaccaaatcctggacccgtgccctctccacatccaacaaatgaaaacaagaacaagccacagcttcagcataacagtacatcttccagttcatcaatgaattttcagccgttacagtttcgtccgatgagctatcgaccgaaaccactctcttcgcctcttcctcccaacaataacagcaaaaacacacctggaaacctacttggtgccccgttgtcatctctcccgttatctcaatctcaatctcaatcacaatcccctttctactcctctcctcaacaacatagcacaggttttgttccatcgtctttaaggcgaccaggcacgatcaatgaaaatgcatctccgtcttcgaaggggtccccatcacaagcaatatccgtcccccaaactcccatttctaccacgtcctcatcaactgcatcttctgtcgggtctacccatactaggttctggcttaacagtgtccttaacaataatgatcccgtggcagaaccagactacggaaaccaaaatggttcacccagccctacaagtacttcgtcttccacatcgaccttggagtccacaaaatgtaacatagattcgctgctcaacgagtaa

SEQ ID NO: 1210 - DNA, 1101 bp, Pichia pastoris
atgtttggaggctgtagtagtattccactttctgatgttgggatttactccagacttgtaaaccttcttgtcaacatggttgacatatcattgcggattccattatttttgacccgtactggtctttatgtgacattgatcactacttctgtagtcttgttgctgttgccgctatcaattttgtcataccttcggttttatgagctacttattccgattccgaagcaacacgttccagtacacctcaatacaaacctaatatcatcaaagccagacgggacgttttatcacaatggtgacttcatcaaatttggagttctcaattctgcacagttgatacaacatttagaccctgaagtagattataccgtcacgctcataataaaaattgtcggaacaagttcaacttcaaccgaaacttctgttcctgactcaaatgttccactgagggtcagcatactatccaatcatctcctcaattctctcaagatatatgatataaaagggccaaggaataagttctggcctataacggatgatcttctggttccaagtcaatttgataaacatagtttctcatcaatcccagaaacttttacattcacaggcaaaggggtgtatctatgcacgacaagtgtacaaaccatctacgactaccataacgagaacgagttaatcctttggaaaagttttgaaatgaaaatgtttatacctcccctgttcaaaagtttggtacctcctttaatatttaactatccagatcgaagtgaagacgattccaaagtcatcaaaatgacagtttctccgcaattccgactcccatcttccaaaaaccatttgtatcaactaacacaatctcatcttttggtggagctcgcttcaaagtttaacaagaacatccccttaaactctgattcccttgtgttgcaactggatgtcaattggcatggggcaagatattatatataccaccatccactaatctcttttttctttggggtatttttattttggggtttcagttctatgagctgtgttgcaattgggctgtccttatggtacttcttcggcaagacaacatccgtcccaacccaaaaatga

SEQ ID NO: 1211 - DNA, 609 bp, Pichia pastoris
atggggcaagacagggaacaagtgactgataaaactaaactacagagaaatgatccaaaagaaagtcaatatgaggaatacaagatgtaccgtgaacgatcttcctataatagggatagttcatccgttaataccaagagagatcagagcccaaagagacctacttttaacatcgggccctcaggaatcttgggccagcaagactccaaagatctgaaatctaagtcaagctcagagaaagaaaagaattacagcgagccgccagaaaaaacctcccctccgaaggataaatactacatctttctcttcaatgacatctaccctgatgggaaacgaatctctctgaataattccttttacactttgggcaatactgacgactgtgattttaaactcgcagatgtggacattggtcaggtaaacaccgttattcaattcaggaaaatgaaaggtacaataaagccatacattattgatcttggttctatgtctgggactaatgtcaatgatattccaataccccccaagagatatctcgaattgaaaaattccgattccatcatcataggagactcgtcttctgagtttatattcatgatcacaggttaa

SEQ ID NO: 1212 - DNA, 732 bp, Pichia pastoris
atgtctgatgagcttgaccccgataatgtcctcggggcttctgctgatacccaaagtaaggacatcgatgaaactaaccaagatctcttgggtcctaagaaatctacttccacgaggagaaagttgtatgttttaaacgaggatgttctactatccagtaaaggttatcccgacttgttaagacagtgtcagaatttcaagttcaagaagagaaaaccctacaaagaatttaccagatcctatcatatggaaaacatggaaaagctactacaaatgtaccaattatggggccatcaagtttatcccagagcaaacttcaacgattttaccaaagtatgtgcaagagcctcaaacagaccaagagtgaaaaggtggagagttcaaacgacaaaagatgaaatcaatagaaagttctacaatgaaactggtcaatttgatgatatactggtggaaaatggtgagaaagatgaactaccagtcagagagtctacaccaggggaaactacagtgttttctaatacagaaccacaggacagtacactaaatacccacctttttgttgatgacgatgacgacgacatttatacaacaatgccatccaattctacgtctacgtctgcatcaaaggaccctactcacgaagaaatgctagacatcgacgaacccacagtccagaaccaggaactggatttccaggacgaattagaagccatgagagaaatgggaatgtaa

SEQ ID NO: 1213 - DNA, 1554 bp, Pichia pastoris
atgagtacttggatcaagggcccgatatgcggtatagagaactgttcgtcccgtctatataggtcggtggatggccgccgagtatgccgaagagggcatgtgtcggaacatcatatggatatcgatgatgacgatggggcctttgttgtaactagaaggctcaacatgagccaaggagacgatggaactcttttggcaggcggagcacgctcatcagtattctctcagcagcagaacgaaggggctggtgctcctcgtgaaagagctcatggtttagatggtcgcaaggtctgttggcaatgctaccaatatgtgcttcgaaaacaagcgcaatggcttattgaaaatcatggggtacctgcggaattcgaaaccgtagtcaaagaattatggatcttctatttaaaagggtatgaacccaccccaaaggaaaagatcgacgatgcatctgaaatagaacgacaatcaggaacagaaaatagggtacccagtctgctacatgctataagcataatatatttagcattgctgagaatgcaaattccaatatttgtcaacgatctaatatcatgggtttccacagcttctttaccatatatgagggcattttcaatactccctcgtacattgcaacagagtattcctacccagtacattaggatatttgagccaattaaaccgccaataagaaatgaactttactggatgatacttcgtgtttatcagttcattcatagagtggatcctaacccgttcgttgtggattgtagtctatttctattcaaactgaatttagagctcctattacccttggacgtgatgttaatggttcaaaattgtttatctgatatagatgagaacgtttacgaactaccactgttgaaacgggggatccacaccaattaccataatgacgtgtttcttgccaaagatcttgtgaaaattccagagttgcgtatagtggggctcctaatatgttgcactaagttctatttcttcaacactgtttccactagggtaaaagtggatataacacgatggtacacactgataaatcgatacaatttcacattcaatgccggtcatctgtcggaaatgatattcaaagattctgatgacaataagcttgccaagtgggacgaagaccaagttgatagctacttgaaatggtttgaagaaaacctgttagagcaggagaaggacaaagattctgcaaatatggaccctgcgcagcggcgcttacgggaagtatttacattacaaggcattgacaccggagagaaggtgaagaagtcctcaaaagccttcaactccgctgaggagaagcccacgctcgttgaactgtaccaatctttacttgatggcattgaaaacaacgatccttctcggtctaacgcgtcggcgagtccaacgttgaactccatacggcagcttcatgactttcttatctcccgcctatctatcacttttggagtcactgaggatagactcggtgatataacacggctttgtcaatcatccattgaggggtctggggtaaaggcaaagaaatag

SEQ ID NO: 1214 - DNA, 378 bp, Pichia pastoris
atgaaaagctacaggggtttatctaatcctcaactctttatcattaactgttccagaaacatgtccgacaatgagagagatgatccttttcaggtaaagcagctagcagtacagtttgattatgtgctgtacaaaataaaggataaagttgagcaaatggcagaaactacccaagcctctattttgaaggataaggaacaacaggatctggaaataagtagggtcaagcaatcgatcagcagagatgagctacttttgaaacaatgtgacgagctagaatctgaatttgaaaaactagaccagttatcggtgattacaggggagttcaggcatagaatcaaggaagttgagaagaaactaaggagcaaaaaaaggtga

SEQ ID NO: 1215 - DNA, 372 bp, Pichia pastoris
atgcgcgaaaacctggacactatcagaaactcaaagaaatacttgaagctctctcccttgatttattctgtcttattaacaaccaaattcaaaatgtctacagagaacaaagcagagacaaaacaaaccaacttcaaagctttggaagaggatgacgagtttgaagatttccccgttcaaggtaagttatcagcagtgtcagatcgagaagtggatcaactaacgactgaaatagattggccaaatgacaagaccatcacagctgaaaaacaagagcatctttgggatgagagctggaatgatgacgataacgaagatgatttcaccaaaagattgagacaagaactcgcaaacgctgaagcaaagaaatag

SEQ ID NO: 1216 - DNA, 627 bp, Pichia pastoris
atgagagatagatacaacgcctacattcacaatagcaaaccctcacaagtactgtatcaagataagttgcagaatgatgaacttccgtttgataccattccgttgaatttcgctaattattactacagtggtaacgctctgcaacagttaagctgggaaacagaacaggacgaagaagacttgttgaacgagtttcaaagtaacgcatcagctgcagctataaacatgagatttggaaagaaaactaaaaaaagaaactggaatgatttaggtactggtctttttttgggtgaattagaaggttctaatactaagaactcgaatctggaggacgaaacaatacttgaaacggtagacaaatcgttattcgaacccacctctctcaaagaagattctctggggcaaatcaatgttccttggttgtcgataagcgaaccttcagtgagttttgatgattccaactctcacattatcaatgcagagtctgaaatttcgaatccagtggtccaattaaacgtgactacccctgaagtctctaggaaaccatctctagggagaaaaaggaagacaaccgtcccgtccacatctaccgtgtatgaaactcccatatccagaagtatcagatga

SEQ ID NO: 1217 - DNA, 648 bp, Pichia pastoris
atgtttagaggtctacaattgatcccaagatttgctagctccactcgtattcgtttgtttagccagaaaagcgtgctgcttgatgcggcaaaagtgaattattacagaatctttcataacaccttcccttatggtcctccacccgccggaagtttcgatgtcgaccaaagacaacttcgaaaggagttcagaaagctacaagccaaataccatcctgatattttgaatagtggggatgataaagtgcacctggacgatgaagaatattcaagtctcctgaacaatgcttatgccacattgaaatcacccctaacacgagcacagtacatcttaaaattgaatgcaaacattgacattaccacagatgaagcctcaaaaagctaccaattcaaggataaagctcttcttcttgacattttggagatacatgaagaattggagaatgtttccgacgattcggagttggctgccctcaaaatcagtaacgatgaacgaattgcagagtccatcagcaagttgggccagttgttcaaagacgaggattacgagaatgcagcaatggagagtatcaaactaaaatactggttcaacattgataatgccatcaaagagtgggaggagggaaaacctgtgataatgacacattga

SEQ ID NO: 1218 - DNA, 984 bp, Pichia pastoris
atgttaacaacaattcttgcactcgctttctttagggctttggtgttagctgactcagtggaattttacatatatgtttggcaacctggctttggtgtagaagatgcctattggggagttgatgagtctggcctgattactgcagttggtcccggatacgtctctgacgacatacctcaagttctatttgttgtcaccacggatggtaaattacaaggaaacggccaactagtggaaataaccccaccatatgacttcctaactctgagacaaaataatactggtaccagtggcttttcgattgactatgatgacatccccacactcctactaaacggagcagcaattgatcatgtatggtcttgtttgagtccagacggtgaccatggtttcgttatcagttcggattcaccaaatgcaagttgcagcggctttaccgttaggatttctttacaacaggaaccaggaccatgcgagggtgacgaatgtacagaacctccagaacctccagtgtgctctgatgacgatgacgaatgtacagaacctccagaacctccagtgtgctctgatgacgatgacgaatgtacagaacctccagaacctccagtgtgctctgatgacgatgacgaatgtacagaacctccagaacctccagtgtgccctgatgacgacgatgaatgtccagagccaccaactgacacaactgatgagactccaaccgagaccccaaccgaaaccccaaccgaaactccaaccgaaactccaactgagaccccaaccgaaactccaactgagactccaaccgagactgcctacccaccaactctaccaactgacacaactctcacaaccgctccaacttcaactagtagcgaggtctcgacaccttctccaagcccttctgtaggagatgccaatgtcattgttaatacccttggattaacaggactgattgctgtagttgccatggtgttattggcttga

SEQ ID NO: 1219 - DNA, 1365 bp, Pichia pastoris
atgtttaaaaaattacttcccctagctctcttcaaagcaatagttttggccgattccacctcttttaccatcaactttggacctggtgaaggtcatagtggtactcctttgggtgttaacgatgctggcgtcatcattccgagcaccactggagttcgattttatgtcaatgatgacagtcaactgaaggttgacaaccacgagctgcaggcggcctcaccattagatctcctgtccttgattaatagcggtgctgaaaccaaagggttttctctagttaccgacccaccggcccttttgcttaacgacgcgacccctagtctatggatttgtgaatcaagtgacgtttctcgaattgcaatcagtatagattcaccagctgatggctgtattccatactccatcaagcctaaactcgaggcaaacgtccgcaaaggtggtttgtttgccagagatgatgatctcactgacagcgatggcgttgacactgatacagaagatgatttgactgacaacgatggtgtcgataccgatacagaagatgatttgactgataacgatggtatcgatactgatacggacgatgacttgaccgacaatgatggtatcgatactgatacagaaggcgacttaactgataacgatggtgttgacaccgacacaaatgatgattggactgacaacgatggtgttgatactgacactgatgatgattggactgacaatgatggtatcgataccgacactgatagtgatgatgaccaaagtctagctgggcctgtcaacccaccaacgagtgcaactctcgcaaccacttctacgtcctcaacaagcgctactttcacaagtctgacaactggaggtgatttgactgactctgatcctgatagctggactgacaatgatggtgttgatactgacacagatgatgattggactgacaatgatggtattaatactgacactgacactgatagtgacgatgaccaaagtctaagtgggccaaccaacccaccaacgagcacaactctcgcaactactgctacctcctcaacgagcaccacttctgcaagtgctctggccactggaggtgatctgactgactctgatactgatagctggactgacaatgatggtatcgatactgacactgacagtgacactgatagtgacgatgaccaaagtcaaagtggaccaggaaattcaccaacgggtgcaactcttgcaactactgctactacgtccgcaactagcaccgtttcaaatggtcaagtaacatcctcagataatggggccaatcatttcgctggtgcagttggattatcaggagcagccggtggagttattctagctttactgatttga

SEQ ID NO: 1220 - DNA, 1098 bp, Pichia pastoris
atgtgccacgtcttggggcagtttattttatttatgacaatgttcaaaacgttactactgccacttgttttatgggaagcaagggtccttgcagaaaatgaggacgagcttggcataccatttcatatcgttaatactttacccgaagatgagtactacaattcaactgcaagtaggtacattgatactctttggggcacacaggcaaatgcaattgctgttgctggatattattatgagcagttaatcatccaagaagttttattcaccctaactaccgatggtatattgcaaggcaatgactctgactctaaggttgaagtaacttcaccaggtggtcgtttgacgtacagggaagaaaatgagggtactcccggattctctctagatctcaatgacccacctgcccttttgctggatggagcaacaccaacaatatggatctgtccatcaggtaatactcctgaggtacacatctacgacgagtcacccggagatgactgtcttgaatatttagtttcggttcaacccttggagccaggtacaattgatccaccaggtgatggtgatgatggcccaggcgacggtgatgatggcccaggcgacggtgatgatggcccaggcgatggtgatgacggtccaggtgatggtgatgatggcccaggcgatggtgacgatggcccaggcgatggtgatgacggtccaggcgatggtgacgatggcccaggcgatggtgatgatagcccaggcgacggcgacgatggtccaggtggtggctctggtggtggctctggtggtggatctggtggtggatctggtggaggttctggtgatggatctggtggtggtgatgatgaggacgacacaactactactacaagtagttcaaccacctcaagccctgcaactagtccaaccacctctacaacatcagctacaggtacttcaaccccaacaagcacgccagggactaccacttcagctcccacgacgacttctagcccagaagcaaccaacgctggtggagccgccaacctagttggccctaatgggctgccgggattgattggaggggtagcaattgctctactgatttaa

SEQ ID NO: 1221 - DNA, 399 bp, Pichia pastoris
atgcagtcacagtatctatattccaaattgaagttggaccattttgataccaggtactgcaaggttttattaggaaaaagccggttacgattgcaatatatgaacaggataaggcgcatgcagaagcggcgctcgagcagggtgcaggacaaccagtcccaaagagtagagagaattgggtcttggcaatccatggaacatcacttcattcgttccagaacgttcaacctgtatctgtttcaattagttggatgccggcctagcaattccgtagtctcaggcacaattccgctcacgccggaaagactgatgtccataattgattctgtcgtacgtctgtccttagacaggaagtgtacagcgcacacggcaaagctaaactacacaccgacagtataa

SEQ ID NO: 1222 - DNA, 990 bp, Pichia pastoris
atgggtacttgtatgagcagacctgtcattgaagacgtaaatatcgaatcagatgcgggagaccaatacacattgaatacggtaattatacaccgcagtccatcacaacccattgaggttcccagtgccaagattcaaccaacgaaaattaatcgtttaccatttccagataccgttaaattagctatgtccgttaaagattctagcttggcagatttgagttattcgcctaatttacaggctgaacagataaacaatgaaaacgatatgcctcaggaaaccacgagtcttgcaagaaaactgaaagaattgacactaagaaataaggcaaaaagaaaagtaaggaactctgatctttttgggcttaaggttattcccaatcttaatacaacagtaacgactcagccacttcaagagctgtcgaacagttatggtaatgaaagtccaagtagaggtacaaggagaaattcaatcgaagagcacgtaattccttcaaaggaaacaacagtacatattccagaaagactcacggataccgtaagagagtccaatcaggggacaaaacttcccatacttcaacctcagaatagtctaaccagtttatttcatcctagagaggaactagaaagacccggcattaaagtttacaacaggtcagtagagtcattctgcgactacccgaaacttacagacaaaagaaatatgtcccacctaaaaagatgcaagaccgaaggaagtctagcaacatcgaacagtattcctctggtaatttctaaaatagtttcaattggttctcaattattctatgatagaggatcttctaaaaaagacgatttatctgaaacaacaatctctgaatgttcgcccagtccaattggtgacacccaattgaaagacgaagtgcctaggattgccccaattagtccctatgatgaattcttgaataaccctactgaatttacatgtcgtgattgtaattcatcagtttaa

SEQ ID NO: 1223 - DNA, 567 bp, Pichia pastoris
atggctttcatcagcgctgcaaattttacatatattcgactcggatacctgctcacgttgtccttcctcctattgaaggatcctgtgtatttggttcactacccaatgattatcctgttgactagagcgatgaatcttccagagctggaaatggatgagttgaaccccatttttggtctaatttctgtcctgattcttctttatgctgttcatgatttgatacctctattagaaggaaatgtcgtctacttcagatcaattgtcccagttcgggtttcactgtttctgatcctgatattctactgctatgtgggttcatcgtactatctttgcaatgggttgatctttagtttcttattcatggagatttggttcaactttttcctgtattctcttttgaatgaggaaaaagagaaagaatcacagcaagaatcaatcagtgccaaagtgattcaagaccagattttacgaggagatcgggacgacgtggaagaaatcatcaatgagttaggagagcaagaatttgagaatatcatgtctgatttgaaagaaagaggcagtcagtga

SEQ ID NO: 1224 - DNA, 849 bp, Pichia pastoris
atggctgttccttttgaaattgaaccatacgaaattcttggtgtgaacaatgaagctacacctgtggaaattaaaaagtcctactacaaattatgcctgatacaccatcctgataagaaatctggatcagactcatcaaatgacgaacatttccaaaagatccagtttgcttattcaattctctctgactcgaaaaggaggaaaagatacgacagtacagggtcactagatgacactgccctagacgaagatgggttcgattggaaagagtactttgagacgatgaaaagccagccagtcactgaggatttgattgaagaagatagagaaaagtacaagggaagtgatgaagagaagcaagatattattgatgctctccaattttatgaaatggacgttccaaagctctttgaggccattcctcatctcgagtttgacgagagtgaagaagaacgtatcttccacttggtaacagaattggtagacagcaaacaggttgaaactacaaataaatgggacaagtacaaacacaataggaaatccttcataaagagacaattgcgcaaattggaaaaggaggctgttgaagctgaaaagcttcagaagaaactggcgaagcaaaagaaagcagatcaggatatttcaaccttgcaaggactacagtcaattattcaggctaaacaacgatcatctaatcaaaagttggactcgttgataaataaactggaaaccgaagaggacgcaaaggtaaaatccaaacgaggtaagaaacggggtaccaaaagggcagcagtcccagatattgacgaagaagagttccaaagaatccaggcaaagctgaaacgatag

SEQ ID NO: 1225 - DNA, 1566 bp, Pichia pastoris
atgcctgagcaggtgaagccaactcaaaggccaaggtcgaagtcgtcactaagtgataaggaaactcatataaccttctggaagctgttcaagaacgagcttaggaagaatttggattcgaagccagaaagaacgaccccagatttaaagtacatccagtcattggaacatttgaccaatctctacacagtgcccttctatcttgaacaattcatgagttttgggttggtctattgtttaaactcgtttctgacattgttgacgatcattccgttgagggtgctaatggtatccatcctgaaacttcgtgcagcgtttacgaatagtgtccccggcaggtacagattcaaaagagaagatgtaacatggattttgttgcttttgagcagttcaattgccatttccagtatagatacttccaagatttaccacaatattaaagctggtaccgtcataaagttgtatgttatggtgagtgtactagaagttgccgataaactattatcatctctgggtcaagacatattaagggtgtcgttcaattttccattagaaagaagcctttcttgcgcaggaaaatgcttcctggttgcgttgctgagcacaacctacatcagcgttcacgcatgtgtcttcgtataccaaattatgtcgttgaacgtcgccgtcaattcgtattccaatgctctgttgacgttgcttctctctgtgcaatttgctgaaatcaaatccgcagtattcaaacggttagaaagggaaggtttattccagatggcatgtgctgatctatatgaacgattccaactgtttctaatgctcttcatcatcagtgtccgaaatctggtacagttattaatgtctactgaattctccattagatcacgctccttgggcgaaaacatagccatatctccagtggtaatcagttggataggcatgctgatgggcccgtcttttgcggtgatcggctctgaattattggttgattggttaaagcatctttacattggaaaattcaaccgcataaaacctcagatttacagaaggtacacaagaatactaagccaagatttcctacgtgagtaccggcaaaatgacccggactgtacgaacccacctgcgacaacagagagctttgctaccatgaacattcgtttgggcttaccattgttgccgataactgttgcattctgtaagatggtgatttccagcgttcgaaaagcctgtagtacccagaattttgatcaaagtgtcctcttagccgtggcatccgcggctgtcatcttgatccttcttcgcatgagcacttacgtgatgctgataagatgggcacgccacaacactagggccaagacctcgcctagtggtggcgactatctaaagggctcacctaacacctctttagcggggattgaagacattcatacacgaagtctgctgtatgggtcagacgagaaaatgccgcaatctaaagaagaacaaaggtcccacaatgcgaatcgtgatggtgataaatcattggctcaggtcagtagatttgaaatgcatgataaacgcatatggtga

SEQ ID NO: 1226 - DNA, 2028 bp, Pichia pastoris
atgttcaagaactgtgagccaactgacacgttgtctttagaggcatgtaaaaaaattgacagggagtattataatgcaaaaaattctcttgcctatctattgaaccaagaggtactgcacaatgtggccaaactacagctatatcgcacccccgaggaagaagaagtgacaacagaacaattgaggttgtttcaaatagtgcaaacgacgtactgttattgtgagtttaccctttgtcaaagtcgaactttcaaagacccactcttcacggaatctgaaaagtgtttagtgtcagagagtctgaacatcttccttgtagcaatatcaacaaatgattcctttggtaccgtagctattcatagataccttttgtcgtttcttctgcaaacctccgagttctttcagttatttccaaatgttcctagccattggatgagccttgacagacaaaacgcaagtctgaaggatgagaagatttggccttcttcttacttcgaaacgaaactatttcctttatttgaagccattcaaagggtctcgtttgctcccacatcacatcagtttccggatgaatttggaattttctatgattgcttccaaaatataatcaagtgcgctaataattcaattcaagttgaaaactgggtaaagcaatccggcaagcttgtgaggttcattgtaaagccttttgaggatatttcggttgcgatgttgatccaggctcccaaatttgaaccgattctgtacaagtatcagtttcctttacttcgaatgatggatggaacgccaattagtgatattgatgtaaacatcaaagtcttattccagcacatcaaagaagaagagacaactgcagtcaatcctagtttactattcaatattcgcctgcttgaaaggtggctctgcaaaattttaaaactcatgattgactgtcaagcaagagatattagaatcaacattttcaaagaaatccgccgtaacatattagacttgataaatgcattttttatccgagaagacattaattgctcaatttgctattacactgtatatcttctgagtgaatttgtcaaaatattttcaatcgaacatgaaatgcttcaagaagagttcctaactcccttaataaatgaaacatctttggaaaagatgtttcttcattgcctaaacagggatccaaataaggacatgatagaagacattaatcattggaacaaactcacgaatagccaagtgtttgttttcaaattagtgtatcaattattcaactttggtctggaccaaacactagcagtcctatttctcaaagaaccttctcagttatgcaaagaagtatgtcaccctcaattggagccagccaaagaaaatgagattttgcggtcaatgtgttatgccataactggttccaagagttgcatagttgataccgatcaggtagcaagacagatagtgcaaaatttgatatctcaaaacaaactggctgctgacaactccaaaggaaatgatgtaaataaaaatcagcgtttagaatttgattcgtccaaatctttgtcattttacctgttgtccacacaagtaagttatttttataatgaccctatcacttgcttcttttcatcaggtttgttagttttgttgaatcgactcgtagattctttcgacactggatgtgccattccaccaattaaagaagtaaccagtaaagagggatttgaaaatactattggtattattagcaggataatagtggaaaattacaactgttttcaattgtatagagagatcatatccaaaaaaggtgggtcttttaaatatattaaacccagtgaatctatccaacagttactcctgcaatccaataacaaaactctatcacagacacaagaatgtttgatagaattcattgaatctaatgaagttgttgacatttcagtattaagacaaaacatgcaattatttgagacgcttgtgactagtctctactgcattgaaaaagccaaatccataagaacccatgatcataagtaa

SEQ ID NO: 1227 - DNA, 726 bp, Pichia pastoris
atgctagtattggggcttacaggaggtattgcctctggaaagagcacattgagccaacatctggcaaatgacaaagacatatcgatagttgacgccgacaagattgccagggaaatagtataccctggtaaacctgcttacaagaagatcgtccaatactttggccccaagattcccaatctggtctcaaaagatggttccctagatagacacaatctcggaaactatgtgtttcagaacaaggctgaattgggtgtattaaatggtatcactcacccacaagttagatgggagatgttcaaggaaatgatttgggcttatctctcgttcaaaagaatcgtacttctggacgttccgctattgtttgaagccaagatgggcaatatctgtggttcaattatcgtggtaacatctgatcacgatttgaaaatggaacggctaagagcgagaaacccagaactgtctctagaagaatgtgaatctcgtatcaacgcccagatgtcagatgaggagaagtccgcattggctgatgtcacaatagccaacaatggcacgaaggaagaatttggaaacaagatcgatatagtaatttctacgttgaaaccatctaaatggtggacaatgctgtctctttttccgttaataggagggctgagtgccatatactacctacttcaaaggcgaagacacatgaaccaaatcaaaaataaagccaaagagacgtga

SEQ ID NO: 1228 - DNA, 675 bp, Pichia pastoris
atggatacatcaagctctcaatcgtactttcagccgataatagagcctccgggcagtagattgttccgtttctttccatctcaaaatccatcagatgctaactgggattatccagcgcctcagaaccctgatatttcttttccttcacaagattattctgagtggtcactaagtactaacaaccgtggtgcaaactacactctgggtgacacttccagtatgaaagacgaggaggagatctggtcgttatcccagttctcacttgaaaataagaagccggtcaccgataatagcattgaagagattggcagaaacaacgtcacaccaagcatagaacccatcatgcagagtgaaaaatcgaatgcaacgtctggtaggtcaatgcaaaaggaaaacctccgaagaagttccaggatccgcaaagtcgtcaattgtagagatgcttccagaagaaaaccaaagaactcaattcgatcaaagcatggttgttggacttgtcgtctacgaagaaaaaaatgccccgaggatggcaatcaatgctcagcttgcttgaggcttggaattgaatgtgatagttcccttcaatcgaaaccagaatacctgatttgcaaggccgctggcagggaaaaaatgcgccaaataaaaaagataacgagaagcaaaaaacaatcatga

SEQ ID NO: 1229 - DNA, 1710 bp, Pichia pastoris
atgaattttggaaatgtgacgaaaacacttcaacaactgaaattccaaaacgatggcctactccaatcaggatttgtagattccgctgcattgatagattttgttcagctgagcagtcatcagttgaaaatgttgattgtgaaagatatagcaaatgttatagccacagataacacaattgagtgtttccaggcccctgtggtgtttactgagcttgttgatcagtattggctagattttcaacggccaactataaaatactttgagcttcagttgaaaaggttagcaaatgacaagatcgtcaggactacattagatagtaatggtattagcaagaagtttcggggtcgaaaaagagtggtggagattagaaagctctatagcgtttacctcaagtgtaatagaattttttgccagtttcatatccaactgatcacagaactgctttcagcatacaatttggacgcaatcggttctattgaccatatttgcaggctgttgcgtattgaaaatccaaacggaagctgcaaaaatatcaaaggattggctgtatgttcgcagctgatatatgtgattcacagatccttattatacttcgggaacctctcaagataccgcaccctcttagcaactaattatttaccccctggttctttatcccgtcaggataagaaggaatacagaaagtgcttagaatgcttgaatcttgctattttgcttttgccctctcaaggtgatccccacaaccacatcgggctgatcgagaggttaagacggaacgactttaatataatctacaactttgcccgatcaacgatgactcgaattcactcacctaatggatttatgaacctgattctgcatttatcaagcgaaatgctccttaatacagtttcaagggcaattttagaacctgaaaaatgccgctctactgtagatagtaagttggttaaatgtaataattatttcatagccatttttggatttcattttcttccacaaaggtggaatgactctcaaaatatgaagtttactgatgtttcttggaagaacattgaaaatgactaccggaaatcgatagctaccttggatattcatcgaccagcacacgtgaagattttgtggaaacaagccatcattttgatcagtggatacactattctttctaatgccaagttcaaccatgagtggatagacaggtcagaaaatcttctagaggcctacctccagtttgtgtttcatttcattgatgaaatcttaacgatttgcacgtctggttattcgatcaacaccggattgttgccactagtccgacttttcctttgctgggcgaaccaaggtgggctaccgttgaattatttactcgcaaactcttcaacttttgacaacttagttcacatttgtgaagttgcctctttattggtgaacaaggacgagctttgtatatcgaaaccacagcggcagtattatttttatgaagatgtcgatttgaaagagtttgttcccattggatgtcgcttcaaagatttcaatgactcttggatattagacaaatctcaggatagttataagaaactcattggtgagcgcccaaaagaagctccccataatgacgttgaatctgatgaagacgcctttcgaattaaagctatctcatatatggttgaccagcttttgaaatctagaagcaaacttgaaatatgttcatga

SEQ ID NO: 1230 - DNA, 420 bp, Pichia pastoris
atgtatatatctgtttggcaacagcacattccttatggttatcaggtgcctatctttccttcgttgtactggccaacgctatacaactttgaagatgcgaagctttaccatatgtttgatatatggaagtttactctttattggtcgcttatattcctagttgtgttttatggagcagcaggaatttgggctgcgataactcatcggaaactggcgttttcaatatggatagttgtggtctatctgataattgcagcttttcacgctgtagttgccggctcagtcgttggagtactaattgggcaagtttatagagctggtgccttctccatgtcaacctggatccctatgtgttggggggtaatcctgaccctttacgtactgatcagctcatacacaatcactggagtagcattatag

SEQ ID NO: 1231 - DNA, 2697 bp, Pichia pastoris
atggaaaggaaggcatttttggaccaagaacctcctcctggatatgtggccggtttaggaagaggtgctacagggtttaccactcaagcagatgttggtactggaagaattgtgcctgcaagttttagcgatgaagaatccgatgatgaggattttgtagatgatagattcaaggatgcagatgaaacagaaaatgggctcaacggtttcaaagagaaagacgatagcgacaatgaggccgatcaagtctttgctgaaattgaagagagattgaagcgaagaaataaaaggaaaaatgaagttcaagaggatgaggagcctcttgacgaaatcaaaaaaaactttcaagagttgaaaaagaatttgacttctatctctgaggaagaatggttcaacttaccggaatctggtgatttgacaagaaagaataagagggcacggttagaagagcaacagcaacagaggttttatgcggtgccagattctgtcattaatggggtggtagctgacacaatggaaacttccaattcgattgatgtcactaaaatctctgtggcaaaggacaggttactagggttgaggctagacgaacaattagataccgaagggaatgacgtccaggagtacttagactctctcaaggaacaggaagatttttcagccaagtttggagacataaatagagccagattgatattaaactcattgaggaaaacagaaccacataggggttcaagctggattgcttctgcaagattggaagagcaaagcaaaaacttttccaaggctaaagagcttatcatgcaaggttgcaagatgtgccctagagatgagaatgtttggctggaacgaatcagacttaataaaactactgatacaactctttgcaaaattattgtaacagaagggctgcagtataatgtaaaaagtgttaagctgtggttacaggcaattgatttggaaaatgaatcgttttccagaaagagaattcttcgaaaggctttagagaatttgcctagaagcgttccactgtggagaagaatgatcgaagaagaaagctcccaggaagaaaaacttaaactgttaacaaaagccgtggaactaatacctgataattctgaattatgcgtcgattacattagaatggaacagaaacataatcttgaacgggcaaagctatttttaaaagattccttgactaaaattccacagtctgtggaccttacccttctatcttgcgaaataaaggagtatgagcaaaattcagggaatgagcccaccagtacggagatactatcaattgtcttcttggacgttctccagtcattgaagaatcaggataagaaattgactttcaaggaatggttgaagtactgtgaagagtacgaaaagaaaggagaatacaagaatttggtcaaagtgattattgaaaatacggttacgtttgggtttgaagacgttccagagccagaacttgttgccaccgtgaataagattgcctacgagtacgaagggacagagcttgcccgtctttccagtctaatttattacgcattaacagaaaaattcccattcaactcttccgcatggaaaagttttatcaaccatgacaagagtggaattgaggatagattcgaaaaatgcttggataagaatccaacctgggtcgagttctggatttcctataattctactctgttgaaaaatggcaacatcgagaaagcaagagatgttttagatcgtgctacgaagcacaatcctcgggatccaaagctgattgttaaaagtattgagttttgctttaatggacccaaccgcacggagtctttggagttgattgaaaagggaattgcaaagtttcctgaacttaaaattttttacgtttacaagatcaaaatcagcgatgcattaaaaatttcatctaacaagttacttcaagtatgtgatgatggcatttcaaaacacagcaaagcggaagaaatgtacctgttaaaaagtgagattctcatcaaagggggtgatattgatacagcaagaactactttggagcagggtatcacaaactgttcacaatcactttctcttaggttaaaactatgtttcttggatgaattcaaaatgagaattatcacgagagctagaacagttttggaacttgcagtcacagaaatcaaatctgatctcacctggttcgaattgattcgctttgagaatagaaacagatcaaaagaagacgctcagattgtccttagtaaggcgttgcaaaagcatcctagttcagttctactactaatcttgagaatacaatttgaagaacgggcttccaagagaagaaacctatacatcgaggctttgaaaaaaactaatgaagataaactgttagtttctgtgattgctcacaatctatggagaagggacggtaagccagaaaaagcattcaaatttttcaaacagtcactggaatcttcagtagaaaatggagacattctgagcatatattacaacttcataaggaagaatggatccccagaacaattgcaagatttctggactacggtcgataaaatcgataaggaccaactgaaaaaaggatattactggattcaagagactcaagacttgacaccctggaagcaaaccgaggaaatgatcgaaaatacagccaggaagttggataacgacttgatatatgtttaa

SEQ ID NO: 1232 - DNA, 873 bp, Pichia pastoris
atggccttgaaggtagtcagtgctccgtgtccttgctctaacacaaaccaaaaaggaaggagaaataaacgtaactaccaccaactcagaacaacatatcctccaatggaagaccgtcaaaaccaaattaatcccgccatgaccccattcaacagacacatctatacccctacaggaattgcatatccttgtgacaacgggaactatggcccgctgtttgtaatgactacgggaaagactagcaatgtgccctttcaaggctcaggatctcctaacaatgttaatggtgataactcagcgtctggcccctcttacagccacatgatccatcatcctatacatgtatatccgttgaatgcaggtgcagcacaggaacccttcaatttcaactcaatgggcatgggctatgtttcttccccttatcagcagcatcctgggttctgtagtgacagcgatctgatcaagaaaaaggagtttccagaaagcttcaaccccaagcagactcccaatatgccgcataaagaaaaggttaacaagtggctggtgggattgccctaccctacgggaaatggagagaatgatgacatggaccaagatcagatcaaccccaggatgaatatgattcggtacagagagttaccgactagttactccgggactttttcggataacgagcccagtagtcttgacgattgcattagtctcagcgactacagagacttgttagagttgcaagcccgcaaactctcctactatgtctgcaaactataccataatcaaccagaaccagagtcacatgacttgcaacagcaggaggacgagttgaagatgagggtgaatgtatcctacgagttatcctctttgatgtcatag

SEQ ID NO: 1233 - DNA, 789 bp, Pichia pastoris
atggctatggtggattttcagcctaggctaagggacacgccgtcacctaaatcacctacgcccaccttcaaccaagtactgaatggcacagcgcccgctccctactcccagaccaacttcaaagactttttgagcaagtgccactgcttggagaacctagagttccacaatgacacaatgctgttgtgcaagcgcatcgagcagttaaaggctgccgaggaagagaaacataatttgtccaccactaatgaagatgtcccctcattatcagacttgctattcgagttcaaatgtctggtgtccagctacattgagattgactcgccaaaagagatcaacattcctagcaagtacaggaacgaactcctgcaaaccgcccaacaagaaaccctcccttgcccccatgtcctttctacactgatgaacattgtggaacggtatttgcatgatagttttatccatttcgtcagccagacctcatcactgaacaatctgagctcatttcagaaggttccttcactgggcgtagagggcctagaccctctggaagacgactttgtcaacttgcatgtttactcttcggataacgagatggaggggcagactatgtatgagaacgacgcggttttcaacagctctaccaatctcaacttcaaacggaactcgtcggtttctacatctgcatctagccgtccgtcgtttggcactatcattggctcattcaagtctagcacaaagaaattcaagtggcggcgctcgtcatctacaggtagtgaggatcttcagtga

SEQ ID NO: 1234 - DNA, 417 bp, Pichia pastoris
atgagtgaacttcccaatttcaatttcaagagcgtctcaaaactcaaaataacaccctcccaatcgtctttggaaattctcccagatgagcattcgagttctcagtttgttcacccaattgaactaaccattcaggccttactggaacagccattggaagctttaaataataaactacagacattatacgaatcgcagataatgcttctccaactgctacggaatattcagagggtttatgacaacgttgatgccaccattgaaagcaataccaggtctaacgatcccaattcatacagatatttgttggatacattcaaagagagaatcaaagtactcaaacttcgcataataaagatcaatcaaatgacggagacaatagagagaagagttgagtccattgaaagcaagctataa

SEQ ID NO: 1235 - DNA, 708 bp, Pichia pastoris
atgccccagtgttcagggatcacactaacaggaaaacgatgcaagataaacacaaaaacggacaaatactgcagataccatgaaaatcaacgactgacgacaatgtacaggaaacctgcatctccaccaaaagtagggttcatctacgtgtacaccctgaaatcattggcacttcccagcaacaagaagcaaaagtggcttcgattgggtagtggtaaccactctagagacgtcgacttactgaaatccgagccctttgatcccagggataatatcttgattaaagtgggcgcaaccactaacgatccacagactcgaattcgtcaatgggaagataaatgcaggttggagctagcgttgataacacccaaattagtgatagcaaattcgaaatcccgaagggggctgtcggcactgtttgaaaaattgtctttgaattcgtcagctggaaggactgagagacaagagaggaaattgctgcggcaatggtctacttataacaatttaggttttcaatgcgacgatgtgtttgccaaagaagagcaaattcattcactgctaagagcaaattatgggcatggaacagttttctgccaaggatgtagcaggccagggcggaacgtttttttgaggcatagagagtggtttcttatcccaagaaggaaactattcaaggttttggttctcatagataagacttccacgtga

SEQ ID NO: 1236 - DNA, 678 bp, Pichia pastoris
atgaacaatgacgacatatacgtaagggaacaggatcgttggcttccaattgctaatgttggaaaagtaatgagagcagcactccctccatatggaaaactatccaaagaggctaaagaatgcatgcaagaatgtgtaagtgagttcatatccttcataacatcacaagcagcggaaaaatgtacgctggagaagagaaaaactttgaacggagaggatattctcctagccatgaacacactggggttcgaaaattatgccgcaactctgaagatttatctggcaaaatacagaaactatgagatattcaagagtgaaaagaggagggagaaatatcaacggaggaagaaaatgaagcgtttggaagagcaacagcagcaacgtggtttacaaggcttgatcacggatagtaatctcaacaacgtggagaaaatgaacaaaaacctcttagaagattctgatgtttcccctgactcaaatcctccactgccccttccttcgaccaacattctccatgaaattgaacccgaagagtttaatgacctcgatttcacttctgaatcacaatatgattctgagtccctaatacctgaaccggaaaaccaaaataaaccatctcgtagtactacctcaggcagagtagaagacctgttagactacggagaaatattcaactaa

SEQ ID NO: 1237 - DNA, 1467 bp, Pichia pastoris
atggaggaactcagcaacttagatatactagtatatttggtcatcacggtgtattgtataattaccgaatcagggccgttagcctttctctctctactacgttcctcagcgttttatgacttcttagttcttccactagatgtgcttctgaacagaatcgtaaagccattcgaattccaacctcctttttcacaaagatgcacttgtatggaatacacagtctccaaagccctcaagcatagtctggagtcaattcatactcccaatgatccttccacagtatttttttccccaagagttcaccgacttttctacttgtatcgagcatacaggcagggattccaaggtttgggcgatatcatatattcggactcttatggaaacgtagacgggttgtccaatgactctgatagtgaatcattgcaacctgttcctggactatggattaaatcaaaaagcagatccaacagtaaccatgatctgatattgtactacattccaaatggtgcatttattgttggtggccccaacttctatgtggagttcttgtcaacatttttagtcttattggaacaacaggggttccaaaatcctgcagtatttcttcctgaacttcctaaggtacctgatgcaatgtttccccgtggattgttccacgtcttgaaaggttggcaatatattacagagtccaatccctcagcaagaacggtactttgtggagattcaactggggccaccatagcattgagcttgctactgtttattggaacaccagatttttcaattttcagtaacatagatgatgcccaggatgccaattgccctgtaccaccacaccctgtttcaccccttggattagtcgcagataaacatgacgatgataaacttccttctgcgttcaaaataacgaaaaagtcgatagaaaaagtggagagcgcaaatttgaagctacctgatactgctctcatcatctctccaattctaaactatttcatcacggagcaggatagcaatagtgagggaaaccataattctgactacattactccccagctaataacgcaatggcgaaaattattcattccagatcagctcacacactcccctaaagatggttatcatagccctggtctttgtacagatgaatcgtggtgggctaagagcttccctccagcaggaatgattctcagttacgggagcgaagagtatttccgtcccgaattagaccagttttcaaagcttatcaaaggtatcgggaggaccaaagtagactgccatgaagcacatattcatagttggccgttacttcttttctacaccgaaaagactccagaggacagagaagaaagtgtattcatgttctccggaataatctcccgaatgctattatggcataccgaaagctatctggcactcaattcaagagagccagtaaatgtgttaaccatagatgatgatcatacctag

SEQ ID NO: 1238 - DNA, 1641 bp, Pichia pastoris
atgttcaagaggtatttcacaaagagacttgtaaggtctatctcttccagaactggtattgcaaatgatccttttcaaaatgcttcaaaacgttccattcaagaaactttagaaaccgacccaaacttagaagggtttctagcaaatgactcttggtctcaaacccaaaatgccgaacaggaagacgatcccttcgacttctctgacctgccacagttgagaaatataccttcttatttggagaacatagaaccagggcaagtctactcaaaagatcaattaccatcgccgagaaaggaccaaccacctgaatccatagatcctcctaactataacggcatcgagtcgactggccaatctcaatcccagctgcaagaaatgattagagattatattgactatgatctcttccaagagtttcttacattcatgcactatggtgattaccatactcagccaaaacccaccatgtccttgacagattttttgaaatctccaacgccagctgtagtcttctccaaatttaccaaccctcacataaatttggcattggagatgtttatctacgatacaatgccattaccgcatcaaagactgttattctataaaaacaactcttgcatagtaattggtaaaaaccaaaatccatacaaagaggtcaatctaaagtatgctaatactactcaaacgccaattttgagaagatactcaggaggagggacagttgtacacgatcaggggaacttaaacttcagtttcatgtctacgaagaaggattttcataggactgctttcacttccaatatcatttctagggttaacgaacttatcttcaaagaatatcccatgggattcaatgttgatgtggataaaattgagtggaagtccaagtttgtgggattgcccaagttcagactatctaccaatggaaagggtgatattgtgagtgagaaagactcgtacaagatatctggatcagcatttaaattgtcaaagggtaaatcactgcatcatggaacattgttgatgaattctgatttaaaagaattagggaagttattgagggtatctgaagcccgtcagaagtcaatccattttacgggaaccgaatcaattcggtctaaggtcaaaaatttaggaattgatcctgaccttttcatgtttgaatcattgaaagcatttattgaaatgcatggtcacgaatctcatgcaatccagctacctaatgcctttgaaattgatggaaagtactgtcatagtattgtcgttgacgatctggatcagttaccacagcctgtgtggaactattacaacgaactaaaatcgtgggattggaattttggaagaactcccaaatttgaacataccatatcacacgatgattttgcgtgtgttttgcatgtaaataggggaatggttactaatgttgatctcagcattcttgatgaatcttcctcggattccatccaccagatattttcctcattgctggcagcaatagaaaaggaaccaataaagtaccaagggaaaatactttcaaaatacatccaggacagcacaatctctgactggctgaaatgggaagtagactttggtatctcctatgagaatgtcgggtgtaccagtacccctgccaaatga

SEQ ID NO: 1239 - DNA, 432 bp, Pichia pastoris
atggcccatcaattaggaatcccttccggaaaggtaatttcgaatgagcaggtagagttagtaatacggaacgatgaccagagccaagttactgatacattggaattgataatattacataatctttcaaaactatccacaacttttacatgtattgaaatgtccaagattccactcatattggaattgaatgcattaccccatatcagcgagttactacttaaataccaggttgataacgtggaaaagttgatggaaaagtttttgattaaagccattattaacaaaaagatcaagggctctattgatcaaattgcaggagtagtcaatttcgaacatgaaaaagtggaagctaaaattgactgggagttgaaggttagtgatgtgttgaatgaattagataatttaagggcacatttagaggccaagtga

SEQ ID NO: 1240 - DNA, 822 bp, Pichia pastoris
atgctaaaactaaactgtgtcaaaattgagataacgggagacgagctggaggttgattctgcggttctactttccaaccatagatcaatcgccgactatattgtgatatctgccttggcccagagtctagaagataaaggaaggccagaaatagacctggtatcagtcaaatttttttcgtggttcagcttgtggggacttcccaatttgaacgttttcaataacattctgagctgtgatgagaattgggaattggatactagtacaacatacaatactttcaatccctctgtcgtatcgaccaaacctgaatggatctctgtttttccagaagtgaatatctggtctgctgaaaataacgaactgctgaacgaattgaacgaaaaatactacctcccaaaactgcaaaacgttctgtatccgaggttctcgtccacgttcaatgtgatcaatggcctttacaagtcctcttttagtaaattgtatgatatcacaatattgtactataaaaagaaggcagcagacccacaaaaaattgtcaaaatgtcccaaactgaaactgcgatacaactggaaagttcaggggaaccagatgaaatggttagaactaccttgtttgatagcccaagtctgttgcaagtcttaggtgagtacccctctagctttgttgtcagagtccatgtcaaattgaaggccctaccaagaatcccactgaaaaggaaaaaactagaaaagtggcttgaaaaagaatgggtagaaaaggataaactattggaacagttgcaaactaccattttaaccaatcatctaaaggaaaaataa

SEQ ID NO: 1241 - DNA, 603 bp, Pichia pastoris
atgttccagttgtcggtgatatccgacctaatcagggttccaccacatttattccatcttccaacagacaaagctgttctaagtgaaatcaacattaagtatgcgaacaaggtgataccgaaactggggctttttgtctctgtctgggacttgatagagatccaagatggccttttgaagccaggtgatggagccacatttatcactgtaaaattccggggaatcatatggaaaccatttgtgggagaggtattgacggggtggattaaaaagaacacgccagaaggaatcaaggtcacaatggaattttttgaagacatattcatacccaaaagtctactctttgagaatgccgtttactcaggagatgaggatgcatggatatggaaaccagacgatgatacgagcttgtatctagatgaaaatgagaagatttactttagaatagaagaagaagtgttcacagacattaaacccaagggtcctgacaactccatgaatgttactgaagaaaaagagtccgaagaaaacaaggtaccgccgtacgctataatcgcaagttgtcagacagaaggaatgggatgtgttagttggtgggaatag

SEQ ID NO: 1242 - DNA, 1149 bp, Pichia pastoris
atgatggaccaactccaggctcttagggtggaaataaaggattgggagtaccaatttttcaaaactaaaggctggaaacctttggcggaggatatcaagcaaaatgcagagattcgacagaaatataaagaatacaatcgatataaacgccaacagcaggcgaatgttacaccaagaaaggaaaagaaggtatctggtggagctcagacaacaccacagaaacagtccttggaaaaagaggtagccacacccagagatctgggaccaactcctcaagtatctggtagagtattgagcatttttgatatttcaccagtcaagagatctgccactggggaggtattcagaacaccctccaaaagaaaaagacctaattcgaatgaatcacctttgaaattaacaacaccccgaaaaacacccattgcaagggggccggttctctccgagacgccgttgtacctgaggcaacagagttttagtatccaggaagaattgatggcggcctcgcctaaggtagttcaatcagagtctccattaaaggtgaacttgtcatcgcaggaaactccaacgaagatcacagaaacttttatcgaaccttcacctgtttttgatccagtcaaactggtcaagagaaaatcgttatatgaaatgtcaaaggatttagaggcattgcagaatgagaagctctcaatcgacggagtagatgaggactgtttggatgaagaagtcctcaagctgatgcaaggggagacaggacctgacgaagaggagttcgagaacgggatagataaggaaacgcagttacaaccacaggaagaacctctgcatagaaagaaagccactcaaaagagaactactaggcgggccaagataaaagttcgaaaataccatgaaaaggacgaagagcttgatattgaagatattaccaaaaaaacggacgaatctatccgacaggatcttgttaagcaaactggagctcaagaattagaaacagaatcggaaacaaatgacgatgacgacgacgataaaggtaacaaaaacacaattttcaatccccctcctggtggctatagaaagacacgaaccaatttggtgtccaccaactttgtcaagtacaagctaaaaagaaaaggtaagagaagaagatga

SEQ ID NO: 1243 - DNA, 486 bp, Pichia pastoris
atgagaatcttgcaagggatatctcataatgcgttacattccaattggacatctatctgtaatcaaataggctcctcccaaagaaaactctcttcattattggagcaaggaattgatcaaaatgatcaaactttacgtgaaattcttgtccaaattaataggatgtgcagagcgatcgctttaatgttggaaaataagagaatgctcaagaacgacgtggaaattatcctgcaacaaatattagatagtaatagtactgagagaaaaagaaggttgccaagggaaaaggttagaatacttgaaaattggtttgcggatcacttccaacatccatacgcgacgcagcaagattttgatgagctagtgcacctgacatctcttagcaaaactcaaatcagaaattggatctcaaacaaaagacgaaaggaaagatcttcaactgtttctacagagctacttcaagcattaaacaaatcaccctcgtaa

SEQ ID NO: 1244 - DNA, 366 bp, Pichia pastoris
atggccgcagcattggttgagtttgatgctgcggaagtctcgtggagagaagaagtgacgctagcagcagttgcttcagattcagcaacagtggataagtcggataccagggaagtcaaagactcgacaaccgagcttgcagcaacgttggtgtttccaactagagagatactggaggattcagacattttgatgaagaaatattacaacactcatgagggatatctgatctttataaatactttgatctcaatccctagatcgcaatcagtcttatgcattttggatcacggggacatggtaattgtatcaagatggaataattgcccgattgggataaatgtaagctttgctttgctattttga

SEQ ID NO: 1245 - DNA, 678 bp, Pichia pastoris
atgtaccctgtctcaatcccctcgttgaatagctcacatgaggtcgggaaggaacagctagtagacccgctatccctagcaaatgtcatccaatatcaatcaacatttctccatggtacacaaagtcacgtaatagagcatcgaagtctttctagtaaagatcaaacttccatgtcgttcgataataatgatttccaaagacacaactctgatactaatctgaggcggcggaaatcaaagaaagcagcctcagaattgaataggaatttctccacaggctccaaggcatccggttattcttataaagtttctaggaggaaaccattacacaactacgagccatcatggcgcaaacactcaaagaaaccaacaacgcatcccaatttttccaccaaggaacaattgtatcgagtcattgaacgactcaacctgaaggataggcagctagcaattttctcgccacatggacccagtactgcacctgcttgcattctacagtacgaaacggaagcctataaatcaattgttcaacctaatccgaaactgaaaaaaaaggttaaacaactcagctttgataaaaaccaagttgctgttctttctgttgactctcatgaggcaaacttggaaaagtaccagaaaatacttaattatcccctccccccaaaccagtggaagtga

SEQ ID NO: 1246 - DNA, 1017 bp, Pichia pastoris
atgccttccttgcccgagggaaagccagaggttttggcaaagatcgatgagcgagtgtcgtttaaaaaagatgaggagaaatggatttttgaagatggcgatgaagagttcgaatacgacgatgatcttcaacgatgggtccctgagaaaagaaaaattgaaaatgatgaaagggagctgaaagaagaattgaaaaaggaaaagaagcgtaaaatagaggagttgaaggagcaagaacggaataaacccaaaagcccaccgcagactggagtctacatcacaaacttaccatctgataccacgttagaggagattgaggatgcatttgggaaacttggtactatcggggaaaatttgataactggtgaaaagaaaatcaaattgtatcgaaacgaagagaatcagttcaagggagacgcattggtggtatacctaaagcctgaaagtgtcgatcttgccattgagatgctagatggcatccaatggagacctttaagcaaggaaaccatacatgtagaaaaggccgatttttcccacaaggaatcggacagtaaagctcacaataaggacttgacggaggaacagaagcaagtaattaagaagaggctccagagactcaaaagtcgcagtgacgattggaaagacgatatccaagtagaatatgagcgacgacaagcagaagaacgattcaagcatttcgtcgttttaaaaaatgtattcgacttgaagacaagtgaggatgatctattcgagatcaagcaagacatcagagaaggttgtgaagaaattggatccgtaacgaacgtagtcctttacgatttagagccagagggaatagtatcagttcggttttcgtcaaaagacgatgctgcacgatgcgctcaagagatgaacggcaggtactttgatgggaaaaaacttgaagcgttcatctacgatggaaaatcaaaatatcgtagaaaggaagtcagcaaagaagaccaatctgacaggttcgggacctggttggaaggttag

SEQ ID NO: 1247 - DNA, 417 bp, Pichia pastoris
atgaatccaagagaaaattcaacatcccactacgcagaacaagtagcttctatggacagccgtgggtggcatttcaagtgttacagcactgaagcccaagttcactacgcgacttttgcttctgctttgcgtgtcgccctgggatttcttagcctgattctatactctctggtatgtacagtcgaacacccatcacctgaaatagtattcagaagtgaagactcagggttcagcagtagcgagatgcttttcagatgttattatacgtcccatcaaataacctccaaactccgactcaagttaacgccaccgcacacaaaaatacaaccaaccatccatcaaccatacttcccttactgccttcttcgaaaaatctccacccatgtatgcacaccttccctcacttttccatgctag

SEQ ID NO: 1248 - DNA, 621 bp, Pichia pastoris
atggacagattgacgctggtgaataaagaagacacttcggataaagaagttctagcgtgtttccgtctagcagatgtgctcgaattgtgctactctggatgtttgatacaagatagggcagtgaactggaataagaaatctacgttatcggggtcatttcagatgttcacgtcccaggtgaaaatacccagtaagttgggcactccatacgaaatagaaaaggattttacctcggtggagggaagcatcaggagcactgaaagtgagcctgccactgtcgacattgacgaagaaaccagattgcgagtagatcaattggagaaagagcacatcgctttaacagaaattcggaaagtagaactgctaccacttttgctagatctaatagaagaactcaagttgggaaaaatcgaaccgaaggattttgacaatgctgctggtcggataagagctcaaatttccaaaataagaggtctactggataacgttgaggggctttcagagagcagtgaaagcagaatcaataagctgagagagctggacgagaagataactaggaaaagacaggagttactagatttcagggagatggtgatgaagcgtgatcacacagttaagtag

SEQ ID NO: 1249 - DNA, 1338 bp, Pichia pastoris
atgctttatccccagcctgaacttgatatcctgaagaaagatcaggaaaaagacacggaaaccaatggtgaaaccaagaaccccaagtttgagatatcaccgttcaaggtaacaagtagcattcagggtgatttcaatgatccaataatgttgttgaataaaacacctaagcacaagggtctcaaaaggcgccctgctgcctttcaacaaaatcttcccccagaagttagggatgaccctatgcgcaacaatctgagccctattaaactgcctcagagagaaccaccactacctcaacctgcaaaacaagatacgccagaaaagagtccgccgaaagaatcgaaagatgcccattcaattcctgtggacgaacccaagagaagtcctcctccattaactgatctgatcagcatcgatgatgatatcagcagccgagacacagacttcgaatatgaggaatatccaacaatggataaaactgccaaagaattcaacaatgaaacaccggttagagctacaaaactaacaagtttcgacggaattgttcgacctaagaagacgcctgaagttactgctaaaacacaaagtttgagtgccgaaagtccgccacaaaacgatttcatactacacactcccttgagagcaagagttaggacttttcagagtatgtctaattatgaaggagtcgatgagtcaagtgagaatcaacagagacccaaacgatctagaacttcctcaaacacgctcaacagtggattgaataccgtgaaagcgaacagaggttctgattctacgcaaaaggaatatctaaatggtcaattttctgaatacgatgtctccgatacaatctccaaggctcggagcttcattcactccaagaagttggagaagactcgcttaggaagaccatcccgtagagttattccaaacaatacgtttttgagcgagaaggcaactgatgatacatatgtgagcatgaatagtagaatgttggagtttgatagctcatccaacaaccagaatggtgagggagagttgttaagtggcttggatgacgagagggcgttgaataagcaaaacttggaatctcttgacgaatcaactagagcgaaacaattggacacctggggtcttgaaaaatggagaaaactggcaggggttttaaaactatacggggttacaaagaatgaggagctacttgatccaaaattcattcaatccgaacttggctgtgaacctaacgagttggtcgctcgatcaattattttggtcaagtggaaagagctgaagtcattgaggaaaatgcagaggtcaagtaataaggagaggagtaaatga

SEQ ID NO: 1250 - DNA, 177 bp, Pichia pastoris
atgaggccgataaatacatgtttatccgcttggaccgtggcacctgtagtctaccatccggcatccacactttatgccatcacaatagcagttcggatccttctttcctccctcgtagcctctgcggcacgtcctactttccccgactttttcaatctcacatgcattaccgcctga

SEQ ID NO: 1251 - DNA, 1209 bp, Pichia pastoris
atggaagaaactttggatcaactgatttgtgatctggatcagttccgtttacaaaaaattcaaaatgaatccatgttcaaacagctaaactctaatgataaaaatgtcttgaacttaattcaaacaaataactcagagttatcggtccaaaagtacaacggactgtcttgtgttatgtctgaacttggaagtaacagacagaatatcataaagttaaacttagaccatctggataacatttttaatttaaaatcgctaagtgaagaagtggactctctaaggttacgatatcaaagagttcttcggcagcattttcctgaagtcagtgaaactgggtgcttcgatgatactagtatcaaatcacttgaacacacaaaggatttgggaagagaatcggatataaaatatctcttgagcggaagattgactcaggaccaagtgggcttgcaagttacgcttgaagaccaaatggacaaggaagaagcaaacttgacgagggaacatttcaaacaaattgagttgtgcattataaaccaggttgaaaaattgctcaccacgcttgatcagtgtcgggatcccgataagataaagatcaacaggctgaaaaattcagtaattgacacgtcttgcacgttcattgagtacatccagtcacatgtagacgatgccaagtattacccctcgttctataataatctagctcagttgagccgaataaaatctagaatatctttggagtatggagaattgaaaaattgtgtcctcacagaaacgcaattacaacaactcgaatcaaagtcttggggtattctgattaaatgtttacaagtcacactcaaggacaccgatttggaacaaaaagggtcagaacttcgtcttacagcctcgcaagcccgagtgttgggtcaagcgtatgcacaaatggcgcatatactgctggagagagcgtcccggaccatgaagcagcaatcgacagccaactacccgtacttagactcaattttgaccctggcaagctatctcttatatctttcgggcaattttgggaacattgtttccaaagttgtcagtatcaatgtgaacccatatgccaaactatgccagggggtgttcagagagtcgttgctgagagaaatgactgatgtttatatcaattcatgtgagtccagagaaaaggttccaaccacttgcctcatggacggtggatga

SEQ ID NO: 1252 - DNA, 546 bp, Pichia pastoris
atgcccaggtcaccttctgtcgatagtgcctcatttgcattagatcctgtagaatacagctacgatccaattgatgatcagagcgattccgatagcagtatctcttcccaaaatgattttagggctttccgcaacaacccatcttcaagagaacaaagaagcgacctgaataaatactccaaaagagatggatctgactttagtcccgtcgactatctgatcaatagcattaacgcgtctctcaaaagtgttgcattggacaaagctatggtcattcaatcccagctctccggggaactcaacaaccaaaatgacttggtcctaaagaagctgctggaattggagacgcggttgaaaagtcacctggtcaaatatcagcaggccaagaaagtcatattgcagataaatcaagacttagcatcatcgaagaagagaatcaaaaaaattaccaagtacgtcaagatagaatacccgattgaatactccaaggcttacaacaaagttaacaataatatcacaaacgatgaagaagatctttacggttaa

SEQ ID NO: 1253 - DNA, 1194 bp, Pichia pastoris
atgcaacaatcctctcaaaatctgtccgagaccgccgaatccgattctgaatttgtctacaaacctcccattgagacatggacggtcaatggaaaaagagtggacgggttctttgtccctggaggaaatgtgcatattggtagtgagaatacctggggtgtaatggtctataacataaactgtttgcttttgcatgcaaccttctggttgtattcctattatatcgttgctcaggagcagattggattctttagggaggttctatatcagctgttttggtcgacagtccaggatttaacaagtggatttcacaatccccaaagcttcctttctattccctataaagtggcctatagggcccaatcgaagttactggcgcataaaattccgactagccccaatgagatcagtgtggcattgcccaaaaagggggttcctgctcatattggattggaactagagtttcagcaattggttatcgggctaccgcctccgatgcctcagccttatctgacagctgacaaaattgaagtaaaaccctctgaaagagagatccaacgaattcatgagctccgggcaaagtacaagtcacaaaagaaggctcactatgtggaagagaaattacgaattctcacggattgtgccaaacttattgcctggagtgcttacactgaaattaaaacccttagcttgtatgtgaaaaatgacgagatatgggacttcaatgacttgaccaacatcgtaaaagcagaactgaacttcctagatccttcacaggtacagtcgataaaattgctcaagctaaattcgaatgagtgttttatgatcgatgatgtgaacacaatcataagagttccagatccagatcatcctagcactttctgtgatctgacagtaattctactatctgaaaaagactctattgtgtcgattctaaaggagaagttggttctatcagatggagagcttgacttggagaaagaatttgaaaaatatggcctaccagtcctaatcctccatccaactccaaagaataaacccgcaaattgtttgaatgggttcccaattcacgatttctccggcaaaattacattgtacgctaaaaacgaacctctaacatttagctttttcactagagccatcaatgattttgttcaaactgaaaagacccaccttctgttggagtcctattga

SEQ ID NO: 1254 - DNA, 621 bp, Saccharomyces cerevisiae
atggcatccaccgatttctccaagattgaaactttgaaacaattaaacgcttctttggctgacaagtcatacattgaaggtactgctgtttctcaagctgacgtcactgtcttcaaggctttccaatctgcttacccagaattctccagatggttcaaccacatcgcttccaaggccgatgaattcgactctttcccagctgcctctgctgccgctgccgaagaagaagaagatgacgatgtcgatttattcggttccgacgatgaagaagctgacgctgaagctgaaaagttgaaggctgaaagaattgccgcatacaacgctaagaaggctgctaagccagctaagccagctgctaagtccattgtcactctagatgtcaagccatgggatgatgaaaccaatttggaagaaatggttgctaacgtcaaggccatcgaaatggaaggtttgacctggggtgctcaccaatttatcccaattggtttcggtatcaagaagttgcaaattaactgtgttgtcgaagatgacaaggtttccttggatgacttgcaacaaagcattgaagaagacgaagaccacgtccaatctaccgatattgctgctatgcaaaaattataa

SEQ ID NO: 1255 - DNA, 1929 bp, Saccharomyces cerevisiae
atgtcaaaagctgtcggtattgatttaggtacaacatactcgtgtgttgctcactttgctaatgatcgtgtggacattattgccaacgatcaaggtaacagaaccactccatcttttgtcgctttcactgacactgaaagattgattggtgatgctgctaagaatcaagctgctatgaatccttcgaataccgttttcgacgctaagcgtttgatcggtagaaacttcaacgacccagaagtgcaggctgacatgaagcacttcccattcaagttgatcgatgttgacggtaagcctcaaattcaagttgaatttaagggtgaaaccaagaactttaccccagaacaaatctcctccatggtcttgggtaagatgaaggaaactgccgaatcttacttgggagccaaggtcaatgacgctgtcgtcactgtcccagcttacttcaacgattctcaaagacaagctaccaaggatgctggtaccattgctggtttgaatgtcttgcgtattattaacgaacctaccgccgctgccattgcttacggtttggacaagaagggtaaggaagaacacgtcttgattttcgacttgggtggtggtactttcgatgtctctttgttgtccattgaagacggtatctttgaagttaaggccaccgctggtgacacccatttgggtggtgaagattttgacaacagattggtcaaccacttcatccaagaattcaagagaaagaacaagaaggacttgtctaccaaccaaagagctttgagaagattaagaaccgcttgtgaaagagccaagagaactttgtcttcctccgctcaaacttccgttgaaattgactctttgttcgaaggtatcgatttctacacttccatcaccagagccagattcgaagaattgtgtgctgacttgttcagatctactttggacccagttgaaaaggtcttgagagatgctaaattggacaaatctcaagtcgatgaaattgtcttggtcggtggttctaccagaattccaaaggtccaaaaattggtcactgactacttcaacggtaaggaaccaaacagatctatcaacccagatgaagctgttgcttacggtgctgctgttcaagctgctattttgactggtgacgaatcttccaagactcaagatctattgttgttggatgtcgctccattatccttgggtattgaaactgctggtggtgtcatgaccaagttgattccaagaaactctaccattccaacaaagaagtccgagatcttttccacttatgctgataaccaaccaggtgtcttgattcaagtctttgaaggtgaaagagccaagactaaggacaacaacttgttgggtaagttcgaattgagtggtattccaccagctccaagaggtgtcccacaaattgaagtcactttcgatgtcgactctaacggtattttgaatgtttccgccgtcgaaaagggtactggtaagtctaacaagatcactattaccaacgacaagggtagattgtccaaggaagatatcgaaaagatggttgctgaagccgaaaaattcaaggaagaagatgaaaaggaatctcaaagaattgcttccaagaaccaattggaatccattgcttactctttgaagaacaccatttctgaagctggtgacaaattggaacaagctgacaaggacaccgtcaccaagaaggctgaagagactatttcttggttagacagcaacaccactgccagcaaggaagaattcgatgacaagttgaaggagttgcaagacattgccaacccaatcatgtctaagttgtaccaagctggtggtgctccaggtggcgctgcaggtggtgctccaggcggtttcccaggtggtgctcctccagctccagaggctgaaggtccaaccgttgaagaagttgattaa

SEQ ID NO: 1256 - DNA, 1503 bp, Saccharomyces cerevisiae
atgtctagattagaaagattgacctcattaaacgttgttgctggttctgacttgagaagaacctccatcattggtaccatcggtccaaagaccaacaacccagaaaccttggttgctttgagaaaggctggtttgaacattgtccgtatgaacttctctcacggttcttacgaataccacaagtctgtcattgacaacgccagaaagtccgaagaattgtacccaggtagaccattggccattgctttggacaccaagggtccagaaatcagaactggtaccaccaccaacgatgttgactacccaatcccaccaaaccacgaaatgatcttcaccaccgatgacaagtacgctaaggcttgtgacgacaagatcatgtacgttgactacaagaacatcaccaaggtcatctccgctggtagaatcatctacgttgatgatggtgttttgtctttccaagttttggaagtcgttgacgacaagactttgaaggtcaaggctttgaacgccggtaagatctgttcccacaagggtgtcaacttaccaggtaccgatgtcgatttgccagctttgtctgaaaaggacaaggaagatttgagattcggtgtcaagaacggtgtccacatggtcttcgcttctttcatcagaaccgccaacgatgttttgaccatcagagaagtcttgggtgaacaaggtaaggacgtcaagatcattgtcaagattgaaaaccaacaaggtgttaacaacttcgacgaaatcttgaaggtcactgacggtgttatggttgccagaggtgacttgggtattgaaatcccagccccagaagtcttggctgtccaaaagaaattgattgctaagtctaacttggctggtaagccagttatctgtgctacccaaatgttggaatccatgacttacaacccaagaccaaccagagctgaagtttccgatgtcggtaacgctatcttggatggtgctgactgtgttatgttgtctggtgaaaccgccaagggtaactacccaatcaacgccgttaccactatggctgaaaccgctgtcattgctgaacaagctatcgcttacttgccaaactacgatgacatgagaaactgtactccaaagccaacctccaccaccgaaaccgtcgctgcctccgctgtcgctgctgttttcgaacaaaaggccaaggctatcattgtcttgtccacttccggtaccaccccaagattggtttccaagtacagaccaaactgtccaatcatcttggttaccagatgcccaagagctgctagattctctcacttgtacagaggtgtcttcccattcgttttcgaaaaggaacctgtctctgactggactgatgatgttgaagcccgtatcaacttcggtattgaaaaggctaaggaattcggtatcttgaagaagggtgacacttacgtttccatccaaggtttcaaggccggtgctggtcactccaacactttgcaagtctctaccgtttaa

SEQ ID NO: 1257 - DNA, 513 bp, Saccharomyces cerevisiae
atgttacgcactactagactatggaccacccgcatgcccactgtgagcaaattgtttttgagaaacagctccggcaatgccctaaacaagaataaactaccatttttgtactcatcccaaggacctcaagccgtgaggtacacttcccaacatgagtggatagctgtgcatcaggacaagactgcctttgtcggaattacaaaatacgccactgatgccttaggggacgctacctatgttgagttgccagaagtgggcactgagattgcccaaggtgagtcgctagggtccattgagtccgtcaagtcagcctccgagatctaccagcctgccgatggtaccgtagaggaaattaacactaatcttgaggaaaatccaggtgtggtgaacgaagatcctatgggtgacggctggctagtcaaaatgaagcttggtgagggcgttaatgtggaacaggtcgagggtctaatgtccttagaacagtacgaaaagacactggttcatgatgactga

SEQ ID NO: 1258 - DNA, 399 bp, Saccharomyces cerevisiae
atgtccggtggtaaaggtggtaaagctggttcagctgctaaagcttctcaatctagatctgctaaagctggtttaacattcccagttggtagagtgcacagattgctaagaagaggtaactacgcccagagaattggttctggtgctccagtctatctaactgctgtcttagaatatttggctgctgaaattttagaattggctggtaatgctgctagagataacaaaaaaaccagaattattccaagacatttacaattggccatcagaaatgatgatgaattgaacaagctattgggtaatgttaccatcgcccaaggtggtgttttgccaaacattcaccaaaacttgttgccaaagaagtctgccaagactgccaaagcttctcaagaactgtaa

SEQ ID NO: 1259 - DNA, 570 bp, Saccharomyces cerevisiae
atggctaacttgcgtactcaaaagagacttgccgcttctgttgtcggtgttggtaagagaaaggtttggttagacccaaacgaaacttctgaaattgcccaagccaactctagaaatgccattagaaaattggtcaagaacggaaccatcgtcaagaaggccgttactgtccactctaaatctagaactagagcccatgctcaatccaagagagaaggtcgtcacagtggttacggtaagagaaagggtactagagaagctcgtttaccatcccaagtcgtctggatcagaagattacgtgtcttgagaagattattggccaagtaccgtgacgctggtaagattgacaagcatttgtaccacgttttgtacaaggaatccaagggtaacgccttcaagcacaagagagctttggttgaacacattattcaagctaaggctgatgctcaacgtgaaaaggctttgaacgaagaagctgaagctagaagattgaagaacagagctgctcgtgacagaagagctcaaagagttgctgaaaagagagacgctttgctaaaggaagacgcttaa

SEQ ID NO: 1260 - DNA, 603 bp, Saccharomyces cerevisiae
atgggtatttctcgtgattctcgtcacaaaagatccgctaccggtgccaagcgtgctcaattcagaaagaagagaaagttcgaattaggccgtcaaccagccaacaccaagatcggtgctaagagaattcactctgttagaactagaggtggtaacaagaaatacagagctctaagaattgaaaccggtaacttttcttgggcttctgaaggtatctccaagaagaccagaattgctggtgttgtttaccatccatccaacaatgaattggttagaactaacactttgaccaaggctgccattgtccaaattgatgctactccattcagacaatggttcgaagctcactacggtcaaaccttgggtaagaagaagaacgtcaaggaagaagaaactgttgccaagagcaagaacgctgaaagaaagtgggctgctagagctgcttctgccaagatcgaatcttccgttgaatctcaattcagcgccggtagattatacgcttgtatctcttccagaccaggtcaatccggtagatgtgatggttacatcttggaaggtgaagaattagctttctacctaagaagattgactgctaagaaatag

SEQ ID NO: 1261 - DNA, 414 bp, Saccharomyces cerevisiae
atgtccggtaacggtgctcaaggtactaagtttagaatctcattaggtctaccagtcggtgccatcatgaactgtgctgacaacagtggtgccagaaacttgtacattatcgccgtcaaaggctctggttccagattgaacagattgccagccgcctctctaggtgatatggttatggccaccgttaagaagggtaagccagaattgagaaagaaggttatgccagctattgttgtccgtcaagctaagtcttggagaagaagagacggtgtctttttgtacttcgaagacaatgctggtgtcatcgctaatcctaagggtgaaatgaagggttccgccatcactggtccagtcggtaaggaatgtgccgatttatggccaagagttgcatctaactccggtgttgttgtgtaa

SEQ ID NO: 1262 - DNA, 393 bp, Saccharomyces cerevisiae
atggcctccttacctcacccaaagattgtcaagaagcacaccaagaagttcaagcgtcatcactctgaccgttaccacagagttgctgaaaactggagaaagcaaaagggtattgactctgttgttagaagaagattcagaggtaacatctctcaaccaaagatcggttacggttctaacaagaagaccaagtttttgtcaccatctggtcacaagactttcttagtcgctaacgttaaggatttggaaaccttgaccatgcacaccaagacttacgccgctgaaattgctcacaacatctccgctaagaacagagttgtcattttggctagagctaaggctttgggtatcaaggtcaccaacccaaagggtcgtttggctttggaagcttaa

SEQ ID NO: 1263 - DNA, 411 bp, Saccharomyces cerevisiae
atggccagaacaaagcaaacagcaagaaagtccactggtggtaaggccccaagaaagcaattagcttctaaggctgccagaaaatccgccccatctaccggtggtgttaagaagcctcacagatataagccaggtactgttgctttgagagaaatcagaagattccaaaaatctactgaactgttgatcagaaagttgcctttccaaagattggtcagagaaatcgctcaagatttcaagaccgacttgagatttcaatcttctgccatcggtgccttgcaagaatctgtcgaagcctacttagtctctttatttgaagataccaacttggctgccattcacgccaagcgtgtcactatccaaaagaaggatatcaagttggctagaagattaagaggtgaaagatcatag

SEQ ID NO: 1264 - DNA, 864 bp, Saccharomyces cerevisiae
atgacctacactaccagacaaattggtgccaagaacaccttggaatacaaagtttatatcgaaaaggatggtaagccagtttctgccttccacgacattcccttgtacgctgacaaggaaaacaacattttcaacatggttgttgaaattccacgttggaccaacgccaagttagaaatcaccaaggaagaaactttgaacccaatcatccaagacaccaagaagggcaagttgagatttgttagaaactgtttccctcaccatggttacattcacaactatggtgctttcccacaaacttgggaagacccaaacgtaagccacccagaaactaaggcagttggtgacaacgatccaattgatgtgttggaaattggtgaaactattgcttacactggtcaagtcaagcaagttaaggctctaggtatcatggctttattggatgaaggtgagaccgattggaaagttattgccattgatattaacgatccattagccccaaaattgaacgacattgaggatgttgagaaatacttcccaggtctgttgagggctactaacgaatggttcagaatttacaaaatcccagatggtaagccagaaaaccaatttgccttctccggtgaagctaagaacaagaagtacgctttggatatcatcaaggaaacacatgactcctggaaacaattaattgctggtaagtcttctgacagcaagggtattgatttgaccaatgttactttgcctgacaccccaacctactccaaggctgcctctgatgccatcccaccagcttctccaaaggcagatgctccaattgacaagtctattgacaagtggttcttcatctccggttctgtttaa

SEQ ID NO: 1265 - DNA, 936 bp, Saccharomyces cerevisiae
atgttgtcaagaattgtatcaaacaatgcaacacgctccgtaatgtgccaccaagcgcaagtgggtattctttataagactaacccagtgagaacttatgctactttgaaagaagtggaaatgcgtttgaaatctatcaaaaatattgagaagatcacaaaaactatgaagattgttgcatctacaagattgagtaaagctgaaaaggctaaaatttccgcaaagaagatggatgaagcagagcagttgttttacaagaacgccgaaaccaaaaatttggatgttgaggctactgaaacaggtgctcctaaagagttgattgttgctatcacctctgataaggggttgtgtggttctatccactctcaattggctaaagctgtgagaagacatttgaatgatcaaccaaacgccgatatagtcactattggtgataaaattaaaatgcagctattgagaacccatcctaacaacattaaattgtctattaatggaattggtaaagatgccccaactttccaagaatctgctttgattgccgataagttattgagtgtcatgaaggccggcacttacccaaagatttccattttctacaatgacccagtgtcttccctatcttttgaaccatctgaaaaaccgatctttaacgccaagaccattgaacaatccccatcattcggcaaatttgagatcgacacggacgcaaacgttccaagagatttgtttgaatatactttggctaaccaaatgttgacagcaatggctcaaggttatgctgctgaaatttccgccagaagaaacgctatggataacgcttccaagaatgccggtgatatgatcaatcgttactctatcttgtacaacagaacaagacaagctgtcattactaatgaactggttgatattattactggtgcttcctctttgggatga

SEQ ID NO: 1266 - DNA, 471 bp, Saccharomyces cerevisiae
atgtccactgaattaactgttcaatctgaaagagctttccaaaagcaacctcacatcttcaacaatccaaaggtcaagacttccaagagaaccaagagatggtataagaatgccggtttgggattcaagaccccaaagaccgctattgaaggttcttacattgataagaaatgtccattcactggtttagtttccatccgtggtaagatcttgaccggtaccgtcgtctccaccaagatgcaccgtaccattgtcatcagaagagcttacttgcattacattccaaagtacaacagatacgaaaagagacacaagaacgtcccagtccacgtctccccagctttccgtgtccaagttggtgacattgttaccgttggtcaatgtagaccaatctccaagactgttagattcaacgtcgtcaaggtctctgctgctgccggtaaggccaacaagcaatttgctaaattttaa

SEQ ID NO: 1267 - DNA, 633 bp, Saccharomyces cerevisiae
atgtccgtttccaagattgctttcgttttaagtgccattgcctctttggccgtcgctgacaccagcgccgccgaaactgctgaattgcaagctattatcggtgacatcaactctcatctttctgactacttgggtctagaaactggcaacagtggattccaaattccatctgatgtcttgagtgtgtatcaacaagtcatgacttacaccgatgacgcttacactaccttgtttagtgaattggactttgatgctatcactaagacaattgttaaattgccatggtacaccacaagattgagttctgaaatcgctgctgctcttgcctccgtttccccagcttcttccgaggctgcatcttcttccgaggctgcatcttcttccaaggctgcatcttcttccgaagctacatcctctgccgctccatcctcttctgctgccccatcttcttctgctgccccatcatcatctgccgaatcatcttctaaggccgtttcttcttctgtcgctccaactacctcttctgtcagcacttctacagtcgaaactgcttccaatgccggtcaaagagtcaatgcaggcgctgcctctttcggtgctgttgttgcaggtgcagctgctttattgttataa

SEQ ID NO: 1268 - DNA, 1290 bp, Saccharomyces cerevisiae
atgcaattcaagaacgctttgactgctactgctattctaagtgcctccgctctagctgctaactcaactacttctattccatcttcatgtagtattggtacttctgccactgctactgctcaagctgatttggacaaaatctccggttgtagtaccattgttggtaacttgaccatcaccggtgacttgggttccgctgctttggctagtatccaagagattgatggttccttgactatcttcaactccagttctttatcttctttctccgctgactctatcaagaaaatcaccggtgatttgaacatgcaagaattgatcattttgaccagtgcttctttcggttctttgcaagaagtagactccattaacatggtgactttgcctgccatttctaccttctccaccgatttacaaaatgctaacaacattattgtttctgacaccactttggaaagtgtcgaaggtttctccactttgaagaaggttaatgtttttaacatcaacaacaacagatatctaaactctttccaatcttccttggaaagtgtctctgactctttacaattctcttccaacggtgacaacactactttggccttcgacaatttggtctgggctaacaacatcactttgagagatgttaactctatttctttcggtagtttgcaaactgttaacgcttccttaggtttcattaacaacactttgccaagtttgaacttgacccaattgagcaaggttggtcaatctttgtctatcgtctccaacgatgaattatccaaggccgctttcagtaacttgactactgttggtggtggtttcatcattgctaacaacacacaattgaaggtcattgacggttttaacaaggttcaaactgttggtggtgccattgaagttactggtaacttctcaaccttggacttatcttctttgaagtctgttagaggtggtgctaacttcgactcttcttccagtaacttctcctgtaacgctttgaagaagttgcaaagtaacggtgctattcaaggtgactcttttgtttgcaagaacggtgccacatctacctccgttaagctatcctctacttctactgaatcatccaagagctctgctacatcttccgcttcttctagtggtgatgcctccaatgctcaagctaacgtttcagcttccgctagctcttcttcctcttcttctaagaagtctaagggtgctgctccagaacttgttccagccacttcattcatgggtgtcgttgctgctgttggcgttgccttactataa

SEQ ID NO: 1269 - DNA, 447 bp, Saccharomyces cerevisiae
atgtcttcttctaaacgtattgctaaagaactaagtgatctagaaagagatccacctacttcatgttcagccggtccagtcggcgatgatctatatcactggcaagcatccatcatgggacctgccgattccccatatgccggcggtgttttcttcttgtctatccatttcccaaccgactacccattcaagccaccaaagatctccttcacaaccaagatatatcatccaaatatcaatgccaatggtaacatctgtctggacatcctaaaggatcaatggtctccagctctaactctatcgaaggtcctattatccatctgttctttgttaacagacgctaatcctgacgatcctttagtaccagaaatcgctcatatctacaagactgacagacccaagtacgaagctacagccagagaatggacaaagaaatacgctgtataa

SEQ ID NO: 1270 - DNA, 567 bp, Saccharomyces cerevisiae
atgaatcctcaagtcagtaacatcatcatcatgttggtcatgatgcaactctcccgtcgcattgacatggaggacccaaccatcatcatgtacattagaattttatactgttcttccatcggtatctcttggatcatctaccaaatggccagaaagagaattgttgctaaaaacgacatgactaccatgaagtacgtcgaacctggtaatgctatgtccggcgaaggtgagaagctgcaagttactaccgtcagagactacgatttgaaggaaatagacagtgctatcaagtctatctacactggtatggctatgatgggtttcatgcatttgtacttgaaatacaccaacccattgttcatgcaatccatttctccagtgaaaagcgctttggaacacaacgaagtgaaaattcacctcttcggtaagcctgcaaccggcgatttgaagagaccattcaaggctccatctttgtttggtggtatgggtcaaactggtccaaagaccgacaagaaatctatcgaagaagctgaaagagccggtaacgctggtgttaaggctgaatga

SEQ ID NO: 1271 - DNA, 483 bp, Saccharomyces cerevisiae
atgggtaaatcacacggttacagatctcgtactcgttacatgttccaacgtgacttcagaaagcatggtgccgtccatctttctacttacttgaaggtctacaaggttggtgacattgtcgacatcaaagccaatggttctatccaaaagggtatgccacacaagttttaccaaggtaagaccggtgttgtctacaacgttactaagtcttctgttggtgttatcatcaacaagatggtcggtaacagatatctagaaaaaagattaaacttaagagttgaacacatcaagcactccaagtgtagacaagaatttttggaaagagttaaggccaatgctgctaagcgtgctgaagctaaggctcaaggtgttgctgttcaattgaagagacaaccagctcaaccaagagaatcccgtatcgtttctactgaaggtaacgttcctcaaactttggccccagttccatacgaaactttcatctaa

SEQ ID NO: 1272 - DNA, 1665 bp, Saccharomyces cerevisiae
atgtccaataactcattcactaacttcaaactggccactgaattgccagcctggtctaagttgcaaaaaatttatgaatctcaaggtaagactttgtctgtcaagcaagaattccaaaaagatgccaagcgttttgaaaaattgaacaagactttcaccaactatgatggttccaaaatcttgttcgactactcaaagaacttggtcaacgatgaaatcattgctgcattgattgaactggccaaggaggctaacgtcaccggtttgagagatgctatgttcaaaggtgaacacatcaactccactgaagatcgtgctgtctaccacgtcgcattgagaaacagagctaacaagccaatgtacgttgatggtgtcaacgttgctccagaagtcgactctgtcttgaagcacatgaaggagttctctgaacaagttcgttctggtgaatggaagggttataccggtaagaagatcaccgatgttgttaacatcggtattggtggttccgatttgggtccagtcatggtcactgaggctttgaagcactacgctggtgtcttggatgtccacttcgtttccaacattgacggtactcacattgctgaaaccttgaaggttgttgacccagaaactactttgtttttgattgcttccaagactttcactaccgctgaaactatcactaacgctaacactgccaagaactggttcttgtcgaagacaggtaatgatccatctcacattgctaagcatttcgctgctttgtccactaacgaaaccgaagttgccaagttcggtattgacaccaaaaacatgtttggtttcgaaagttgggtcggtggtcgttactctgtctggtcggctattggtttgtctgttgccttgtacattggctatgacaactttgaggctttcttgaagggtgctgaagccgtcgacaaccacttcacccaaaccccattggaagacaacattccattgttgggtggtttgttgtctgtctggtacaacaacttctttggtgctcaaacccatttggttgctccattcgaccaatacttgcacagattcccagcctacttgcaacaattgtcaatggaatctaacggtaagtctgttaccagaggtaacgtgtttactgactactctactggttctatcttgtttggtgaaccagctaccaacgctcaacactctttcttccaattggttcaccaaggtaccaagttgattccatctgatttcatcttagctgctcaatctcataacccaattgagaacaaattacatcaaaagatgttggcttcaaacttctttgctcaagctgaagctttaatggttggtaaggatgaagaacaagttaaggctgaaggtgccactggtggtttggtcccacacaaggtcttctcaggtaacagaccaactacctctatcttggctcaaaagattactccagctactttgggtgctttgattgcctactacgaacatgttactttcactgaaggtgccatttggaatatcaactctttcgaccaatggggtgttgaattgggtaaagtcttggctaaagtcatcggcaaggaattggacaactcctccaccatttctacccacgatgcttctaccaacggtttaatcaatcaattcaaggaatggatgtga

SEQ ID NO: 1273 - DNA, 1614 bp, Saccharomyces cerevisiae
atgcacttttctttgaagcaattggctgtcgctgcgttttacgctaccaatttaggctctgcctatgtcattcctcaattcttccaggaagcctttcaacaagaagagccaattgagaattatcttccgcaattaaacgacgatgatagctctgccgttgctgccaacattccgaagccacatattccttacttcatgaaaccacatgtagaaagtgaaaaattgcaagataaaatcaaagttgacgatttgaatgctactgcttgggacctctaccgtttagctaactattctactcctgactacggtcaccctacccgtgtgatcgggtccaagggtcataacaagactatggaatacatattgaatgttttcgatgacatgcaggactactatgatgtttctttgcaagagttcgaagctttatccggtaagatcatctctttcaacctctctgacgccgaaaccggtaaaagctttgctaacactacagctttcgcactttctccacctgtggacgggttcgtaggtaagctagtcgaaattcctaacttgggatgtgaagagaaggattacgcctctgtagtcccaccaagacacaacgaaaagcaaattgcccttatcgaaagaggtaagtgtccttttggcgataagagtaatttggccggtaagttcggtttcaccgctgtggtcatttacgacaacgaacctaaatctaaagaaggactacacggtacattaggcgaacctaccaagcacactgtcgccaccgtcggtgttccatataaagttggtaaaaaattgattgccaatattgcattgaacatcgattattcattatattttgccatggactcttatgtagaatttatcaagacccagaacatcattgccgacacaaaacacggtgatcctgataatattgttgcccttggtgctcattcagactctgttgaggagggcccaggtatcaacgacgatggttccggtactatttccctattgaacgtcgctaagcaattgacccatttcaagatcaataacaaggtccgttttgcatggtgggctgctgaagaagaaggtttgctaggctctaacttctacgcttataacttgaccaaagaagaaaactccaagatcagagtatttatggactatgacatgatggcttctccaaactatgaatacgaaatttatgatgcgaacaacaaggagaaccctaaggggtctgaagagttgaaaaacctgtacgtagactactacaaggctcatcacttgaactacactttggtcccatttgacggtagatccgattatgtcgggtttatcaacaacggaattccagccggtggtattgccactggtgccgaaaagaataacgtcaacaacggaaaggtcttagacagatgctaccatcaattatgtgatgatgtctctaacttatcctgggacgcattcattaccaacaccaagttgattgctcactctgtggccacctatgctgactctttcgagggtttcccaaaaagagaaacccaaaagcacaaagaggtggacatattgaatgctcaacaaccacaatttaagtacagggccgacttcttgattatttaa

SEQ ID NO: 1274 - DNA, 1095 bp, Saccharomyces cerevisiae
atgtctgcccctaagaagatcgtcgttttgccaggtgaccacgttggtcaagaaatcacagccgaagccattaaggttcttaaagctatttctgatgttcgttccaatgtcaagttcgatttcgaaaatcatttaattggtggtgctgctatcgatgctacaggtgttccacttccagatgaggcgctggaagcctccaagaaggctgatgccgttttgttaggtgctgtgggtggtcctaaatggggtaccggtagtgttagacctgaacaaggtttactaaaaatccgtaaagaacttcaattgtacgccaacttaagaccatgtaactttgcatccgactctcttttagacttatctccaatcaagccacaatttgctaaaggtactgacttcgttgttgtcagagaattagtgggaggtatttactttggtaagagaaaggaagacgatggtgatggtgtcgcttgggatagtgaacaatacaccgttccagaagtgcaaagaatcacaagaatggccgctttcatggccctacaacatgagccaccattgcctatttggtccttggataaagctaatgttttggcctcttcaagattatggagaaaaactgtggaggaaaccatcaagaacgaattccctacattgaaggttcaacatcaattgattgattctgccgccatgatcctagttaagaacccaacccacctaaatggtattataatcaccagcaacatgtttggtgatatcatctccgatgaagcctccgttatcccaggttccttgggtttgttgccatctgcgtccttggcctctttgccagacaagaacaccgcatttggtttgtacgaaccatgccacggttctgctccagatttgccaaagaataaggtcaaccctatcgccactatcttgtctgctgcaatgatgttgaaattgtcattgaacttgcctgaagaaggtaaggccattgaagatgcagttaaaaaggttttggatgcaggtatcagaactggtgatttaggtggttccaacagtaccaccgaagtcggtgatgctgtcgccgaagaagttaagaaaatccttgcttaa

SEQ ID NO: 1275 - DNA, 2400 bp, Saccharomyces cerevisiae
atggttttgccgattctaccgttaattgatgatctggcctcatggaatagtaagaaggaatacgtttcacttgttggtcaggtacttttggatggctcgagcctgagtaatgaagagattctccagttctccaaagaggaagaagttccattggtggctttgtccttgccaagtggtaaattcagcgatgatgaaatcattgccttcttgaacaacggagtttcttctctgttcattgctagccaagatgctaaaacagccgaacacttggttgaacaattgaatgtaccaaaggagcgtgttgttgtggaagagaacggtgttttctccaatcaattcatggtaaaacaaaaattctcgcaagataaaattgtgtccataaagaaattaagcaaggatatgttgaccaaagaagtgcttggtgaagtacgtacagaccgtcctgacggtttatataccaccctagttgtcgaccaatatgagcgttgtctagggttggtgtattcttcgaagaaatctatagcaaaggccatcgatttgggtcgtggcgtttattattctcgttctaggaatgaaatctggatcaagggtgaaacttctggcaatggccaaaagcttttacaaatctctactgactgtgattcggatgccttaaagtttatcgttgaacaagaaaacgttggattttgccacttggagaccatgtcttgctttggtgaattcaagcatggtttggtggggctagaatctttactaaaacaaaggctacaggacgctccagaggaatcttatactagaagactattcaacgactctgcattgttagatgccaagatcaaggaagaagctgaagaactgactgaggcaaagggtaagaaggagctttcttgggaggctgccgatttgttctactttgcactggccaaattagtggccaacgatgtttcattgaaggacgtcgagaataatctgaatatgaagcatctgaaggttacaagacggaaaggtgatgctaagccaaagtttgttggacaaccaaaggctgaagaagaaaaactgaccggtccaattcacttggacgtggtgaaggcttccgacaaagttggtgtgcagaaggctttgagcagaccaatccaaaagacttctgaaattatgcatttagtcaatccgatcatcgaaaatgttagagacaaaggtaactctgcccttttggagtacacagaaaagtttgatggtgtaaaattatccaatcctgttcttaatgctccattcccagaagaatactttgaaggtttaaccgaggaaatgaaggaagctttggacctttcaattgaaaacgtccgcaaattccatgctgctcaattgccaacagagactcttgaagttgaaacccaacctggtgtcttgtgttccagattccctcgtcctattgaaaaagttggtttgtatatccctggtggcactgccattttaccaagtactgcattaatgcttggtgttccagcacaagttgcccaatgtaaggagattgtgtttgcatctccaccaagaaaatctgatggtaaagtttcacccgaagttgtttatgtcgcagaaaaagttggcgcttccaagattgttctagctggtggtgcccaagccgttgctgctatggcttacgggacagaaactattcctaaagtggataagatcttgggtccaggtaatcaatttgtgactgccgccaaaatgtatgttcaaaatgacactcaagctctatgttccattgatatgccagctggcccaagtgaagttttggttattgccgatgaagatgccgatgtggattttgttgcaagtgatttgctatcgcaagctgaacacggtattgactcccaagttatccttgttggtgttaacttgagcgaaaagaaaattcaagagattcaagatgctgtccacaatcaagctttacaactgccacgtgtggatattgttcgtaaatgtattgctcacagtacgatcgttctttgtgacggttacgaagaagcccttgaaatgtccaaccaatatgcaccagaacatttgattctacaaatcgccaatgctaacgattatgttaaattggttgacaatgcagggtccgtatttgtgggtgcttacactccagaatcgtgcggtgactattcaagtggtactaaccatacattaccaacctatggttacgctaggcagtacagtggtgccaacactgcaaccttccaaaagtttatcactgcccaaaacattacccctgaaggtttagaaaacatcggtagagctgttatgtgcgttgccaagaaggagggtctagacggtcacagaaacgctgtgaaaatcagaatgagtaagcttgggttgatcccaaaggatttccagtag

SEQ ID NO: 1276 - DNA, 333 bp, Saccharomyces cerevisiae
atggtatctcaagaaactatcaagcacgtcaaggaccttattgcagaaaacgagatcttcgtcgcatccaaaacgtactgtccatactgccatgcagccctaaacacgctttttgaaaagttaaaggttcccaggtccaaagttctggttttgcaattgaatgacatgaaggaaggcgcagacattcaggctgcgttatatgagattaatggccaaagaaccgtgccaaacatctatattaatggtaaacatattggaggcaacgacgacttgcaggaattgagggagactggtgaattggaggaattgttagaacctattcttgcaaattaa

SEQ ID NO: 1277 - DNA, 1503 bp, Saccharomyces cerevisiae
atgtcattcgacgacttacacaaagccactgagagagcggtcatccaggccgtggaccagatctgcgacgatttcgaggttacccccgagaagctggacgaattaactgcttacttcatcgaacaaatggaaaaaggtctagctccaccaaaggaaggccacacattggcctcggacaaaggtcttcctatgattccggcgttcgtcaccgggtcacccaacgggacggagcgcggtgttttactagccgccgacctgggtggtaccaatttccgtatatgttctgttaacttgcatggagatcatactttctccatggagcaaatgaagtccaagattcccgatgatttgctagacgatgagaacgtcacatctgacgacctgtttgggtttctagcacgtcgtacactggcctttatgaagaagtatcacccggacgagttggccaagggtaaagacgccaagcccatgaaactggggttcactttctcataccctgtagaccagacctctctaaactccgggacattgatccgttggaccaagggtttccgcatcgcggacaccgtcggaaaggatgtcgtgcaattgtaccaggagcaattaagcgctcagggtatgcctatgatcaaggttgttgcattaaccaacgacaccgtcggaacgtacctatcgcattgctacacgtccgataacacggactcaatgacgtccggagaaatctcggagccggtcatcggatgtattttcggtaccggtaccaatgggtgctatatggaggagatcaacaagatcacgaagttgccacaggagttgcgtgacaagttgataaaggagggtaagacacacatgatcatcaatgtcgaatgggggtccttcgataatgagctcaagcacttgcctactactaagtatgacgtcgtaattgaccagaaactgtcaacgaacccgggatttcacttgtttgaaaaacgtgtctcagggatgttcttgggtgaggtgttgcgtaacattttagtggacttgcactcgcaaggcttgcttttgcaacagtacaggtccaaggaacaacttcctcgccacttgactacacctttccagttgtcatccgaagtgctgtcgcatattgaaattgacgactcgacaggtctacgtgaaacagagttgtcattattacagagtctcagactgcccaccactccaacagagcgtgttcaaattcaaaaattggtgcgcgcgatttctaggagatctgcgtatttagccgccgtgccgcttgccgcgatattgatcaagacaaatgctttgaacaagagatatcatggtgaagtcgagatcggttgtgatggttccgttgtggaatactaccccggtttcagatctatgctgagacacgccttagccttgtcacccttgggtgccgagggtgagaggaaggtgcacttgaagattgccaaggatggttccggagtgggtgccgccttgtgtgcgcttgtagcatga

SEQ ID NO: 1278 - DNA, 1569 bp, Saccharomyces cerevisiae
atgaagttttctgctggtgccgtcctgtcatggtcctccctgctgctcgcctcctctgttttcgcccaacaagaggctgtggcccctgaagactccgctgtcgttaagttggccaccgactccttcaatgagtacattcagtcgcacgacttggtgcttgcggagttttttgctccatggtgtggccactgtaagaacatggctcctgaatacgttaaagccgccgagactttagttgagaaaaacattaccttggcccagatcgactgtactgaaaaccaggatctgtgtatggaacacaacattccagggttcccaagcttgaagattttcaaaaacagcgatgttaacaactcgatcgattacgagggacctagaactgccgaggccattgtccaattcatgatcaagcaaagccaaccggctgtcgccgttgttgctgatctaccagcttaccttgctaacgagacttttgtcactccagttatcgtccaatccggtaagattgacgccgacttcaacgccaccttttactccatggccaacaaacacttcaacgactacgactttgtctccgctgaaaacgcagacgatgatttcaagctttctatttacttgccctccgccatggacgagcctgtagtatacaacggtaagaaagccgatatcgctgacgctgatgtttttgaaaaatggttgcaagtggaagccttgccctactttggtgaaatcgacggttccgttttcgcccaatacgtcgaaagcggtttgcctttgggttacttattctacaatgacgaggaagaattggaagaatacaagcctctctttaccgagttggccaaaaagaacagaggtctaatgaactttgttagcatcgatgccagaaaattcggcagacacgccggcaacttgaacatgaaggaacaattccctctatttgccatccacgacatgactgaagacttgaagtacggtttgcctcaactctctgaagaggcgtttgacgaattgagcgacaagatcgtgttggagtctaaggctattgaatctttggttaaggacttcttgaaaggtgatgcctccccaatcgtgaagtcccaagagatcttcgagaaccaagattcctctgtcttccaattggtcggtaagaaccatgacgaaatcgtcaacgacccaaagaaggacgttcttgttttgtactatgccccatggtgtggtcactgtaagagattggccccaacttaccaagaactagctgatacctacgccaacgccacatccgacgttttgattgctaaactagaccacactgaaaacgatgtcagaggcgtcgtaattgaaggttacccaacaatcgtcttatacccaggtggtaagaagtccgaatctgttgtgtaccaaggttcaagatccttggactctttattcgacttcatcaaggaaaacggtcacttcgacgtcgacggtaaggccttgtacgaagaagcccaggaaaaagctgctgaggaagccgatgctgacgctgaattggctgacgaagaagatgccattcacgatgaattgtaa

SEQ ID NO: 1279 - DNA, 1251 bp, Saccharomyces cerevisiae
atgtctttatcttcaaagttgtctgtccaagatttggacttgaaggacaagcgtgtcttcatcagagttgacttcaacgtcccattggacggtaagaagatcacttctaaccaaagaattgttgctgctttgccaaccatcaagtacgttttggaacaccacccaagatacgttgtcttggcttctcacttgggtagaccaaacggtgaaagaaacgaaaaatactctttggctccagttgctaaggaattgcaatcattgttgggtaaggatgtcaccttcttgaacgactgtgtcggtccagaagttgaagccgctgtcaaggcttctgccccaggttccgttattttgttggaaaacttgcgttaccacatcgaagaagaaggttccagaaaggtcgatggtcaaaaggtcaaggcttccaaggaagatgttcaaaagttcagacacgaattgagctctttggctgatgtttacatcaacgatgccttcggtaccgctcacagagctcactcttctatggtcggtttcgacttgccacaacgtgctgccggtttcttgttggaaaaggaattgaagtacttcggtaaggctttggagaacccaaccagaccattcttggccatcttaggtggtgccaaggttgctgacaagattcaattgattgacaacttgttggacaaggtcgactctatcatcattggtggtggtatggctttcaccttcaagaaggttttggaaaacactgaaatcggtgactccatcttcgacaaggctggtgctgaaatcgttccaaagttgatggaaaaggccaaggccaagggtgtcgaagtcgtcttgccagtcgacttcatcattgctgatgctttctctgctgatgccaacaccaagactgtcactgacaaggaaggtattccagctggctggcaagggttggacaatggtccagaatctagaaagttgtttgctgctactgttgcaaaggctaagaccattgtctggaacggtccaccaggtgttttcgaattcgaaaagttcgctgctggtactaaggctttgttagacgaagttgtcaagagctctgctgctggtaacaccgtcatcattggtggtggtgacactgccactgtcgctaagaagtacggtgtcactgacaagatctcccatgtctctactggtggtggtgcttctttggaattattggaaggtaaggaattgccaggtgttgctttcttatccgaaaagaaataa

SEQ ID NO: 1280 - DNA, 1086 bp, Saccharomyces cerevisiae
atgaaaggtttaattttagtcggtggttacggtaccagattgagacctttaactttgaccgttccaaagccactggttgaattcggtaatagaccaatgattttacaccaaatcgaggctttagccaacgctggtgttactgacatcgttcttgctgttaattacagaccagaagtcatggtggaaactttgaagaagtacgaaaaggaatatggtgttaacatcactttctctgtagaaactgaaccattaggtactgcaggtccattgaaattggctgaagatgttttgaagaaggacaactctccatttttcgtcctaaactccgacgtcatttgcgaatatccattcaaggaattggctgacttccacaaagctcacggtggtaaaggtaccattgttgctaccaaggtcgacgaaccttctaaatacggtgtcattgtccatgatatagctactccaaacttgattgacagatttgttgaaaagccaaaggaatttgttggtaacagaattaacgccggtttgtacattttaaacccagaagtcattgacttgattgaaatgaagccaacttcaattgaaaaggaaactttcccaatcttggtcgaagaaaaacaactatattccttcgatttggaaggtttctggatggatgttggtcaaccaaaggacttcttgtctggtaccgttctttacttgaactctttggccaagagacaaccaaaaaaattggctacaggtgccaacattgttggtaatgccttgatcgacccaaccgctaagatttcctccactgctaagattggcccagacgtggttatcggtcctaatgtcaccatcggtgatggtgttagaatcaccagatctgttgttttgtgcaactccaccatcaagaaccactccttggtcaaatctaccatcgtaggctggaactctaccgttggtcaatggtgtcgtttggaaggtgtcactgtcttgggtgacgacgttgaagttaaggacgaaatctacatcaacggtggtaaagtcttacctcataagtctatctccgataatgttccaaaggaagctattattatgtga

SEQ ID NO: 1281 - DNA, 171 bp, Saccharomyces cerevisiae
atggctcacgaaaacgtttggttctcccacccaagaagattcggtaaaggttcccgtcaatgtcgtgtctgctcctcccacactggtttggtcagaaagtacgacttaaacatctgtcgtcaatgtttcagagaaaaggctaacgacattggtttccacaagtacagataa

SEQ ID NO: 1282 - DNA, 180 bp, Saccharomyces cerevisiae
atgactattgctccaattactggtacgatcaagagaagagtcatcatggacatcgtcctcgggttctccctcgggggtgtcatggcctcttactggtggtggggattccacatggataagattaacaagagagagaagttctacgcagagctagctgagaggaaaaagcaagagaactga

SEQ ID NO: 1283 - DNA, 342 bp, Saccharomyces cerevisiae
atggccggtttgaaagacgttgtcactcgtgaatacaccattaacttgcacaaaagattgcacggtgtctccttcaagaagagagctccaagagctgtcaaggaaattaagaagttcgccaagttacacatgggtactgatgatgtccgtctagctccagaattgaaccaagctatctggaagagaggtgtcaagggtgttgaatacagattaagattgagaatttccagaaagagaaacgaagaagaagacgccaagaacccattgttctcctacgttgaacctgtcttagttgcttctgccaagggtctacaaactgttgttgtcgaagaagatgcttaa

SEQ ID NO: 1284 - DNA, 321 bp, Saccharomyces cerevisiae
atgtctactgaatccgctttgtcttacgccgccttgattttggctgactctgaaatcgaaatctcttctgaaaagttgttgactttgactaacgctgccaatgtcccagttgaaaatatctgggctgatatttttgctaaggctttggacggccaaaacttgaaggacttattggtcaacttcagcgctggtgctgctgccccagctggtgtcgctggtggtgtcgctggtggtgaagccggtgaagccgaagctgaaaaggaagaagaagaagctaaagaagaatccgatgacgacatgggtttcggtttatttgattag

SEQ ID NO: 1285 - DNA, 600 bp, Saccharomyces cerevisiae
atggccatttccaagaatttaccaatcttaaagaatcatttcagaaagcactggcaagaacgtgttaaagtgcacttcgaccaagctggtaagaaggtttctagacgtaatgctagagctaccagagccgctaagattgctccaagacctctagatctcttgagacctgttgttagagccccaactgttaagtataacagaaaggtcagagctggcagaggtttcaccttggctgaagttaaggccgctggtttgactgctgcttatgccagaactatcggtatcgccgttgaccacagacgtcaaaacagaaaccaagaaatctttgatgctaacgttcaaagattaaaggaataccaatctaagattattgttttcccaagaaatggtaaggccccagaagctgaacaagttttgtctgctgctgctactttcccaattgctcaaccagctaccgatgttgaagctagagctgtccaagacaatggtgaatctgctttcagaaccttgagattagccagatctgagaagaaattcagaggtatcagagaaaagagagctagagaaaaggctgaagctgaagctgaaaagaagaaatag

SEQ ID NO: 1286 - DNA, 477 bp, Saccharomyces cerevisiae
atggagccattgatatcggcaccgtacctaacaacaacaaaaatgtctgctcctgctacgcttgatgctgcctgtattttttgcaagattattaaaagcgaaattccatccttcaaattgattgaaacaaagtactcgtatgctttcttggacatccaacctactgctgaaggtcatgctttaatcattcctaagtaccatggtgcgaagttgcatgacatcccggacgaattccttaccgatgctatgccgattgccaagagactggccaaggcaatgaagttggacacttataatgtgttgcagaataatggtaaaattgcgcatcaagaagtcgaccacgtccacttccatttgattcctaagagagatgagaaaagtggtttgattgtagggtggccagcccaagaaacggacttcgataagttgggcaagctacacaaggaattgcttgccaaactagaaggctccgattag

SEQ ID NO: 1287 - DNA, 321 bp, Saccharomyces cerevisiae
atgtctgactctattatttcctttgctgctttcatcctagctgatgctggtttggaaatcacctctgacaacttattgactatcaccaaggccgctggtgctaatgtcgacaacgtctgggctgatgtttacgctaaggctttggaaggtaaggacttgaaggaaatcctatctggtttccataacgctggccctgttgctggtgctggtgctgcttctggcgctgccgctgctggtggtgacgctgctgctgaagaagaaaaagaagaagaagctgctgaagaatctgacgacgacatgggtttcggtttattcgactaa

SEQ ID NO: 1288 - DNA, 261 bp, Saccharomyces cerevisiae
atgttaaaccgttgcatttcccgtaataccaggctgccagtaaacctaagaattgcctctcgcttttattcagatggtcctctcggtggtgccggacctggtaatcctcaagatatctttatcaagagagaacgtgccaaagaggattattatgccagacaacaagagagggaacaattagcacatgtgaaggaacaactaaaagaacacaagaaaaaattagagaatttagaaaacaaaattaataacctttcaaagtga

SEQ ID NO: 1289 - DNA, 546 bp, Saccharomyces cerevisiae
atgggtctatacgcttctaagttattcagcaatctttttggcaacaaagagatgcgtatacttatggttggtctagatggtgccggtaagaccaccgttttgtacaagttgaagttgggcgaagttatcactaccattccaaccattggtttcaacgttgagactgtccaatataagaacatttccttcactgtctgggacgtcggtggacaagacaggattagatctttatggagacactactacagaaacaccgaaggtgttatttttgtcatcgattccaacgatagatcgcgtattggtgaagccagagaagtcatgcagagaatgctgaatgaagatgaattgagaaatgctgtctggttagtcttcgctaacaaacaagatttgccagaagccatgtctgctgctgaaatcaccgaaaaattaggtttacattctattagaaaccgtccatggtttatccagtctacttgtgcaacctcgggtgaaggtctgtacgaaggtctggagtggttaagcaacaacttgaagaatcaatcctaa

SEQ ID NO: 1290 - DNA, 1287 bp, Saccharomyces cerevisiae
atgactgctgctaaaccaaatccatatgctgccaaaccgggcgactatctttctaatgtaaataatttccagttaatcgattcgacgctgagagaaggtgaacaatttgccaacgcattcttcgatactgaaaaaaagatcgaaattgctagagccttggacgatttcggtgtggactacatcgagttaacctcaccagtagcatctgaacaatcaagaaaggactgtgaagctatatgtaaactaggtttaaaggccaagatccttacacacattcgttgtcatatggatgacgccaaagtcgccgtagagactggtgtcgacggtgtcgatgtcgttatcggcacctccaaatttttaagacaatattcccacggtaaggatatgaactacatcgccaagagtgctgttgaagtcattgaatttgtcaaatccaaaggtattgaaatcagattttcctctgaagattccttcagaagtgatctcgttgatcttttgaacatttataaaaccgttgacaagatcggtgtaaatagagtcggtattgccgacacagttggatgtgccaacccaagacaagtatatgaactgatcagaactttgaagagtgttgtttcatgtgacatcgaatgccatttccacaacgatactggttgtgccattgcaaacgcctacactgctttggaaggtggtgccagattgattgacgtcagtgtactgggtattggtgaaagaaacggtatcactcctctaggtgggctcatggcaagaatgattgttgccgcaccagactatgtcaagtccaaatacaagttgcacaagatcagagacattgaaaacctggtcgctgatgctgtggaagttaacattccattcaacaaccctatcaccgggttctgtgcattcacacataaagcaggtatccatgccaaggccattttggctaacccatctacctacgaaatcttggaccctcacgatttcggtatgaagaggtatatccacttcgccaacagactaactggctggaacgccatcaaagccagagtcgaccagttgaacttgaacttgacggatgaccaaatcaaggaagttactgctaagattaagaagctgggtgatgtcagatcgctgaatatcgatgatgttgactctatcatcaagaacttccacgcagaggtcagcactcctcaagtactatctgcaaaaaagaacaagaagaatgacagcgatgtaccggaactggccaccatccccgccgccaagcggactaagccatccgcctaa

SEQ ID NO: 1291 - DNA, 363 bp, Saccharomyces cerevisiae
atggccggtgttaaagcttacgaactaagaaccaaatccaaggaacaattggcttctcaattggttgacttgaaaaaggagttggctgaattgaaggtccaaaagttgtccagaccatctttgccaaagatcaagaccgtcagaaagagtatcgcctgtgtcttgaccgtcatcaacgaacaacaaagagaagctgttagacaattatacaagggtaagaagtaccaaccaaaggacttgagagccaagaagaccagagctttgagaagagctttgaccaaattcgaagcttcccaagttaccgaaaagcaaagaaagaagcaaatcgctttcccacaaagaaagtacgctattaaggcttaa

SEQ ID NO: 1292 - DNA, 546 bp, Saccharomyces cerevisiae
atgggtttgtttgcctctaagttgttcagtaacctttttggtaacaaagaaatgcgtattcttatggttggtcttgatggtgctggtaagaccaccgttttgtacaagttgaaattgggtgaagttatcactaccattccaacaattggtttcaacgttgaaactgtccaatataagaacatttcattcactgtctgggatgtcggtggacaagacagaattagatctctatggagacactactacagaaacactgaaggtgttatctttgttgtcgattctaacgatagatcgcgtattggtgaagctagagaagttatgcaaagaatgttgaacgaagatgaattgagaaacgccgcttggttggtgttcgctaacaagcaagatttgccagaagccatgtctgctgctgaaatcactgaaaaactaggtttacattctattagaaaccgtccatggtttatccaagccacgtgtgctacctccggtgaaggtttgtatgaaggtttggaatggttaagtaacagtttgaaaaactcaacttaa

SEQ ID NO: 1293 - DNA, 471 bp, Saccharomyces cerevisiae
atgggtaaagacaacaaggaacataaggaaagcaaagaaagcaaaaccgtagacaactatgaggccagaatgcctgctgtgttgccattcgctaaaccattggcctctaagaaactaaacaagaaggtcttgaagaccgtgaagaaggcttccaaggccaagaatgttaaaagaggtgtcaaggaagttgtcaaggccttaagaaagggtgaaaaaggtttagtcgtcatcgccggtgacatttctccagctgatgttatttcccacatcccagtcttatgtgaagatcactctgtcccatacatcttcataccttcaaagcaagacttaggtgccgctggcgctacaaaaagacctacctcagttgtctttatcgtcccaggtagcaataagaaaaaagatggaaaaaataaagaagaagaatacaaggaatctttcaacgaagttgtcaaagaagttcaagctttatga

SEQ ID NO: 1294 - DNA, 1089 bp, Saccharomyces cerevisiae
atgtcccgtccacaagttactgttcactctttgactggtgaagctactgccaatgccttgccattgccagctgtcttctccgctcctatccgtcctgacattgtccacactgttttcacctctgtgaacaagaacaagagacaagcttacgctgtttctgaaaaggctggtcaccaaacctccgctgaatcctggggtaccggtcgtgccgtcgctcgtattccaagagttggtggtggtggtaccggtagatccggtcaaggtgccttcggtaacatgtgtcgtggtggtcgtatgtttgctccaactaagacctggagaaagtggaacgttaaggttaaccacaacgaaaagcgttacgccactgcttctgctattgctgctactgctgttgcttctttggtcttggccagaggtcacagagtcgaaaagattccagaaatcccattggttgtctccactgacttggaatctattcaaaagaccaaggaagctgttgctgctttgaaggctgttggtgctcactccgacttgttgaaggtcttgaagtccaagaaattgagagccggtaagggtaagtacagaaacagaagatggactcaaagaagaggtccattagttgtctacgctgaagacaacggtatcgtcaaggccttgagaaacgttccaggtgttgaaactgccaacgttgcttctttgaacttgttgcaattggctccaggtgctcacttgggtagattcgttatctggaccgaagctgctttcaccaagttggaccaagtctggggttccgaaaccgttgcctcctccaaggtcggttacactttgccatcccacatcatctccacttctgatgtcaccagaattatcaactcttctgaaatccaatctgctatcagaccagctggccaagctactcaaaagcgtactcacgttttgaagaagaacccattgaagaacaagcaagttttgttgagattgaacccttacgccaaggtctttgctgctgaaaagctaggttccaagaaggctgaaaagactggtaccaagccagctgctgttttcgccgaaaccttgaagcatgactag

SEQ ID NO: 1295 - DNA, 597 bp, Saccharomyces cerevisiae
atgccaagagtagctatcatcatttacacactatatggtcacgttgctgccaccgcagaggcagaaaagaagggaattgaagccgctggaggctctgcagacatttatcaagtcgaggaaacgttgtctccagaagttgttaaggcgcttggcggtgctccaaagccagattacccaattgccactcaagatacgttgacagaatatgatgcctttttgtttggtattccaactagatttggtaacttccctgctcaatggaaggctttctgggaccgtaccggtgggttgtgggctaagggtgctttgcatggtaaggtcgctggttgtttcgtctccaccggaactggtggtggtaatgaagccacaattatgaactctttgtctactttggctcatcacggtatcatttttgtcccattgggttacaagaatgttttcgctgaattgaccaatatggatgaagttcacggtggttcaccatggggtgcgggtaccattgcaggcagtgacggttcaagatctccttccgccttggaattacaagtacacgaaattcaaggcaagactttctacgaaaccgttgcaaagttttga

SEQ ID NO: 1296 - DNA, 963 bp, Saccharomyces cerevisiae
atgtctacctttgaaactttaattaaaagaggtggtaacgaagccatcaaaattaaccctccaaccggtgcggatttccacatcactagtcgtggttccgattggttctggacatgtttctgttgttacctattatttggtttaattttaacattcttaatgttcagaaaaccagtcaatgacagattcttttaccttaccggtattgctccaaactttttcatgtgtatcgcttatttcaccatggcttctaacttaggttggattccagtcaaggctaagtacaaccatgtccaaacttctactcaaaaagaacatccaggttacagacaaatcttctactctagattcgttggttggttcttagctttgccatggccaattattcaaatctgtatgctagctggtaccccattctggcaaatggctttcaatgtttgtattactgaattcttcactgtttgttggttgatcgctgcctgtgttcactccacttacaaatggggttactacaccatcggtctaggtgctgctattgtcgttagtatcagtgttatgaccaccagttacaacttggtgaaacaaagagataacgatatcaggttgacattccttgttttcttcagcattattatgttcttgtggattattgcttacccaacttgtttcggtattaccgatggtggtaacgttttgcagccagactctgccggtattttctatggtatcattgatcttattttgatgtgtttcattccaactttattggttccaattgctaaccacttcggtgctgacaaattgggctaccatttcggacctagtgatgccgaagcagtgatggctccaaaagctccagttgctagtccaagacctgctgctacaccaaacttgagtaaggacaagaaaaagaagtctaagaagagcaagaaatctaagaagtctaagaagtctgaagaataa

SEQ ID NO: 1297 - DNA, 747 bp, Saccharomyces cerevisiae
atggctagaactttctttgtcggtggtaactttaaattaaacggttccaaacaatccattaaggaaattgttgaaagattgaacactgcttctatcccagaaaatgtcgaagttgttatctgtcctccagctacctacttagactactctgtctctttggttaagaagccacaagtcactgtcggtgctcaaaacgcctacttgaaggcttctggtgctttcaccggtgaaaactccgttgaccaaatcaaggatgttggtgctaagtgggttattttgggtcactccgaaagaagatcttacttccacgaagatgacaagttcattgctgacaagaccaagttcgctttaggtcaaggtgtcggtgtcatcttgtgtatcggtgaaactttggaagaaaagaaggccggtaagactttggatgttgttgaaagacaattgaacgctgtcttggaagaagttaaggactggactaacgtcgttgtcgcttacgaaccagtctgggccattggtaccggtttggctgctactccagaagatgctcaagatattcacgcttccatcagaaagttcttggcttccaagttgggtgacaaggctgccagcgaattgagaatcttatacggtggttccgctaacggtagcaacgccgttaccttcaaggacaaggctgatgtcgatggtttcttggtcggtggtgcttctttgaagccagaatttgttgatatcatcaactctagaaactaa

SEQ ID NO: 1298 - DNA, 456 bp, Saccharomyces cerevisiae
atgggtcgtatgcacagtgccggtaaaggtatttcttcttctgctattccatactctagaaatgctccagcttggttcaagttgtcctctgaatctgtcattgaacaaattgtcaagtacgcgagaaagggtttgactccatctcaaattggtgtcttgttgagagatgctcacggtgttacccaagctcgtgttatcactggtaacaagatcatgagaatcttgaagtccaatggtttggctccagaaatcccagaagatttgtactacttgattaagaaggctgtctctgttagaaagcacttggaaagaaacagaaaggacaaagacgctaagttcagattgattttgatcgaatctagaattcacagattggccagatactacagaactgttgctgtcttaccaccaaactggaagtacgaatccgccactgcctccgctttggtcaactag

SEQ ID NO: 1299 - DNA, 1017 bp, Saccharomyces cerevisiae
atgaaattatcaactgtcctattatctgccggtttagcctcgactactttggcccaattttccaacagtacatctgcttcttccaccgatgtcacttcctcctcttccatctccacttcctctggctcagtaactatcacatcttctgaagctccagaatccgacaacggtaccagcacagctgcaccaactgaaacctcaacagaggctccaaccactgctatcccaactaacggtacctctactgaagctccaaccactgctatcccaactaacggtacctctactgaagctccaactgatactactactgaagctccaaccaccgctcttccaactaacggtacttctactgaagctccaactgatactactactgaagctccaaccaccggtcttccaaccaacggtaccacttcagctttcccaccaactacatctttgccaccaagcaacactaccaccactcctccttacaacccatctactgactacaccactgactacactgtagtcactgaatatactacttactgtccagaaccaaccactttcaccacaaacggtaagacttacaccgtcactgaaccaaccacattgactatcactgactgtccatgcaccattgaaaagccaacaaccacatcaaccaccgaatacactgtagtcactgagtacactacttactgtccagaaccaaccactttcaccacaaacggtaagacttacaccgtcactgaaccaaccactttgactatcactgactgtccatgtactattgaaaagagcgaagcccctgagtcttctgtcccagttaccgaatctaagggcactaccaccaaagaaacaggtgttactaccaaacaaaccacagccaacccaagtctaaccgtctccacagtcgtcccagtttcatcctctgcttcttctcattccgttgtcatcaacagtaacggtgctaacgtcgtcgttccaggtgctttaggtttggctggtgttgctatgttattcttataa

SEQ ID NO: 1300 - DNA, 489 bp, Saccharomyces cerevisiae
atgtcccaagtctattttgatgtcgaagctgatggccaaccaattggccgtgtcgttttcaagttgtacaacgacatagtcccaaagactgcagaaaacttcagagctctatgtaccggtgaaaagggattcggctacgctggctctccattccacagagttattccagacttcatgttgcaaggtggtgacttcactgctggtaacggtaccggcggtaagtctatctacggtggcaaattcccagatgaaaacttcaagaagcaccacgacagaccaggtttgttgtccatggccaacgccggtccaaacaccaacggttctcaattcttcatcaccaccgttccatgcccatggttggacggtaagcatgttgtctttggtgaagttgttgacggttacgacatcgttaagaaggttgagtccttgggttctccttccggtgccaccaaggctagaattgttgttgccaagtccggtgaattataa

SEQ ID NO: 1301 - DNA, 648 bp, Saccharomyces cerevisiae
atgtctagggctaagagaattatgaaagaaatccaagctgtgaaggatgatcctgcagctcacattactcttgaatttgtgagtgaatctgatatccaccatttaaaaggcacatttttgggcccacctggaacaccttacgagggtggcaaatttgtcgtggatatcgaagtacctatggagtatccattcaaaccaccaaagatgcagttcgacacaaaagtataccatccaaatatatcatcagtgacaggtgccatttgtttagatattcttaagaatgcatggtcgccagtgataacactaaagtctgcattgatttcgctacaggcgctactacaatctccagagcctaacgatcctcaagatgcagaagtagcacaacactatttacgggatagagaatcttttaataagactgctgcactatggacgaggttatacgccagtgaaacttccaatggtcaaaaaggcaatgtagaggagtctgatttatatgggattgaccacgatctgattgacgagtttgaatctcaaggttttgaaaaggacaagattgtggaagtgttgagacgattaggcgtcaagtccttagaccccaatgacaacaacacagccaaccgtatcatcgaggaattgttgaagtga

SEQ ID NO: 1302 - DNA, 546 bp, Saccharomyces cerevisiae
atgatgttgccaagatccatgaaatttatgactggaaggagaattttccatactgccacagtaagggccttccagtctaccgctaagaagagcttaactatcccatttttgcccgtattaccccagaaaccaggtggtgttaggggcactcccaatgatgcctacgtccccccccctgagaataaattagagggctcataccactggtatatggaaaaaatctttgccttgtccgtcgttccattggctacgacggctatgctgacaaccggtccgttatccactgcagctgattctttcttttctgtcatgcttttgggatattgttacatggaatttaactcttgtatcaccgattatatttctgaaagagtttatggtgtttggcacaagtacgccatgtatatgttgggccttggttctgcggtctccctttttggaatctataaactagaaaccgagaatgatggtgttgttggtttagtaaaaagtctatgggattcttccgagaaagacaacagtcaaaagattgaagccaagaagtag

SEQ ID NO: 1303 - DNA, 396 bp, Saccharomyces cerevisiae
atgtctgctaaagccgaaaagaaaccagcctccaaagccccagctgaaaagaaaccagccgctaaaaagacttccacttccactgatggtaagaagagaagcaaggctagaaaggaaacatactcttcttacatttacaaagttttgaagcaaactcaccctgacactggtatttcccaaaagtccatgtctatcttgaactctttcgttaacgatatctttgaaagaatcgctactgaagcttctaaattggctgcgtataacaagaagtctactatctctgctagagaaattcaaaccgctgttagattgatcttaccaggtgaattggctaagcatgctgtctctgaaggtactagagctgttaccaagtactcttcctctactcaagcataa

SEQ ID NO: 1304 - DNA, 399 bp, Saccharomyces cerevisiae
atgtccggtggtaaaggtggtaaagctggttcagctgctaaagcttctcaatctagatctgctaaggctggtttgacattcccagtcggtagagtgcacagattgctaagaagaggtaactacgcccaaagaattggttctggtgctccagtctacttgactgctgtcttggaatatttggccgctgaaattttagaattagctggtaatgctgctagggataacaagaagaccagaattattccaagacatttgcaattggctatcagaaatgatgacgaattgaacaagctattgggtaacgttaccattgcccaaggtggtgttttgccaaacatccatcaaaacttgttgccaaagaagtctgccaaggctaccaaggcttctcaagaattataa

SEQ ID NO: 1305 - DNA, 669 bp, Saccharomyces cerevisiae
atgtctagctcagaatccattagaatggtcctaattggcccacctggtgccggtaaaggtactcaagctccaaatttgcaagagcgtttccatgccgctcacttggccactggtgacatgttgagatctcaaatcgcaaagggcactcaattaggtttggaagcaaagaaaattatggaccaaggtggtttagtctctgatgacattatggttaacatgatcaaggatgaattgaccaacaatccagcttgtaagaatgggttcatcttggacggtttcccaagaaccattcctcaggctgaaaaattggaccaaatgttgaaagaacaaggaactcctttggaaaaagccatcgaattgaaggttgatgatgaattgttggttgccagaattaccggtagattaattcacccagcctctggcagatcctaccacaagatctttaacccaccaaaggaagacatgaaggatgacgtcaccggtgaagctttagttcaaagatctgatgacaatgcagacgccttgaagaagagattagctgcttaccatgctcaaaccgaaccaattgttgacttttacaaaaagaccggtatctgggctggtgttgatgcttcccaacctcctgctactgtttgggctgacatcttgaacaagctaggtaaggattaa

SEQ ID NO: 1306 - DNA, 888 bp, Saccharomyces cerevisiae
atgtccgcctcagctcaacatagccaagcccaacaacaacaacaacaaaaaagctgtaattgcgatttgctattatggaggaaccctgttcaaaccggtaaatatttcggtgggtctctgttagccttgttaattttgaaaaaagttaacttgatcactttctttttgaaggttgcctacactatcttattcacaacaggatctattgaattcgtatccaagctctttttgggacaaggtttaatcaccaagtatggtcctaaagaatgtccaaatatcgccggctttattaagcctcatatcgatgaagctttgaaacagctaccagtcttccaagcccacataagaaagactgtattcgctcaagtccctaagcacactttcaagaccgctgttgccttatttctactacacaaattcttctcctggttctctatctggaccatcgtctttgttgctgacatttttaccttcactttgccagttatctaccattcctacaagcatgaaattgatgctactgtcgctcaaggtgtagaaatttctaagcaaaagacccaagagttttctcaaatggcttgcgaaaagacaaaaccatacttggacaaggttgaatctaaattgggcccaatttccaacttggtcaaatctaagactgctcctgtgtcttctactgccggtcctcaaaccgccagcacttctaagttggccgctgatgttccattggaaccagagtctaaggcttacacatcttcagctcaagttatgccagaagttccacaacacgaaccttccactacccaagaatttaacgtcgatgaattgtctaatgaattgaagaaaagtacaaaaaacttgcaaaatgaattggaaaaaaacaacgcttga

SEQ ID NO: 1307 - DNA, 168 bp, Saccharomyces cerevisiae
atggattctgccaagatcattaacattatattatcccttttcttaccaccagtcgccgtttttctagcccgtgggtggggtactgactgtatagtggatatcattttgaccattttggcttggttcccaggtatgctatatgccttgtacattgtcctacaagattaa

SEQ ID NO: 1308 - DNA, 291 bp, Saccharomyces cerevisiae
atgtcgacagttaatgttttgagatactctgcgttgggtttggggctattttttggttttagaaatgatatgattttgaagtgtaatgctaagaagaaagaggagcaggcacagtacgaggagaaattgaagctggtagaggaggcaaagaaggaatacgccaagctacaccctgtagtaactcctaaagatgtgcctgcgaacgcctcatttaatttggaagatcctaatatagattttgaaagagttattcttaacgccgttgaatccctgaaggaagcttcaacataa

SEQ ID NO: 1309 - DNA, 1824 bp, Saccharomyces cerevisiae
atggctagcacagcaaatatgatttctcaactaaagaaactatctatcgcggaacctgcggttgccaaggattctcatcctgatgtaaatatcgtggatttgatgagaaattacatttcacaagaattaagcaagatttccggcgtagactcgtctcttatttttccagcattagaatggacaaatactatggagagaggcgatttgttgattcctatcccaagattgagaatcaaaggtgccaatccaaaggatttggcagtccaatgggctgaaaaatttccatgtggagatttcttggagaaagttgaagcgaatggcccgttcatccagtttttcttcaaccctcaatttttagcaaaacttgtcatcccagatatcttaaccagaaaggaggattatggttcttgcaaattggttgaaaacaagaaagttattattgaattctcctctcccaacattgccaagccatttcatgctggtcatttaagatccactattattggtggctttttggccaacctttatgaaaaattaggttgggaggttatcagaatgaactacctgggtgactggggtaaacaatttggtcttttagctgttggttttgaaagatacggtaatgaagaggctttagttaaggatccaattcaccacctgttcgatgtttacgttcgtatcaacaaggatattgaggaagaaggtgacagtattccattagaacaatccaccaatggaaaagctcgtgaatatttcaagagaatggaagatggtgacgaggaagctttaaaaatttggaagagattccgtgaattttctattgaaaaatatattgacacatatgcacgtttgaacatcaaatatgatgtttactctggtgaatctcaagtttctaaagaatccatgctcaaagctatcgacctgttcaaggaaaagggcttaacacatgaggataagggtgcagttttgatcgatttgacaaaatttaacaaaaagttaggaaaggctattgttcaaaaatcggacggtactacgttatatctaactagagacgttggtgcagctatggaccgttatgaaaagtatcattttgacaagatgatttacgttatcgcttctcaacaagatttgcacgctgcccaattcttcgaaattttgaagcagatgggctttgagtgggctaaagatctacagcatgtcaactttggtatggtccaaggtatgtcaacaagaaaaggtactgttgtcttcttagataatatcttggaggaaactaaggaaaaaatgcacgaagttatgaaaaagaatgagaacaaatacgcgcaaattgagcatccagaagaagttgccgatttagttggtatctctgccgtcatgattcaagatatgcaaggtaagcgtatcaacaactacgagtttaaatgggaaagaatgctttcattcgaaggtgacactggtccataccttcaatatgctcactcaaggttaagatcagttgaaagaaatgcttctggtatcacccaagaaaaatggataaatgccgatttttcgttattaaaagaacctgccgcaaaactgttgattagactgctaggccaataccccgatgttttgagaaatgcaatcaaaacccacgagccaacaaccgtggtcacatatttattcaaattgactcaccaggtttcttcttgttatgacgtcttatgggttgctggtcaaactgaagaattagcaactgcccgtctggctctatatggtgctgcaagacaagttttatacaacggtatgcgcttgttaggtttaactcccgtagaaagaatgtaa

SEQ ID NO: 1310 - DNA, 1713 bp, Saccharomyces cerevisiae
atgtcacaagacgctgctattgcagagcaaactcctgtggagcatctctctgctgttgactcagcctcccactcggttttatctacaccatcaaacaaggctgaaagagatgaaataaaagcttatggtgaaggtgaagagcacgaacctgtcgttgaaattccaaagagaccagcttctgcctatgtcactgtctctattatgtgtatcatgatcgcctttggtggtttcgttttcggttgggatactggtaccatttctggtttcatcaatcaaaccgatttcatcagaagatttggtatgaagcataaagatggtactaattatttgtctaaggttagaactggtttgattgtctccattttcaacattggttgtgccattggtggtattattctttccaaattgggtgatatgtacggtcgtaaggtgggtttgattgtcgttgttgtcatctacatcatcggtattattattcaaattgcatctatcaacaaatggtaccaatatttcatcggtagaattatttccggtttgggtgttggtggtattgccgttttatctcctatgttgatttctgaagtatccccaaagcatttaaggggtactttagtctcttgctaccaattgatgattactgccggtattttcttgggttactgtaccaacttcggtactaagaactactccaactctgtgcaatggagagttccattaggtttgtgttttgcctgggctttgtttatgattggtggtatgacatttgttccagagtctccacgttatttggctgaagtcggtaagatcgaagaagccaaacgttctattgccgtttctaacaaggttgctgttgatgatccatctgttttggctgaagtcgaagctgtcttggctggtgtagaggcagagaaattagctggtaatgcatcctggggtgaattgtttagtagcaagacaaaggtccttcagcgtttgatcatgggtgctatgattcaatctctacaacaattgacaggtgataactatttcttctactatggtactactattttcaaggctgttggtttgagtgactctttcgaaacctctattgtcttgggtattgttaactttgcttccacctttgttggtatttacgttgttgagagatatggtcgtcgtacttgtttgctatggggtgctgcatccatgactgcttgtatggttgtctatgcttccgtgggtgtcaccagattatggccaaatggtcaagaccaaccatcttccaagggtgctggtaactgtatgattgtctttgcctgtttctatattttctgttttgctactacatgggctccaattccttatgtcgttgtttctgaaactttcccattgagagtcaagtctaaggctatgtctattgctacagctgctaattggttgtggggtttcttgattggtttcttcactccatttattactggtgctattaacttctactacggttacgttttcatgggctgtttggtcttcatgttcttctatgttttgttagttgttccagaaactaagggtttgactttggaagaagtcaacaccatgtgggaagaaggtgttctaccatggaagtctgcctcatgggttccaccatccagaagaggtgccaactacgacgctgaagaaatgactcacgatgacaagccattgtacaagagaatgttcagcaccaaataa

SEQ ID NO: 1311 - DNA, 1713 bp, Saccharomyces cerevisiae
atgtcacaagacgctgctattgcagagcaaactcctgtggagcatctctctgctgttgactcagcctcccactcggttttatctacaccatcaaacaaggctgaaagagatgaaataaaagcttatggtgaaggtgaagagcacgaacctgtcgttgaaattccaaagagaccagcttctgcctatgtcactgtctctattatgtgtatcatgatcgcctttggtggtttcgttttcggttgggatactggtaccatttctggtttcatcaatcaaaccgatttcatcagaagatttggtatgaagcataaagatggtactaattatttgtctaaggttagaactggtttgattgtctccattttcaacattggttgtgccattggtggtattattctttccaaattgggtgatatgtacggtcgtaaggtgggtttgattgtcgttgttgtcatctacatcatcggtattattattcaaattgcatctatcaacaaatggtaccaatatttcatcggtagaattatttccggtttgggtgttggtggtattgccgttttatctcctatgttgatttctgaagtatccccaaagcatttaaggggtactttagtctcttgctaccaattgatgattactgccggtattttcttgggttactgtaccaacttcggtactaagaactactccaactctgtgcaatggagagttccattaggtttgtgttttgcctgggctttgtttatgattggtggtatgacatttgttccagagtctccacgttatttggctgaagtcggtaagatcgaagaagccaaacgttctattgccgtttctaacaaggttgctgttgatgatccatctgttttggctgaagtcgaagctgtcttggctggtgtagaggcagagaaattagctggtaatgcatcctggggtgaattgtttagtagcaagacaaaggtccttcagcgtttgatcatgggtgctatgattcaatctctacaacaattgacaggtgataactatttcttctactatggtactactattttcaaggctgttggtttgagtgactctttcgaaacctctattgtcttgggtattgttaactttgcttccacctttgttggtatttacgttgttgagagatatggtcgtcgtacttgtttgctatggggtgctgcatccatgactgcttgtatggttgtctatgcttccgtgggtgtcaccagattatggccaaatggtcaagaccaaccatcttccaagggtgctggtaactgtatgattgtctttgcctgtttctatattttctgttttgctactacatgggctccaattccttatgtcgttgtttctgaaactttcccattgagagtcaagtctaaggctatgtctattgctacagctgctaattggttgtggggtttcttgattggtttcttcactccatttattactggtgctattaacttctactacggttacgttttcatgggctgtttggtcttcatgttcttctatgttttgttagttgttccagaaactaagggtttgactttggaagaagtcaacaccatgtgggaagaaggtgttctaccatggaagtctgcctcatgggttccaccatctagaagaggtgccaactacgacgctgaagaaatggctcacgatgataagccattgtacaagagaatgttcagcaccaaataa

SEQ ID NO: 1312 - DNA, 333 bp, Saccharomyces cerevisiae
atgaaatacttagctgcttacttattattggttcaaggtggtaacgctgccccatccgccgctgacatcaaggccgtcgtcgaatctgtcggtgctgaagtcgatgaagccagaatcaacgaattgttgtcctctttggaaggtaagggctctttggaagaaatcatcgctgaaggtcaaaagaagttcgctactgttccaactggtggtgcttcttctgctgctgccggtgctgccggtgctgctgccggtggtgatgctgctgaagaagaaaaggaagaagaagctaaggaagaatctgatgatgacatgggttttggtttattcgattaa

SEQ ID NO: 1313 - DNA, 498 bp, Saccharomyces cerevisiae
atgcctccaaagtttgatccaaatgaagttaagtacttgtacttgagagctgtcggtggtgaagtcggtgcttccgccgccttggctccaaagatcggtccattgggtttatccccaaagaaggttggtgaagatatcgccaaggccaccaaggaattcaaaggtatcaaagttactgtccaattgaaaatccaaaacagacaagctgctgcttctgttgttccatctgcttcctctttggtcattactgctttgaaggaaccaccaagagacagaaagaaggataagaacgtcaagcatagcggtaacatccaattggatgaaattattgaaattgccagacaaatgagagacaaatccttcggtagaactttggcttccgttactaaggaaattttgggtactgctcaatctgtcggttgtcgtgttgatttcaagaaccctcatgacatcattgaaggtattaacgctggtgaaattgaaattccagaaaactaa

SEQ ID NO: 1314 - DNA, 564 bp, Saccharomyces cerevisiae
atgtcccgtcctatcgtaatttctggcccaagtggtacaggtaaatctacactgttgaagaaattgttcgctgaatacccagattctttcgggtttagtgtttcatccactactagaaccccaagagctggcgaagtaaacggtaaggactataactttgtctccgtagatgaattcaaatctatgattaagaacaatgaattcattgaatgggcgcaattctccggtaactactatggtagtactgtcgcttccgtcaaacaagtcagtaaatctggtaagacttgtattttagatattgatatgcagggtgtcaaatctgtcaaggctatcccagagttaaatgccaggtttttgtttattgctccaccatcggtcgaggatttgaaaaaaagattagaaggtagaggtacggagaccgaagaatccatcaacaagaggttaagcgccgctcaagctgaattggcatatgctgagacaggtgcccatgacaaagttattgtcaatgatgatttggacaaggcctacaaggaattgaaggattttatctttgcagaaaaatga

SEQ ID NO: 1315 - DNA, 411 bp, Saccharomyces cerevisiae
atggctaaatttttgaaagcaggtaaagttgctgtcgttgttcgtggtcgttacgctggtaagaaggttgtgatcgttaagccacacgatgagggttctaaatctcatccattcggtcacgctttggttgccggtattgaaaggtacccatcaaaggtcaccaagaagcacggtgccaagaaggtcgctaagagaactaaaatcaagccattcatcaaagtcgtcaactacaaccacttattgccaaccagatacaccttggatgttgaagctttcaagagcgttgtatctacagagacttttgaacaaccatcccaacgtgaagaagccaagaaggttgtaaagaaggcatttgaagaaagacatcaagctggtaaaaaccaatggttcttctccaagttgagattctaa

SEQ ID NO: 1316 - DNA, 1755 bp, Saccharomyces cerevisiae
atgggaatacacataccatatctcacgtcaaagacatcgcaatcaaatgttggtgatgccgttggcaacgctgatagtgtagagttcaacagtgagcatgactcaccttcaaagagaggtaaaattacacttgagtcacatgaaatacagagggctcccgctagcgatgatgaagataggattcaaattaaacccgtgaacgacgaggatgacacgtcggtcatgatcacttttaaccaatctctttcgcccttcatcatcactctgacttttgtcgcatccatatccggtttcatgtttggttacgacactggttatatatccagtgcgctgatctcgatcggcacagatctggaccacaaggtacttacttatggggagaaggaaattgtcactgcggctacctctctgggagctttgattaccagtattttcgccggtactgcagctgacatatttggtaggaaacgttgtttaatgggttcgaatctgatgtttgtcattggcgcaatcttacaggtctccgcacacacattctggcaaatggctgttggtagactgatcatgggtttcggtgtcggtatcggctccttgatcgcgccacttttcatcagtgaaattgctcccaaaatgatcagagggagactaactgtcatcaattccttatggttgactggtggtcaattagtcgcttacggttgcggtgctgggttaaactacgtcaacaatggttggagaattcttgttggattgtcactaattcccactgctgtgcaattcacatgcctgtgctttttacctgacactccaagatactacgttatgaagggcgacttggcaagggctactgaggtgttgaagagaagttacactgacacttcggaggaaatcattgaacgtaaggtggaagaacttgttactttgaatcaatctattcctggtaagaatgtccctgaaaaagtctggaataccatcaaagaattgcacacagtaccatctaatctaagggctttgatcattggttgtggtttacaagcaattcaacagtttaccggttggaattcgttgatgtatttctctggtaccatcttcgaaactgtcggtttcaaaaattcttccgctgtttcaatcatcgtgtccggtaccaattttattttcactttagttgcctttttttccattgacaaaataggccgtagaaccatattattgattggattaccaggcatgaccatggctttagtcgtgtgctctattgctttccattttctaggtattaagtttgatggcgctgtcgctgtggtggtttcctccggtttctcctcttggggtattgtgatcatcgtatttattatcgtatttgctgcgttctacgctcttggtatcggtactgttccatggcaacaatcggaactattcccccaaaacgtgagaggtattgggacttcatatgcaactgctacaaactgggctggttcactggttattgcatccacatttttgaccatgttacagaatatcactcctgcaggtacatttgcctttttcgcgggattgtcgtgcttatcaaccattttctgctacttctgttatccagaattatcgggattggagttagaagaggtacaaactattttgaaggacgggttcaacatcaaagcctcgaaagctttggccaagaagagaaaacagcaagttgccagagttcatgaattgaaatatgaaccaactcaagagattatagaggatatatag

SEQ ID NO: 1317 - DNA, 267 bp, Saccharomyces cerevisiae
atgggtaagggtactccttcattcggtaagcgtcacaacaaatctcacaccttgtgtaacagatgtggtcgtcgttctttccatgttcaaaagaagacctgttcctcttgtggttacccatccgctaagactagatctcacaactgggctgccaaggcaaagagaagacacactactggtaccggtagaatgagatatttgaagcatgtctccagaagatttaagaacggtttccaaaccggttctgctaaggctacttctgcttaa

SEQ ID NO: 1318 - DNA, 384 bp, Saccharomyces cerevisiae
atgccacagtcttttacgtctattgcgagaattggtgactatattttgaagtcacccgtcctctccaagttatgtgttccagttgccaatcagttcattaacctcgcaggttacaagaagttagggctcaaatttgacgacttaattgcagaggaaaatcccatcatgcagaccgctttaagaagactccctgaagatgaatcttatgccagagcatatagaataatcagggctcatcaaaccgagttgactcatcatttactgccaagaaacgaatggatcaaagcccaagaggatgttccttacctgttgccatacatattagaagctgaagctgcagctaaggagaaggacgagttagacaacatagaggtctccaaatga

SEQ ID NO: 1319 - DNA, 846 bp, Saccharomyces cerevisiae
atgtccgaatatcagccaagtttatttgctttaaatccaatgggtttctcaccattggatggttctaaatcaaccaacgaaaatgtatctgcttccacttctactgccaaaccaatggttggccaattgatttttgataaattcatcaagactgaagaggatccaattatcaaacaggataccccttcgaaccttgattttgattttgctcttccacaaacggcaactgcacctgatgccaagaccgttttgccaattccggagctagatgacgctgtagtggaatctttcttttcgtcaagcactgattcaactccaatgtttgagtatgaaaacctagaagacaactctaaagaatggacatccttgtttgacaatgacattccagttaccactgacgatgtttcattggctgataaggcaattgaatccactgaagaagtttctctggtaccatccaatctggaagtctcgacaacttcattcttacccactcctgttctagaagatgctaaactgactcaaacaagaaaggttaagaaaccaaattcagtcgttaagaagtcacatcatgttggaaaggatgacgaatcgagactggatcatctaggtgttgttgcttacaaccgcaaacagcgttcgattccactttctccaattgtgcccgaatccagtgatcctgctgctctaaaacgtgctagaaacactgaagccgccaggcgttctcgtgcgagaaagttgcaaagaatgaaacaacttgaagacaaggttgaagaattgctttcgaaaaattatcacttggaaaatgaggttgccagattaaagaaattagttggcgaacgctga

SEQ ID NO: 1320 - DNA, 132 bp, Saccharomyces cerevisiae
atgttgatgagcacgttaccaggtggtgttatcttagtttttattctagtcggtttggcttgtatcgccatcatttctaccattatctacagaaaatggcaagctagacaaagaggtttacaaagattctaa

SEQ ID NO: 1321 - DNA, 648 bp, Saccharomyces cerevisiae
atgttaggaataagatcatctgtcaagacctgcttcaagccaatgtctttaacttccaaaagactgatttctcaatctttgctggctagcaaatccacgtacaggaccccaaattttgatgacgttttaaaggaaaataacgatgctgataaaggccgttcttatgcttactttatggtcggtgctatgggtcttttgtcatctgcaggtgccaaatcaaccgtagaaacctttatttcatctatgaccgctactgccgatgttttggctatggctaaagttgaagttaatttagcggctatcccattgggtaaaaacgtggttgtcaaatggcaaggtaagcctgtgttcattagacacagaactcctcatgaaattcaggaagccaacagtgtggatatgtccgctttgaaggacccacagaccgatgctgacagagtcaaagaccctcaatggttaattatgctgggtatttgtactcacttaggttgtgttccaattggtgaagccggtgattttggtggttggttctgtccttgccatggttcacattatgatatttccggtagaatcagaaagggacctgcccccttaaacttagaaattcctgcttatgaattcgatggtgataaggtcattgttggttag

SEQ ID NO: 1322 - DNA, 483 bp, Saccharomyces cerevisiae
atgactgaattgtgtcctgtctacgcccctttctttggtgccattggttgtgcctctgcaattatcttcacctcattaggtgctgcttacggtactgctaagtctggtgttggtatctgtgccacttgtgtgttgagaccagacctattattcaagaacattgttcctgttattatggctggtatcattgccatttacggtttagttgtttccgttttggtttgttattcgttgggtcaaaagcaagctttgtacaccggtttcatccaattgggtgccggtctatcagtcggtttgagtggtctagctgctggtttcgctattggtattgtcggtgatgcaggtgttagaggttcctctcaacaaccaagattattcgtcggtatgattttgattttgatttttgctgaagttttgggtctatacggtttgattgttgctttgttgttgaactccagggctactcaagatgttgtctgttaa

SEQ ID NO: 1323 - DNA, 474 bp, Saccharomyces cerevisiae
atgtctgacgaagaacatacctttgaaactgctgacgctggttcctccgccacctacccaatgcaatgttctgccttgagaaagaacggtttcgttgtcatcaagagtagaccatgtaagattgtcgacatgtccacttctaagactggtaagcacggtcacgctaaagtccatttggttgccattgatatcttcactggtaagaagttggaagatttgtctccatctactcacaacatggaagttccagttgtcaagagaaacgaataccaattgttggacattgatgacggtttcttgtctttgatgaacatggacggtgacactaaggatgatgtcaaggctccagaaggtgaattgggtgacagtttgcaaactgcttttgatgaaggtaaggacttgatggttaccatcatctccgctatgggtgaagaagccgccatctccttcaaggaagctgctagaaccgattaa

SEQ ID NO: 1324 - DNA, 498 bp, Saccharomyces cerevisiae
atgcctccaaagtttgatcctaatgaagttaaatacttgtacctaagagccgttggtggtgaagtcggtgcctccgctgctttggctccaaagattggtcctttaggtctatcgccaaagaaggttggtgaagatattgctaaggccaccaaagaattcaagggtatcaaggttaccgtccaattaaagatccaaaacagacaagctgctgcctctgttgtcccatctgcttcctctttggtcattactgctttgaaggaaccaccaagagacagaaagaaggacaaaaacgtcaagcacagtggtaacattcaattggatgaaattattgaaattgccagacaaatgagagacaaatccttcggtagaactttggcttccgttactaaggaaatcttaggtactgctcaatctgtcggctgtcgtgttgacttcaagaatccccatgatatcattgaaggcattaatgctggtgaaatcgaaatcccagaaaattag

SEQ ID NO: 1325 - DNA, 765 bp, Saccharomyces cerevisiae
atggcttacactaagatcgctttattcgctgctattgctgctttggcttccgctcaaacccaagatcaaattaacgaattgaacgttattttgaacgatgtcaaatctcacttgcaagagtacattagcttagcttctgattcttcctctggattttccttaagcagtatgccagctggtgttttggatatcggtatggctttagcttccgccactgacgactcctacactactttgtactctgaggttgactttgctggtgttagcaagatgttgaccatggttccatggtactcctctagattggaaccagctttgaagtctttgaatggtgatgcttcttcttctgctgccccaagctcttctgctgctccaacttcttctgctgccccaagctcatctgctgccccaacttcttctgctgcctcaagctcttctgaagctaagtcttcttctgctgccccaagctcttctgaagctaagtcttcttctgctgccccaagctcttctgaagctaagtcttcttctgctgccccaagctcttctgaagctaagtcttcttctgctgctccaagctccactgaagctaagataacttctgctgctccaagctccactggtgccaagacctctgccatctctcaaattaccgatggtcaaatccaagctaccaaggctgtttctgagcaaactgaaaacggtgctgctaaggcctttgttggtatgggtgctggtgttgtcgcagctgccgctatgttgttataa

SEQ ID NO: 1326 - DNA, 366 bp, Saccharomyces cerevisiae
atggcccaacgtgttactttcagaagaagaaatccatacaacacccgttctaacaaaatcaaggttgttaagaccccaggtggtattttgcgtgcccaacatgtcaagaagttagctaccagaccaaagtgtggtgactgtggtagcgctttgcaaggtatctctactttgagaccaagacaatacgccactgtttccaagacccacaagactgtttccagagcttacggtggttccagatgtgccaactgtgttaaggaaagaattattagagctttcttgatcgaagaacaaaaaattgtcaagaaggttgtcaaggaacaaaccgaagctgccaagaaatctgaaaagaaggctaagaaataa

SEQ ID NO: 1327 - DNA, 408 bp, Saccharomyces cerevisiae
atgtctgacgctgttactatccgtactagaaaggttatctccaacccattgttggccagaaagcaattcgtcgtcgacgtcttgcacccaaacagagctaatgtctccaaggatgaattgcgtgaaaaattagctgaagtctacaaggctgaaaaggacgctgtctccgttttcggtttcagaacccaatttggtggtggtaagtctgttggtttcggtttggtctacaactctgttgccgaagctaagaagttcgaaccaacttacagattagtcagatacggtttggctgaaaaggttgaaaaggcttccagacaacaaagaaagcaaaagaagaacagagacaagaagatcttcggtactggtaagagattggctaagaaggttgctcgtcgtaacgccgattaa

SEQ ID NO: 1328 - DNA, 2304 bp, Saccharomyces cerevisiae
atggttcaatctgctgtcttagggttcccaagaatcggtccaaacagagaattaaagaaggccactgaaggttactggaacggtaaaatcactgtcgatgaattattcaaggtcggtaaggatttgagaactcaaaactggaagttgcaaaaggaggctggtgttgatatcatcccatccaatgacttctccttttacgaccaagttttggatttgtctttgttgttcaatgtcattccagaccgttacactaagtacgatctatctccaatcgacactttgtttgctatgggtagaggtttacaaagaaaggccactgaaactgaaaaggctgtcgacgtcactgctttggaaatggttaaatggttcgactctaactaccattacgttagaccaactttctccaagaccactcaatttaagttgaacggccaaaagccagttgacgaatttttggaagccaaggagttaggtattcatactagacctgtcttgttgggtccagtttcttacttattcttgggtaaggctgacaaggattctctagatttggaaccattgtccctattggaacaattgttgcctctatacactgaaatcctatctaaattggcttctgctggtgccactgaagttcaaattgacgaacctgtcttagttttggacttgcctgccaacgcccaagccgccattaagaaggcttacacttacttcggtgaacaaagcaatctaccaaagattactttggctacttacttcggtaccgttgtccctaacttagacgccatcaagggcttgccagttgctgccttacacgttgactttgttagagctccagaacaatttgatgaagtcgttgccgccattggtaacaaacaaaccttgtccgttggtattgttgatggtagaaacatttggaagaatgatttcaagaagtcttccgctatcgttaacaaggctattgaaaagttgggtgctgacagagtcgttgttgccacttcttcttctctattgcacacaccagttgatttgaacaacgaaaccaagttggacgctgaaatcaagggctttttctctttcgccactcaaaaattggatgaagttgttgtgatcaccaagaacgtttccggtcaagacgttgctgctgccctagaagctaacgctaaatctgttgaatccagaggtaaatccaagtttatccacgatgctgccgttaaggccagagttgcctctatcgacgaaaaaatgtctactagagcagctccatttgaacaaagattgcctgaacaacaaaaagtcttcaacttgccattgttcccaacaacaactattggttccttccctcaaaccaaggacatcagaattaacagaaacaaattcaacaagggcaccatctctgctgaagaatatgaaaaattcatcaattctgaaattgaaaaggtcatcagattccaagaagaaattggtttggatgtcttagtccacggtgaaccagaaagaaacgatatggttcaatacttcggtgaacaaatcaacggttatgctttcactgttaacggttgggttcaatcttacggttccagatatgtcagaccaccaattattgttggtgacttgtccagaccaaaggctatgtccgtcaaggaatctgtttacgctcaatccatcacttctaagccagtaaagggtatgttgactggtccaattacctgtttgagatggtctttcccaagagacgatgtcgaccaaaaaactcaagctatgcaattagctttggctttgagagatgaagtcaatgatttggaagctgccggtatcaaggttatccaagttgatgaaccagctttaagagaaggtttaccattgagagaaggtactgagagatctgcttactacacctgggctgccgaagctttcagagttgctacttctggtgttgctaacaagactcaaatacactctcatttctgttactctgacttggatccaaaccatatcaaggctttggatgctgatgttgtttccatcgaattctctaagaaggacgatgctaactacattgctgaattcaaaaactatccaaaccacattggtctaggtttattcgatattcattctccaagaattccatcaaaggatgaatttatcgccaagatttcaaccatcttgaagagctacccagctgaaaagttctgggttaacccagattgtggtttgaagactagaggctgggaagaaactagattgtctttgactcatatggtcgaagccgccaagtacttccgtgaacaatacaagaattaa

SEQ ID NO: 1329 - DNA, 618 bp, Saccharomyces cerevisiae
atgtcggatccaagttctattaacggtggtatcgtcgttgcgatgacaggtaaagactgtgtggccattgcctgtgatttgcgtctcggaagccagtcactaggtgtgtcgaacaagtttgaaaaaatcttccactatgggcatgtgttcttagggattaccggtctggctaccgacgtgactactctgaacgagatgttccgctacaagacgaacctatataagttgaaggaagaaagggccattgagcctgaaacgtttacccaattagtgtcaagttcactttatgaaagaagattcggtccatactttgtggggccggtggtagcaggtattaattccaagtccgggaagccctttattgcgggattcgacctaatcggctgtatcgacgaggccaaggattttatcgttagcggtactgcatccgaccaactgttcggtatgtgtgagtccctgtacgaacctaatctagagccagaagatcttttcgaaactataagtcaggccctactgaatgctgctgaccgtgacgctctatcaggctggggagctgtagtatacatcatcaagaaggatgaagtggtgaagagatacttgaagatgagacaagattga

SEQ ID NO: 1330 - DNA, 804 bp, Saccharomyces cerevisiae
atgtcaaccagtcgtgaagattctgtgtacctagccaagttggctgaacaggccgaacgttatgaagaaatggtcgaaaacatgaagactgttgcctcctctggccaagagttgtcggtcgaagagcgtaatttgttgtctgttgcttataagaacgttattggtgctcgtcgtgcctcttggagaattgtttcttctattgagcaaaaggaggagtccaaggagaagtccgaacaccaggtcgagttgatttgttcgtaccgttcgaagattgagaccgaactaactaagatctccgacgatattttgtccgtgctagactcccacttaattccatcagccaccactggcgagtccaaggttttctactataagatgaagggtgactaccaccgttatttggctgaattttctagtggcgatgctagagaaaaggccacaaacgcctctttagaagcatacaagaccgcttctgaaattgccaccacagagttacccccaactcacccaatccgtctaggtttggctcttaacttctctgtcttctattatgaaattcaaaactctccagacaaagcctgccatttggccaagcaagcttttgacgacgctattgctgagttggacactctgtctgaagaatcatacaaagatagcacacttatcatgcaactgctaagggacaatttaaccttatggacttcagacatgtccgagtccggtcaagctgaagaccaacaacaacaacaacaacatcagcaacagcagccacctgctgccgccgaaggtgaagcaccaaagtaa

SEQ ID NO: 1331 - DNA, 330 bp, Saccharomyces cerevisiae
atgtctgacgcaggtagaaaaggattcggtgaaaaagcttctgaagctttgaagccagactctcaaaagtcatacgctgaacaaggtaaggaatacatcactgacaaggccgacaaggtcgctggtaaggttcaaccagaagacaacaagggtgtcttccaaggtgtccacgactctgccgaaaaaggcaaggataacgctgaaggtcaaggtgaatctttggcagaccaagctagagattacatgggagccgccaagtccaagttgaacgatgccgtcgaatatgtttccggtcgtgtccacggtgaagaagacccaaccaagaagtaa

SEQ ID NO: 1332 - DNA, 621 bp, Saccharomyces cerevisiae
atgaatagcgagtacgattacctgttcaaactgctgttgatcgggaattccggtgtcgggaagtcctgtttacttttgaggttttcggacgacacatataccaacgactacatctccacaattggagtggacttcaagattaagactgtagaactggacggcaagactgtaaagctacagatttgggacactgcaggtcaagaacgtttccgtactatcacttcatcttactaccgtggttcgcatgggatcattatcgtgtatgatgtcactgaccaagaatccttcaacggcgtgaagatgtggctgcaagagattgatcggtatgcaacctcaacagtgttgaagctattggtaggtaacaagtgtgatttaaaggacaagcgtgtcgtggaatatgacgtggcaaaggaatttgcggacgcgaataagatgccgttcttagagactagtgctttggactccaccaacgtcgaggatgcgtttttaaccatggctagacaaatcaaggaaagtatgtcccaacaaaacctgaacgaaaccactcagaagaaggaagacaaagggaacgtcaacctgaagggacagagtttaaccaacaccggtgggggctgctgttga

SEQ ID NO: 1333 - DNA, 1128 bp, Saccharomyces cerevisiae
atggattctgaggttgctgctttggttattgataacggttctggtatgtgtaaagccggttttgccggtgacgacgctcctcgtgctgtcttcccatctatcgtcggtagaccaagacaccaaggtatcatggtcggtatgggtcaaaaagactcctacgttggtgatgaagctcaatccaagagaggtatcttgactttacgttacccaattgaacacggtattgtcaccaactgggacgatatggaaaagatctggcatcataccttctacaacgaattgagagttgccccagaagaacaccctgttcttttgactgaagctccaatgaaccctaaatcaaacagagaaaagatgactcaaattatgtttgaaactttcaacgttccagccttctacgtttccatccaagccgttttgtccttgtactcttccggtagaactactggtattgttttggattccggtgatggtgttactcacgtcgttccaatttacgctggtttctctctacctcacgccattttgagaatcgatttggccggtagagatttgactgactacttgatgaagatcttgagtgaacgtggttactctttctccaccactgctgaaagagaaattgtccgtgacatcaaggaaaaactatgttacgtcgccttggacttcgaacaagaaatgcaaaccgctgctcaatcttcttcaattgaaaaatcctacgaacttccagatggtcaagtcatcactattggtaacgaaagattcagagccccagaagctttgttccatccttctgttttgggtttggaatctgccggtattgaccaaactacttacaactccatcatgaagtgtgatgtcgatgtccgtaaggaattatacggtaacatcgttatgtccggtggtaccaccatgttcccaggtattgccgaaagaatgcaaaaggaaatcaccgctttggctccatcttccatgaaggtcaagatcattgctcctccagaaagaaagtactccgtctggattggtggttctatcttggcttctttgactaccttccaacaaatgtggatctcaaaacaagaatacgacgaaagtggtccatctatcgttcaccacaagtgtttctaa

SEQ ID NO: 1334 - DNA, 765 bp, Saccharomyces cerevisiae
atgagtatcgctgaattcgcttacaaggaaaaaccagaaactttggttttattcgatgttgatggtaccttgacaccagccagattaactgtttctgaagaagttagaaaaactttggccaagttgagaaacaagtgctgcattggttttgtcggtggttctgacttaagcaagcaattagaacagttaggcccaaacgttttagatgaatttgactattctttctctgaaaatggtttgaccgcctacagattaggtaaggaattagcttctcaatccttcatcaactggctcggtgaggaaaaatacaataaattggccgtcttcattttgagatatctatctgaaattgacttgccaaagagaagaggtactttcttggaatttagaaatggtatgatcaacgtttccccaattggtagaaatgcttctactgaggaaagaaacgaattcgaaagatacgataaggaacaccaaatcagagccaagttcgttgaagctttgaaaaaggaattcccagactacggtttgactttctccattggtggccaaatctctttcgacgttttccccgctggttgggataagacctactgtttgcaacacgttgaaaaagatggtttcaaggaaattcatttctttggtgacaagactatggtcggtggtaacgattacgaaatttttgtcgatgaaagaaccatcggacattcagtacaatcccctgatgacaccgtcaaaattttgactgaactattcaacttatag

SEQ ID NO: 1335 - DNA, 765 bp, Saccharomyces cerevisiae
atgggtagagttattcgtaaccaaagaaagggtgctggttctatctttacctcccacaccagattgagacaaggtgctgccaagttgagaactttggattatgctgaacgtcacggttacattcgtggtatcgttaagcaaattgtccacgactccggtagaggtgccccattggccaaggttgtcttccgtgacccatacaagtacagattgcgtgaagaaatctttattgctaacgaaggtgtccacactggtcaattcatttacgccggtaagaaggcttctttgaacgtcggtaacgtcttgccattgggttctgtcccagaaggtaccattgtctccaacgttgaagaaaagccaggtgacagaggtgccctagccagagcttccggtaactacgttattatcatcggtcacaacccagacgaaaacaagactagagtcagattaccatccggtgccaagaaggttatctcttctgatgccagaggtgtcatcggtgtcattgccggtggtggtagagttgacaaaccattgttgaaggctggtcgtgctttccacaagtacagattgaagagaaactcttggccaaagacccgtggtgttgccatgaatccagttgatcaccctcacggtggtggtaaccatcaacatattggtaaggcttctaccatctctagaggtgctgtttctggtcaaaaggccggtttgattgccgccagaagaactggtttgttacgtggttctcaaaagacccaagattag

SEQ ID NO: 1336 - DNA, 180 bp, Saccharomyces cerevisiae
atggctaagtctaagaaccataccgctcacaaccaaaccagaaaggctcacagaaacggtatcaagaagccaaagacctacaagtacccttctttgaaaggtgttgatccaaagtttagaagaaaccacaagcatgccctacacggcactgctaaggctttggctgctgccaagaaataa

SEQ ID NO: 1337 - DNA, 1458 bp, Saccharomyces cerevisiae
atggttcatttaggtccaaagaaaccacaggctagaaagggttccatggctgatgtgcccaaggaattgatggatgaaattcatcagttggaagatatgtttacagttgacagcgagaccttgagaaaggttgttaagcactttatcgacgaattgaataaaggtttgacaaagaagggaggtaacattccaatgattcccggttgggtcatggaattcccaacaggtaaagaatctggtaactatttggccattgatttgggtggtactaacttaagagtcgtgttggtcaagttgagcggtaaccatacctttgacaccactcaatccaagtataaactaccacatgacatgagaaccactaagcaccaagaggagttatggtcctttattgccgactctttgaaggactttatggtcgagcaagaattgctaaacaccaaggacaccttaccattaggtttcaccttctcgtacccagcttcccaaaacaagattaacgaaggtattttgcaaagatggaccaagggtttcgatattccaaatgtcgaaggccacgatgtcgtcccattgctacaaaacgaaatttccaagagagagttgcctattgaaattgtagcattgattaatgatactgttggtactttaattgcctcatactacactgacccagagactaagatgggtgtgattttcggtactggtgtcaacggtgctttctatgatgttgtttccgatatcgaaaagttggagggcaaattagcagacgatattccaagtaactctccaatggctatcaattgtgaatatggttccttcgataatgaacatttggtcttgccaagaaccaagtacgatgttgctgtcgacgaacaatctccaagacctggtcaacaagcttttgaaaagatgacctccggttactacttgggtgaattgttgcgtctagtgttacttgaattaaacgagaagggcttgatgttgaaggatcaagatctaagcaagttgaaacaaccatacatcatggatacctcctacccagcaagaatcgaggatgatccatttgaaaacttggaagatactgatgacatcttccaaaaggactttggtgtcaagaccactctgccagaacgtaagttgattagaagactttgtgaattgatcggtaccagagctgctagattagctgtttgtggtattgccgctatttgccaaaagagaggttacaagactggtcacattgccgctgacggttctgtctataacaaatacccaggtttcaaggaagccgccgctaagggtttgagagatatctatggatggactggtgacgcaagcaaagatccaattacgattgttccagctgaggatggttcaggtgcaggtgctgctgttattgctgcattgtccgaaaaaagaattgccgaaggtaagtctcttggtatcattggcgcttaa

SEQ ID NO: 1338 - DNA, 2757 bp, Saccharomyces cerevisiae
atgactgatacatcatcctcttcatcatcctcttcagcatcttctgtttcagctcatcagccaactcaagaaaagcctgctaagacttacgatgacgctgcatctgaatcttctgacgatgacgatatcgatgctttaatcgaagaactacaatctaatcacggtgtcgacgacgaagacagtgataacgatggtccagttgccgccggtgaagctagaccagttccagaagaatatttacaaactgacccatcttacggtttaacttccgatgaagttttgaaaagaagaaagaagtacggtttgaatcaaatggctgacgaaaaagaatctttagtcgttaagttcgttatgtttttcgtcggtccaattcaattcgttatggaagccgctgctattttggctgccggtttgtccgattgggtcgatttcggtgttatctgtggtttgttaatgttaaacgctggtgttggtttcgttcaagaattccaagctggttctattgtcgatgaattgaaaaagactttggctaacactgctgttgttatcagagacggtcaattggttgaaattccagccaacgaagtcgtcccaggtgatattttgcaattggaagatggtactgttatcccaactgatggtcgtattgtcactgaagactgtttcttgcaaatcgatcaatctgctattactggtgaatctttggctgtcgacaaacattacggtgaccaaactttctcttcttccactgttaagagaggtgaaggtttcatggttgttaccgctaccggtgacaacactttcgttggtagagctgctgctttggttaacaaagccgctggtggtcaaggtcatttcactgaagttttgaacggtattggtattatcttattggttttggtcattgccactttgttgttggtctggactgcttgtttctacagaaccaacggtattgttagaatcttgagatacactctaggtattactattattggtgtcccagtcggtttgccagctgtcgttaccaccactatggccgtcggtgctgcttacttggctaagaaacaagccattgttcaaaagttgtctgctattgaatccttggctggtgtcgaaatcttgtgttccgacaaaaccggtactttgaccaagaacaagttgtccttgcacgaaccatacactgttgaaggtgtttctccagacgacttgatgttgactgcttgtttggctgcttccagaaagaagaagggtttggatgctattgataaggctttcttgaagtctttgaagcaatatccaaaggctaaggacgctttgaccaagtacaaggttttggaattccatccatttgaccctgtctccaagaaggttactgccgttgtcgaatctccagaaggtgaaagaattgtttgtgttaagggtgctccattattcgtcttgaagactgtcgaagaagatcacccaatcccagaagatgtccatgaaaactacgaaaacaaggttgctgaattggcttctagagggttccgtgctttaggtgttgctagaaagagaggtgaaggtcactgggaaatcttgggtgttatgccatgtatggatccaccaagagacgatactgctcaaactgttagcgaagctagacacttgggtctaagagttaagatgttaactggtgatgctgttggtattgctaaggaaacttgtagacaattgggtttgggtaccaacatttacaacgctgaaagattaggtctaggtggcggtggtgacatgccaggttctgaattagctgattttgttgaaaatgccgatggtttcgctgaagttttcccacaacataaatacagagttgttgaaatcttgcaaaacagaggttacttggttgctatgactggtgatggtgttaacgatgctccatctttgaagaaggctgatactggtattgctgtcgaaggtgctactgatgctgccagatctgctgctgatattgttttcttggctcctggtctatctgctattattgatgctttgaagacctccagacaaatttttcacagaatgtactcttacgttgtttaccgtattgctttgtctctacatttggaaatcttcttgggtctatggattgctattttggataactctttggacattgatttgattgttttcatcgctattttcgctgatgttgctactttggctattgcttacgataatgctccttactctccaaagcccgttaaatggaacctaccaagattatggggtatgtctattattttgggcatagttttagctataggttcttggattaccttgactactatgttcttaccaaagggtggtattatccaaaacttcggtgctatgaacggtattatgttcttgcaaatttccttgactgaaaactggttgattttcattaccagagctgctggtccattctggtcttctatcccatcctggcaattggctggtgccgtcttcgctgtcgacatcatcgctaccatgtttaccttattcggttggtggtctgaaaactggactgatattgttactgtcgtccgtgtctggatctggtctatcggtatcttctgtgttttgggtggtttctactacgaaatgtccacttctgaagcctttgacagattgatgaacggtaagccaatgaaggaaaagaagtctaccagaagtgtcgaagacttcatggctgctatgcaaagagtctctactcaacacgaaaaggaaacctaa

SEQ ID NO: 1339 - DNA, 318 bp, Saccharomyces cerevisiae
atggccccagttaaatcccaagaatctatcaaccaaaagttggctttggttatcaagtctggtaagtacaccttaggttacaagtccactgtcaagtctttgagacaaggtaagtctaagttgatcatcattgccgctaacactccagttttgagaaagtccgaattggaatattacgctatgttgtccaagactaaggtctactacttccaaggtggtaacaacgaattgggtactgctgtcggtaagttattcagagtcggtgttgtctctattttggaagctggtgactctgatatcttgaccaccttggcttaa

SEQ ID NO: 1340 - DNA, 468 bp, Saccharomyces cerevisiae
atgaaggttgaaatcgattctttttcaggtgccaaaatctacccaggcagaggtaccttgtttgtccgtggtgactccaaaatcttcagattccaaaactccaaatctgcctctttgttcaagcaaagaaagaacccaagaagaatcgcttggactgtcttattcagaaagcatcacaagaagggtatcaccgaagaagttgctaagaagagatctagaaaaaccgttaaggcccaaagaccaattaccggtgcttctttggacttgatcaaggaaagaagatctttgaagccagaagttagaaaggctaacagagaagaaaaattgaaggccaacaaagaaaagaagaaggctgaaaaggctgctagaaaggctgaaaaggctaagtctgctggtactcaaagttctaagttctccaagcaacaagctaagggtgctttccaaaaggttgctgctacttctcgttaa

SEQ ID NO: 1341 - DNA, 651 bp, Saccharomyces cerevisiae
atgaagactttaattgttgttgatatgcaaaatgattttatttcacctttaggttccttgactgttccaaaaggtgaggaattaatcaatcctatctcggatttgatgcaagatgctgatagagactggcacaggattgtggtcaccagagattggcacccttccagacatatttcgttcgcaaagaaccataaagataaagaaccctattcaacatacacctaccactctccaaggccaggcgatgattccacgcaagagggtattttgtggcccgtacactgtgtgaaaaacacctggggtagtcaattggttgaccaaataatggaccaagtggtcactaagcatattaagattgtcgacaagggtttcttgactgaccgtgaatactactccgccttccacgacatctggaacttccataagaccgacatgaacaagtacttagaaaagcatcatacagacgaggtttacattgtcggtgtagctttggagtattgtgtcaaagccaccgccatttccgctgcagaactaggttataagaccactgtcctgctggattacacaagacccatcagcgatgatcccgaagtcatcaataaggttaaggaagagttgaaggcccacaacatcaatgtcgtggataaataa

SEQ ID NO: 1342 - DNA, 1533 bp, Saccharomyces cerevisiae
atgccaacttctggaactactattgaattgattgacgaccaatttccaaaggatgactctgccagcagtggcattgtcgacgaagtcgacttaacggaagctaatattttggctactggtttgaataagaaagcaccaagaattgtcaacggttttggttctttaatgggctccaaggaaatggtttccgtggaattcgacaagaagggaaacgaaaagaagtccaatttggatcgtctgctagaaaaggacaaccaagaaaaagaagaagctaaaactaaaattcacatctccgaacaaccatggactttgaataactggcaccaacatttgaactggttgaacatggttcttgtttgtggtatgccaatgattggttggtactttgctctctctggtaaagtgcctttgcatttaaacgttttccttttctccgttttctactacgctgtcggtggtgtttctattactgccggttaccatagattatggtctcacagatcttactccgctcactggccattgagattattctacgctatcttcggttgtgcttccgttgaagggtccgctaaatggtggggccactctcacagaattcaccatcgttacactgataccttgagagatccttatgacgctcgtagaggtctatggtactcccacatgggatggatgcttttgaagccaaatccaaaatacaaggctagagctgatattaccgatatgactgatgattggaccattagattccaacacagacactacatcttgttgatgttgttaaccgctttcgtcattccaactcttatctgtggttactttttcaacgactatatgggtggtttgatctatgccggttttattcgtgtctttgtcattcaacaagctaccttttgcattaactccttggctcattacatcggtacccaaccattcgatgacagaagaacccctcgtgacaactggattactgccattgttactttcggtgaaggttaccataacttccaccacgaattcccaactgattacagaaacgctattaagtggtaccaatacgacccaactaaggttatcatctatttgacttctttagttggtctagcatacgacttgaagaaattctctcaaaatgctattgaagaagccttgattcaacaagaacaaaagaagatcaataaaaagaaggctaagattaactggggtccagttttgactgatttgccaatgtgggacaaacaaaccttcttggctaagtctaaggaaaacaagggtttggttatcatttctggtattgttcacgacgtatctggttatatctctgaacatccaggtggtgaaactttaattaaaactgcattaggtaaggacgctaccaaggctttcagtggtggtgtctaccgtcactcaaatgccgctcaaaatgtcttggctgatatgagagtggctgttatcaaggaaagtaagaactctgctattagaatggctagtaagagaggtgaaatctacgaaactggtaagttcttttaa

SEQ ID NO: 1343 - DNA, 735 bp, Saccharomyces cerevisiae
atggccgctgaaaaaatcttgaccccagaatctcagttgaagaagtctaaggctcaacaaaagactgctgaacaagtcgctgctgaaagagctgctcgtaaggctgctaacaaggaaaagagagccattattttggaaagaaacgccgcttaccaaaaggaatacgaaactgctgaaagaaacatcattcaagctaagcgtgatgccaaggctgctggttcctactacgtcgaagctcaacacaagttggtcttcgttgtcagaatcaagggtattaacaagatcccacctaagccaagaaaggttctacaattgctaagattgacaagaatcaactctggtacattcgtcaaagttaccaaggctactttggaactattgaagttgattgaaccatacgttgcttacggttacccatcgtactctactattagacaattggtctacaagagaggtttcggtaagatcaacaagcaaagagttccattgtccgacaatgctatcatcgaagccaacttgggtaagtatggtatcttgtccattgacgatttgattcacgaaatcatcactgttggtccacacttcaagcaagctaacaactttttgtggccattcaagttgtccaacccatctggtggttggggtgtcccaagaaagttcaagcactttatccaaggtggttctttcggtaaccgtgaagaattcatcaacaaattggttaagtccatgaactaa

SEQ ID NO: 1344 - DNA, 450 bp, Saccharomyces cerevisiae
atgccttccagattcactaagactagaaagcacagaggtcacgtctcagccggtaaaggtcgtatcggtaagcacagaaagcaccccggtggtagaggtatggccggtggtcaacatcaccacagaattaacatggataaataccatccaggttatttcggtaaggttggtatgagatacttccacaagcaacaagctcatttctggaagccagtcttgaacttggacaaattgtggacattgatcccagaagacaagagagaccaatacttgaaatctgcttctaaggaaactgctccagttattgacactttggcagccggttacggtaagatcttgggtaagggtagaattccaaatgttccagttatcgtcaaagctagattcgtctccaagttggctgaagaaaaaatcagagctgctggtggtgttgttgaattgatcgcttaa

SEQ ID NO: 1345 - DNA, 765 bp, Saccharomyces cerevisiae
atgtctgctccagaagctcaacaacaaaagagaggtggtttcggtggccgtaacagaggccgtccaaacagaagaggaccaagaaacactgaagaaaagggatgggttccagttaccaaactaggtagattagtcaaggctggtaagattaccaccattgaagaaatcttcttgcactctttgccagtcaaggaattccaaatcattgacactttgttgccaggtttgcaagacgaagtcatgaacatcaagccagttcaaaagcaaaccagagccggtcaaagaaccagatttaaggctgttgtcgttgttggtgactctaacggtcacgttggtttgggtatcaagaccgccaaggaagttgctggtgccatcagagctggtatcattattgccaagttgtccgttatcccaatcagaagaggttactggggtaccaacttgggtcaaccacattctttggccaccaagaccactggtaagtgtggttccgtcactgttagattgatcccagccccaagaggttctggtatcgtcgcttctccagctgtcaaaaagttgttgcaattggctggtgttgaagatgtctacacccaatctaacggtaagactagaactttggaaaacaccttgaaggctgctttcgttgctattggtaacacatacggtttcttgactccaaacttgtgggccgaacaaccattgccagtttctccattggacatctactccgatgaagcttctgctcaaaagaagagattctaa

SEQ ID NO: 1346 - DNA, 1131 bp, Saccharomyces cerevisiae
atgtcaacgtttgggaaactgttccgcgtcaccacatatggtgaatcgcattgtaagtctgtcggttgcattgtcgacggtgttcctccaggaatgtcattaaccgaagctgacattcagccacaattgaccagaagaagaccgggtcaatctaagctatcgacccctagagacgaaaaggatagagtggaaatccagtccggtaccgagttcggcaagactctaggtacacccatcgccatgatgatcaaaaacgaggaccaaagacctcacgactactccgacatggacaagttccctagaccttcccatgcggacttcacgtactcggaaaagtacggtatcaaggcctcctctggtggtggcagagcttctgctagagaaacgattggccgtgtcgcttcaggtgccattgctgagaagttcttagctcagaactctaatgtcgagatcgtagcctttgtgacacaaatcggggaaatcaagatgaacagagactctttcgatcctgaatttcagcatctgttgaacaccatcaccagggaaaaagtggactcaatgggtcctatcagatgtccagacgcctccgttgctggtttgatggtcaaggaaatcgaaaagtacagaggcaacaaggactctatcggtggtgtcgtcacttgtgtcgtgagaaacttgcctaccggtctcggtgagccatgctttgacaagttggaagccatgttggctcatgctatgttgtccattccagcatccaagggtttcgaaattggctcaggttttcagggtgtctctgttccagggtccaagcacaatgacccattttactttgaaaaagaaacaaacagattaagaacaaagaccaacaattcaggtggtgtacaaggtggtatctctaatggtgagaacatctatttctctgtcccattcaagtcagtggccactatctctcaagaacaaaaaaccgccacttacgatggtgaagaaggtatcttagccgctaagggtagacatgaccctgctgtcactccaagagctattcctattgtggaagccatgaccgctctggtgttggctgacgcgcttttgatccaaaaggcaagagatttctccagatccgtggttcattaa

SEQ ID NO: 1347 - DNA, 360 bp, Saccharomyces cerevisiae
atgccaaagaagagagcttccaacggtagaaacaagaaaggtagaggtcacgtcaaaccagtcagatgtgtcaactgttccaagtctattccaaaggataaggctatcaagagaatggctatcagaaacattgttgaagccgctgccgtcagagatttgtccgaagcttctgtctaccctgaatacgctttgccaaagacttacaacaagttacactactgtgtttcttgtgctattcacgccagaattgtcagagtcagatccagagaagacagaaagaacagagctccacctcaaagaccaagattcaacagagaaaacaaggtttcccctgctgatgccgccaagaaggctttataa

SEQ ID NO: 1348 - DNA, 612 bp, Saccharomyces cerevisiae
atggcctcatttgctactaagtttgtcattgcttgcttcctgttcttctcggcgtccgcccataatgtccttcttccagcttatggccgtagatgcttcttcgaagacttgagtaagggtgacgagctctccatttcgttccagttcggtgatagaaaccctcaatccagtagccagctgactggtgactttatcatctacgggccggaaagacatgaagttttgaaaacggttagggacacgtcgcacggtgaaatcacattgtctgctccatacaagggacatttccaatactgtttcttgaacgagaacaccggtatcgagacaaaagacgtgactttcaacattcatggggtggtatatgtggatttggacgacccaaacaccaatacattggatagtgctgtcagaaagttgtccaaattaaccagggaagtcaaggacgaacaaagttatattgttattagagaaaggacgcatagaaatactgcagagtcgaccaacgatcgtgttaaatggtggtccatcttccaattgggcgtcgttattgcaaactctcttttccagatatactacttgagaagattctttgaggtcacatctctagtctaa

SEQ ID NO: 1349 - DNA, 264 bp, Saccharomyces cerevisiae
atggtttcccaattattcgaagaaaaagctaaagccgtcaacgagctaccaacgaagccctccactgatgaattattagaattgtatgctctgtacaagcaagccactgtaggtgacaacgacaaggaaaagcctggtattttcaacatgaaggaccgctacaagtgggaagcctgggaaaacttaaaaggtaaatcccaggaagatgccgaaaaggaatacattgcccttgttgatcaactgattgccaagtactcctcttag

SEQ ID NO: 1350 - DNA, 930 bp, Saccharomyces cerevisiae
atgtctgccgttttcaacaacgctaccctttcaggtctagtccaagcaagcacctactcacaaactttgcaaaatgtcgcccattaccaacctcaattgaatttcatggagaaatactgggccgcatggtacagttacatgaacaatgatgttttggccaccggtctaatgttctttttattgcatgaatttatgtatttctttagatgtttgccatggttcatcatcgaccaaattccatactttagaagatggaagttacaaccaactaagattccaagtgctaaggaacaactatactgtttgaaatccgttcttctatctcatttcttggtcgaggccatccctatctggaccttccacccaatgtgtgaaaaattaggtattactgtcgaagttccattcccatctttgaaaacaatggctctagaaattggtctattcttcgtcttggaagatacatggcattactgggctcaccgtctattccactacggtgtcttctacaagtacattcacaagcaacatcacagatacgctgctccattcggtctttctgctgaatatgctcatcctgctgaaactttgtctttgggttttggtaccgttggtatgccaattctttacgtcatgtacactggtaaattacacttgttcactctatgtgtatggatcaccctaagattattccaagctgttgactctcattctggttatgacttcccatggtctttgaacaagatcatgccattctgggctggcgctgaacaccacgatttgcatcatcactactttattggtaactacgcttcctctttcagatggtgggattactgtctagacactgaatctggtccagaagctaaggcctccagagaagaaagaatgaagaagagagctgaaaacaatgctcaaaagaagactaactaa

SEQ ID NO: 1351 - DNA, 525 bp, Saccharomyces cerevisiae
atgtctactaaagcccaaaaccctatgcgtgatttgaagatcgagaaattggtcttgaacatctccgttggtgaatctggtgacagattaaccagagcctccaaggttttagaacaattatctggtcaaactccagttcaatccaaggccagatacactgtcagaactttcggtatcagaagaaacgaaaaaattgctgttcacgttaccgtcagaggtccaaaggctgaagaaattttggaaagaggtttgaaggtcaaggaataccaattgagagacagaaacttctctgctaccggtaacttcggtttcggtattgacgaacacattgacttgggtatcaagtatgacccatccatcggtattttcggtatggatttctatgtcgtcatgaacagaccaggtgctagagtcactagaagaaagagatgtaagggtactgttggtaactcccacaagacaactaaggaagacaccgtctcttggttcaagcaaaagtacgacgctgatgtgctcgataaataa

SEQ ID NO: 1352 - DNA, 438 bp, Saccharomyces cerevisiae
atgggtaaaggtaagccaagaggtttgaactctgctagaaagctacgtgtccacagaagaaacaaccgttgggccgaaaacaactacaagaagagattgttgggtactgccttcaagtcttctccattcggtggttcttctcatgccaagggtatcgtcttggaaaaattgggtatcgaatccaagcaacctaactctgctatcagaaagtgtgttagagttcaattaatcaagaacggtaagaaggtcactgctttcgttccaaacgatggttgtttgaactttgtcgacgaaaatgatgaagtcttgctagcaggtttcggtagaaagggtaaagctaagggtgatattccaggtgttagattcaaggtcgttaaggtctctggtgtctccttgttggctttgtggaaagaaaagaaggaaaagccaagatcataa

SEQ ID NO: 1353 - DNA, 468 bp, Saccharomyces cerevisiae
atgaaggttgaagttgattccttttccggcgctaagatctacccaggtagaggtactttatttgtccgtggtgactccaaaattttcagattccaaaactccaaatctgcttctttgttcaaacaaagaaagaacccaagaagaatcgcttggaccgtcttgttcagaaagcatcacaagaagggtatcaccgaagaagttgctaagaagagatctagaaagaccgttaaggcgcaaagaccaatcactggtgcttctttggacttgatcaaggaaagaagatctttgaagccagaagttagaaaagctaacagagaagaaaaattgaaagccaacaaggaaaagaagagagctgaaaaggctgctagaaaggctgaaaaggctaagtccgctggtgtccaaggttccaaggtttccaagcaacaagctaagggtgctttccaaaaggttgccgccacttcccgttaa

SEQ ID NO: 1354 - DNA, 1038 bp, Saccharomyces cerevisiae
atggaagcacataaccaatttttgaagactttccaaaaagaacgtcatgatatgaaagaagctgaaaaggatgaaatccttttgatggaaaacagccgtagattcgtgatgttccctatcaaataccacgaaatctgggctgcttacaagaaggttgaagcctctttctggactgcggaagaaatcgaattggctaaggacactgaagatttccaaaaattgactgatgaccagaagacctacatcggtaacttgttagccttgtccatttcttctgacaaccttgtcaacaagtacttgatcgaaaacttttctgcccaattgcaaaaccctgaaggtaagagtttctacgggttccagattatgatggaaaacatctactctgaagtttactccatgatggttgatgccttcttcaaggaccctaagaacatccctctattcaaggaaattgccaatttgcctgaagtcaagcataaggctgctttcatcgagagatggatttccaacgatgacagcttgtatgctgaaagactagtagcatttgctgcaaaggaaggtattttccaagctggtaactatgcttctatgttctggttgactgacaaaaagattatgccaggtttagcaatggccaacagaaacatctgtagagacagaggtgcctacactgacttttcatgcttgctatttgcccatttgagaaccaagccaaaccccaagatcattgaaaaaatcattaccgaagccgtggaaattgaaaaggaatactactcaaactctttgccagtagaaaaatttggtatggatttgaagagcattcacacctacatagaatttgtcgctgacggtctattacaaggtttcggtaacgaaaaatactacaacgccgtcaacccattcgaattcatggaggatgtcgctaccgctggtaagaccaccttctttgaaaagaaggtttccgactaccaaaaggccagtgacatgtctaagtccgctaccccatccaaggaaattaactttgatgatgacttctaa

SEQ ID NO: 1355 - DNA, 201 bp, Saccharomyces cerevisiae
atgtctttttcatcactatataaaacctttttcaaacgaaacgctgtttttgttggtactatctttgcaggtgcctttgttttccaaactgtatttgatactgctattacttcatggtacgagaatcacaacaaaggaaaattatggaaagatgtcaaggctcgaatagctgcaggcgatggagacgacgatgatgagtaa

SEQ ID NO: 1356 - DNA, 999 bp, Saccharomyces cerevisiae
atggttagagttgctattaacggtttcggtagaatcggtagattggtcatgagaattgctttgtctagaccaaacgtcgaagttgttgctttgaacgacccattcatcaccaacgactacgctgcttacatgttcaagtacgactccactcacggtagatacgctggtgaagtttcccacgatgacaagcacatcattgtcgatggtaagaagattgctacttaccaagaaagagacccagctaacttgccatggggttcttccaacgttgacatcgccattgactccactggtgttttcaaggaattagacactgctcaaaagcacattgacgctggtgccaagaaggttgttatcactgctccatcttccaccgccccaatgttcgtcatgggtgttaacgaagaaaaatacacttctgacttgaagattgtttccaacgcttcttgtaccaccaactgtttggctccattggccaaggttatcaacgatgctttcggtattgaagaaggtttgatgaccactgtccactctttgactgctactcaaaagactgttgacggtccatcccacaaggactggagaggtggtagaaccgcttccggtaacatcatcccatcctccaccggtgctgctaaggctgtcggtaaggtcttgccagaattgcaaggtaagttgaccggtatggctttcagagtcccaaccgtcgatgtctccgttgttgacttgactgtcaagttgaacaaggaaaccacctacgatgaaatcaagaaggttgttaaggctgccgctgaaggtaagttgaagggtgttttgggttacaccgaagacgctgttgtctcctctgacttcttgggtgactctcactcttccatcttcgatgcttccgctggtatccaattgtctccaaagttcgtcaagttggtctcctggtacgacaacgaatacggttactctaccagagttgtcgacttggttgaacacgttgccaaggcttaa

SEQ ID NO: 1357 - DNA, 2841 bp, Saccharomyces cerevisiae
atggctggtcaagtgttggacggcaaagcatgcgctcagcagtttagaagcaatattgctaatgaaatcaaaagcattcaaggtcacgtgcctgggtttgcacctaaccttgccatcattcaagtaggcaacagaccagactcagccacatatgtacgcatgaagcgtaaggcagctgaagaggccggcattgttgctaatttcattcatttagatgaatccgctactgaatttgaagttctgcgttacgtggaccagctgaatgaggacccacatacacacggtattatcgtgcaactaccattacccgctcatttggacgaggatagaatcacctcgagagtgttggcagaaaaggacgtggacgggttcgggcccaccaacattggcgaattgaataagaagaacggacacccattctttttgccctgcacgcccaaggggatcattgagctgcttcacaaggccaacgtcacgattgaaggttcccggtccgttgtgatcggaagatctgacattgttggctctcctgttgcagaattgttaaaatctctaaactccaccgtcaccatcactcattctaaaacccgtgatatcgcatcatacttacacgacgcggacatcgtagtcgttgccatcggccaaccagaatttgtgaagggtgaatggttcaaaccaagagacggcacttccagtgataagaaaaccgtggtaattgatgttggcaccaactacgttgctgatccttccaaaaagtccggtttcaaatgtgttggtgacgttgagttcaatgaagcaatcaaatacgtccatctaatcactccagtgcccggtggtgtgggccccatgacggtggctatgttaatgcaaaataccttgattgctgccaaacgccaaatggaagaatcctcgaagcctttgcagattcctcccttgccattgaagttgctaacacctgttccttccgatatagacatctccagagcacaacagccaaagcttatcaaccagcttgctcaagaattgggtatttactctcatgagttggagctgtacggacattacaaggccaaaatttctcctaaagtcatcgaaaggctgcagacgcgccaaaatggtaagtacatcttggtgtctggtatcacaccaacaccactgggagagggtaaatccactacaacaatgggtcttgtccaggcactaacggctcacttgggcaagccagccattgcgaacgtcagacaaccctccctaggacccactttaggtgtcaaaggtggtgctgcgggtggtggttattcccaagtcatcccaatggacgaattcaacttacatttgactggtgacattcacgccattggtgcggctaacaacctacttgctgccgctattgacactagaatgttccatgagaccactcaaaagaacgacgctaccttctacaacagactagtgcctagaaagaacggaaagagaaagtttactccctccatgcaaagaagattgaacagactgggtattcaaaagaccaaccccgatgatctaacacccgaagagatcaacaaattcgccagattgaacattgacccggacactattactatcaagagggtggtcgatatcaacgacagaatgttaagacaaatcaccattggtcaagcccctaccgagaagaaccacacaagagttactggattcgatatcaccgttgcttctgaattgatggctattcttgctctttcaaaggacttgagggacatgaaggaacgtattggaagagtcgttgttgctgctgacgtaaacaggtctccagtcactgttgaagatgtgggttgtaccggtgccttaaccgctttattaagagacgctatcaagcccaacttgatgcaaactttagaaggtactcctgtcttggtccatgccggcccatttgccaacatctctatcggtgcctcttctgttattgctgatcgcgtggctttgaaattggttggtaccgagccagaggcaaaaacagaagctggttatgtggttactgaagcagggttcgatttcactatgggtggtgaaagattcttcaacatcaagtgccgttcctctggattgacacctaatgctgtggtcttggttgctactgttagggcattgaagtcacacggtggtgctccagatgtcaaacctggccaacctttaccttccgcatacactgaagagaatatcgagtttgtcgaaaaaggtgccgctaacatgtgtaaacaaattgccaacattaagcaatttggcgtccccgtcgttgtcgcaattaacaagtttgaaactgacactgaaggtgaaatagccgccattagaaaagccgctttggaagctggtgcatttgaagccgtaacctctaaccattgggccgaaggtggtaaaggtgctatcgacttggccaaggccgtcatcgaagcttccaaccaaccagtggacttccatttcctatatgacgttaactcctccgttgaagacaaattaactactatcgttcaaaagatgtacggtggtgccgcaatcgatatcttgcctgaagcacaacgcaagattgacatgtacaaggaacaaggtttcggtaacttgccaatttgtatcgccaagacacaatactctttatcccacgatgcaactttgaaaggtgttccaaccgggttcactttccccatcagagacgtcagattgtctaatggtgctggatacttatacgctcttgccgccgaaatacaaaccattcctggtttggctacctatgctggttacatggccgtggaagtcgatgatgacggtgagatcgatggcctgttctaa

SEQ ID NO: 1358 - DNA, 759 bp, Saccharomyces cerevisiae
atgtccttaccagctacttttgacttgactccagaagatgcccaacttttgttggctgctaacactcacttaggtgctagaaacgttcaagttcaccaagaaccatatgttttcaacgcaagaccagatggtgtccacgttatcaacgttggtaagacctgggaaaaattggttttggctgccagaatcatcgctgccattccaaacccagaagacgttgttgccatctcttccagaactttcggtcaaagggctgttttgaagttcgctgcccacaccggtgctaccccaatcgccggtagattcactccaggttctttcaccaattatatcacccgttctttcaaggaaccaagattagttattgtcaccgacccaagatcagatgctcaagccatcaaggaagcttcttacgttaacatccctgtcattgctctaactgatcttgactctccatcagaattcgtcgatgtcgctatcccatgtaacaacagaggtaagcactccattggtttaatctggtacttattggctagagaagttttgagactaagaggtgctttagttgacagaactcaaccatggtccatcatgccagatttgtacttctacagagaccctgaagaagttgaacaacaagttgctgaagaagctaccaccgaagaagctggtgaagaagaagccaaggaagaggttaccgaagagcaagctgaagctactgaatgggctgaagaaaatgctgacaacgtcgagtggtaa

SEQ ID NO: 1359 - DNA, 1314 bp, Saccharomyces cerevisiae
atggctgtctctaaagtttacgctagatccgtctacgactcccgtggtaacccaaccgtcgaagtcgaattaaccaccgaaaagggtgttttcagatccattgtcccatctggtgcttctaccggtgtccacgaagctttggaaatgagagatggtgacaaatccaagtggatgggtaagggtgttttgcacgctgttaagaacgtcaacgatgtcattgctccagctttcgttaaggctaacattgatgttaaggaccaaaaggccgtcgatgacttcttgatttctttggacggtactgccaacaaatccaagttgggtgctaacgctatcttgggtgtttctttggctgcttccagagctgccgctgctgaaaagaatgtcccattatacaagcacttggctgacttgtctaagtccaagacctctccatacgttttgccagttccattcttgaacgttttgaacggtggttcccacgctggtggtgctttggctttgcaagaatttatgattgctccaactggtgctaagaccttcgctgaagctttgagaattggttccgaagtttaccacaacttgaagtctttgaccaagaagagatacggtgcttctgccggtaacgtcggtgacgaaggtggtgttgctccaaacattcaaactgctgaagaagctttggacttgattgttgacgctatcaaggctgctggtcacgacggtaagatcaagatcggtttggactgtgcttcctctgaattcttcaaggacggtaagtacgacttggacttcaagaatccaaactctgacaaatccaagtggttgactggtcctcaattggctgacttgtaccactccttgatgaagagatacccaattgtctccatcgaagatccatttgctgaagatgactgggaagcttggtctcacttcttcaagaccgctggtattcaaattgttgctgatgacttgactgtcaccaacccaaagagaattgctaccgctatcgaaaagaaggctgccgacgctttgttgttgaaggtcaaccaaatcggtaccttgtctgaatccatcaaggctgctcaagactctttcgctgccggttggggtgttatggtttcccacagatctggtgaaactgaagacactttcattgctgacttggtcgtcggtttgagaactggtcaaatcaagactggtgctccagctagatccgaaagattggctaaattgaaccaattgttgagaatcgaagaagaattaggtgacaacgctgttttcgctggtgaaaacttccaccacggtgacaaattataa

SEQ ID NO: 1360 - DNA, 1161 bp, Saccharomyces cerevisiae
atgcgtctctctaacctaattgcttctgcctctcttttatctgctgctactcttgctgctcccgctaaccacgaacacaaggacaagcgtgctgtggtcactaccactgttcaaaaacaaaccactatcattgttaatggtgccgcttcaactccagttgctgctttggaagaaaatgctgttgtcaactccgctccagctgccgctaccagtacaacatcgtctgctgcttctgtagctaccgctgctgcttcctcttctgagaacaactcacaagtttctgctgccgcatctccagcctccagctctgctgctacatctactcaatcttcctcttcctcccaagcttcttcctctagttcttccggcgaagacgtcagcagctttgcctctggtgtcagaggtatcacttataccccatacgagtccagcggtgcttgtaaatccgcttcggaagttgcttccgatttagctcaattgactgacttcccagtcattagattgtacggtaccgactgtaaccaagttgaaaatgttttcaaggctaaggcttcgaaccaaaaagtctttttaggtatttactacgttgaccaaatccaagacggtgtcaacaccatcaagtctgctgttgaatcttacggttcttgggacgatgtcaccactgtttccattggtaacgaattggttaacggtaaccaagctaccccatcccaagtcggtcaatacattgactctggtagatctgccttgaaggctgccggttacactggtccagttgtttctgttgatacttttattgctgtgatcaacaaccctgaattgtgtgactactccgactacatggctgttaatgcccatgcttactttgacaagaacacagttgcccaagactccggtaaatggttactagaacaaatccaaagagtctggactgcttgtgatggtaagaagaatgttgttatcactgagtctggttggccatcaaagggtgagacttacggtgttgctgttccatctaaggaaaatcaaaaggacgctgtttccgccattaccagctcctgtggtgctgataccttcttattcactgccttcaacgactactggaaggccgacggtgcttacggtgttgaaaaatactggggtattctatccaatgaataa

SEQ ID NO: 1361 - DNA, 942 bp, Saccharomyces cerevisiae
atgcgtttctctactacactcgctactgcagctactgcgctatttttcacagcctcccaagtttcagctattggtgaactagcctttaacttgggtgtcaagaacaacgatggtacttgtaagtccacttccgactatgaaaccgaattacaagctttgaagagctacacttccaccgtcaaagtttacgctgcctcagattgtaacactttgcaaaacttaggtcctgctgctgaagctgagggatttactatctttgtcggtgtttggccaacagacgacagtcattacgctgctgaaaaggctgctttgcaaacctatttgccaaaaattaaagaatccactgttgctggtttcttggttggttctgaagccttataccgtaacgatttgactgcctctcaattatcagacaaaattaatgacgtccgtagtgtcgttgctgacatttccgattctgacggaaagtcatactctggtaagcaagtcggtactgtcgattcctggaatgttttggttgctggttacaattctgccgttatcgaagcttccgattttgttatggctaacgcgttctcctactggcaaggtcaaaccatgcaaaatgcctcttactcattctttgatgatattatgcaagctctacaggttatccaatctactaaaggttctaccgatattaccttctgggttggtgagaccggttggccaactgatggtaccaactttgaaagttcttacccatctgttgacaacgccaaacaattctggaaagaaggtatctgttccatgagagcttggggtgttaacgttattgtttttgaagcctttgatgaagattggaagccaaacacctctggtacctctgatgtcgagaagcactggggtgttttcacttcaagtgacaatttgaaatactccttggactgtgacttttcatga

SEQ ID NO: 1362 - DNA, 366 bp, Saccharomyces cerevisiae
atgtctgactttcaaaaggaaaaggttgaagaacaagaacaacaacaacaacaaatcatcaagattagaatcactttgacctccaccaaggttaagcaattggaaaacgtctcttccaacattgtcaagaacgctgaacaacacaacttggtcaagaagggtccagtcagactaccaaccaaggttttgaagatctccaccagaaagactccaaatggtgaaggttctaagacttgggaaacctacgaaatgagaatccacaagagatacatcgacttggaagctcctgttcaaatcgttaagagaatcactcaaatcaccattgaacctggtgtggatgtcgaagttgttgttgcttccaactaa

SEQ ID NO: 1363 - DNA, 771 bp, Saccharomyces cerevisiae
atggccccaggtaagaaagtcgctccagctccattcggtgctaagtcaactaagtctaacaagactagaaacccattgactcactctactccaaagaacttcggtattggtcaagctgtccaaccaaagagaaacttgtccagatacgtcaaatggccagaatacgtcagagtgcaaagacaaaagaagatcttgtccatcagattgaaggttcctccaaccattgctcaattccaatacactttggacagaaacaccgctgccgaaaccttcaagttgttcaacaagtacagaccagaaactgctgctgaaaagaaggaaagattgaccaaagaagctgccgctgttgctgaaggtaagtccaagcaagatgcttctccaaagccatacgctgtcaagtacggtttgaaccacgttgttgccttgatcgaaaacaagaaggctaagttggttttgattgctaacgatgtcgacccaattgaattggttgtctttttgccagctttgtgtaagaagatgggtgttccatacgccattgtcaagggtaaggctagattgggtaccttggttaaccaaaagacctctgccgttgccgctttgactgaagtcagagccgaagacgaagctgctttggctaagttggtttctaccattgacgctaacttcgctgacaaatacgatgaagtcaagaagcactggggtggtggtatccttggtaacaaggctcaagccaagatggacaagagagctaagaactccgactccgcttaa

SEQ ID NO: 1364 - DNA, 1593 bp, Saccharomyces cerevisiae
atgtctgctaccaagtcaatcgttggagaggcattggaatacgtaaacattggtttaagtcatttcttggctttaccattggcccaaagaatctctttgatcataataattcctttcatttacaatattgtatggcaattactatattctttgagaaaggaccgtccacctctagtgttttactggattccatgggtcggtagtgctgttgtgtacggtatgaagccatacgagtttttcgaagaatgtcaaaagaaatacggtgatattttttcattcgttttgttaggaagagtcatgactgtgtatttaggaccaaagggtcacgaatttgtcttcaacgctaagttggcagatgtttcagcagaagctgcttacgctcatttgactactccagttttcggtaaaggtgttatttacgattgtccaaattctagattgatggagcaaaagaagtttgttaagggtgctctaaccaaagaagccttcaagagctacgttccattgattgctgaagaagtgtacaagtacttcagagactccaaaaacttccgtttgaatgaaagaactactggtactattgacgtgatggttactcaacctgaaatgactattttcaccgcttcaagatcattattgggtaaggaaatgagagcaaaattggataccgattttgcttacttgtacagtgatttggataagggtttcactccaatcaacttcgtcttccctaacttaccattggaacactatagaaagagagatcacgctcaaaaggctatctccggtacttacatgtctttgattaaggaaagaagaaagaacaacgacattcaagacagagatttgatcgattccttgatgaagaactctacctacaaggatggtgtgaagatgactgatcaagaaatcgctaacttgttaattggtgtcttaatgggtggtcaacatacttctgctgccacttctgcttggattttgttgcacttggctgaaagaccagatgtccaacaagaattgtacgaagaacaaatgcgtgttttggatggtggtaagaaggaattgacctacgatttattacaagaaatgccattgttgaaccaaactattaaggaaactctaagaatgcaccatccattgcactctttgttccgtaaggttatgaaagatatgcacgttccaaacacttcttatgtcatcccagcaggttatcacgttttggtttctccaggttacactcatttaagagacgaatacttccctaatgctcaccaattcaacattcaccgttggaacaaagattctgcctcctcttattccgtcggtgaagaagtcgattacggtttcggtgccatttctaagggtgtcagctctccatacttacctttcggtggtggtagacacagatgtatcggtgaacactttgcttactgtcagctaggtgttctaatgtccatttttatcagaacattaaaatggcattacccagagggtaagaccgttccacctcctgactttacatctatggttactcttccaaccggtccagccaagatcatctgggaaaagagaaatccagaacaaaagatctaa

SEQ ID NO: 1365 - DNA, 1392 bp, Saccharomyces cerevisiae
atgtcagacggcactcaaaaactatggggtgggagattcactggtgaaaccgatcctttgatgcacctttacaatgcgtctcttccgtatgattataagatgtataaggcagatttagaaggaactaaagtatacacagcgggcttgcagaagttgggtcttctaacggagacagaattggcaaagatccatgaaggtttggctgaaatcaaaaaagaatgggacgctgacaaatttgtccgtcatccaaacgacgaggatatccatactgcgaatgaaagacgtcttggtgaactaattggccgcgatattgctggtaaagtccacaccggtagatcccgtaatgatcaagttgttaccgatttgagaatatactgtcgtgacattgtcaatgacaccctctttccagctttaaagggcttggttgaagttctaattaagagggccgaaggtgagatagatgtcttaatgccaggctacacacatttacaaagggcacaacctattagatggtctcattggttgagctcttatgcaacatacttcaccgaagattacaagagactgggtcaaatactacacagattgaatcaatcaccactgggtgcaggcgctcttgctggtcatccttacggcattgatagagaatttttggctgaaggtttgggtttcaatagtgtaattggtaactccttggttgctgtttctgatagagatttcatcgtggagttgatgttttggggaactttgttcatgaaccatatttctcgttttgctgaagatttgattatatattgtacagcagaatttggtttcatacagttgagcgacgcctattcaacaggttcttctttaatgcctcagaagaagaatgcagactcgttagagttgttaagaggtaaatccggtagagtatttggtgatctgacaggattcttgatgagtttgaagggtatcccatctacttatgataaagacatgcaagaagacaaagagccactattcgattgcttaacaactgtagagcactccatgctgattgccacaggtgttatttctaccttaactgtaaataaggaaaagatggaagctgctctcacgatggatatgctagctaccgacttggcagattacttggtcagaaagggtgttccattcagagagactcatcacatatctggtgagtgtgtcgctactgctgaaagacttggtctaagcggtattgataaattaaccttggagcagtatcaaaagatcgattcgagattcggacaagatctttttgaaacttttaactttgaacaaagcgttgaaagacgagatgctactggtggaaccgctaaatctgctgtattgaagcaattggataatttgaaatcccaattaaattag

SEQ ID NO: 1366 - DNA, 249 bp, Saccharomyces cerevisiae
atggttttagttcaagatttgttgcacccaactgctgcttctgaagccagaaagcacaagttaaagactttggttcaaggcccaagatcctacttcttggatgtcaaatgcccaggttgtttgaacatcaccactgttttttctcatgctcaaactgctgtcacttgtgaatcatgctctactgtcttatgtactccaaccggtggtaaggccaaattatctgaaggtacttctttcagaagaaagtaa

SEQ ID NO: 1367 - DNA, 186 bp, Saccharomyces cerevisiae
atgttcagcgaattaattaacttccaaaatgaaggtcatgagtgccaatgccaatgtggtagctgcaaaaataatgaacaatgccaaaaatcatgtagctgcccaacggggtgtaacagcgacgacaaatgcccctgcggtaacaagtctgaagaaaccaagaagtcatgctgctctgggaaatga

SEQ ID NO: 1368 - DNA, 978 bp, Saccharomyces cerevisiae
atgaaatttaatttttctacaattttcaatatcttattctttttattcaccttaattgaagccaacagcaatggggaaacagtcaaacttattacttctgatggtattgtttacagttatgctgtctacacaaagactcttgcgccggcaagggttgtggttaaaacgatttcatatactactacaagggtatatccgattactttagctaattccgtcgtttcttccactactgaaaagataacagaggtttcaacggtgtcagcttcagaacaagttagtgctactcaaacaaactcattggtttctacttctactgtttccactatcagtccaacgatttcatctggttcttcaacatcctctagctctacatacgatatcgaatcatctcaaagtatcgaatcgtcaggtacatcttccgctacagccgaaccatctgcgtcttcaggttttcgtttgacttctagttctgcttttgtttcatctactgcacctttctcttcccaactttcttcatcttcatcttctgaaacatcatcctcatcattttcaacatcatcatcatctgcccctctttccttaacttcttcttcttcttcttcttcttctttcgccactattattaccttggcaccatcgagctcaaaaagcggaaactctcaactaactttggcgtcatcgtcttccacttccgcagttgagtcatcccaaacagggtccactatagcaagaactacctctacactggtaccctcttctagcgtagatacaacgtctagagcaacgacatccatgccattagaatcgtcttctacgcaatcgatatccgtctccagctcggatggcacttgttacgttttttatgatgatgatgactactatagtactgtctacttaactaacccgtctcaatccgttgatgccgccaccactataactagtacaaacacaatttatgctacggttaccatttag

SEQ ID NO: 1369 - DNA, 390 bp, Saccharomyces cerevisiae
atgtctacatcatccgtacgttttgcatttaggcggttctggcaaagtgagacaggccccaagacggtgcatttctgggctcctactttgaaatggggtctggttttcgctggattcagcgatatgaagagaccggtggaaaaaatttctggtgctcaaaatttgtcgctgctatctactgcgctgatttggactcgttggtcctttgtcatcaagccaagaaacatcttgttggcttctgtcaactcgtttctttgtctgaccgctggctatcaattgggtagaattgccaactacaggatacggaatggcgactctatatcgcaattgtgtagctatattctcagcggcgccgacgaaagcaaaaaggaaattactacgggcagataa

SEQ ID NO: 1370 - DNA, 1314 bp, Saccharomyces cerevisiae
atggctgtctctaaagtttacgctagatccgtctacgactcccgtggtaacccaaccgtcgaagtcgaattaaccaccgaaaagggtgttttcagatccattgttccatctggtgcctccaccggtgtccacgaagctttggaaatgagagatgaagacaaatccaagtggatgggtaagggtgttatgaacgctgtcaacaacgtcaacaacgtcattgctgctgctttcgtcaaggccaacctagatgttaaggaccaaaaggccgtcgatgacttcttgttgtctttggatggtaccgccaacaagtccaagttgggtgctaacgctatcttgggtgtctccatggccgctgctagagccgctgctgctgaaaagaacgtcccattgtaccaacatttggctgacttgtctaagtccaagacctctccatacgttttgccagttccattcttgaacgttttgaacggtggttcccacgctggtggtgctttggctttgcaagaattcatgattgctccaactggtgctaagaccttcgctgaagccatgagaattggttccgaagtttaccacaacttgaagtctttgaccaagaagagatacggtgcttctgccggtaacgtcggtgacgaaggtggtgttgctccaaacattcaaaccgctgaagaagctttggacttgattgttgacgctatcaaggctgctggtcacgacggtaaggtcaagatcggtttggactgtgcttcctctgaattcttcaaggacggtaagtacgacttggacttcaagaacccagaatctgacaaatccaagtggttgactggtgtcgaattagctgacatgtaccactccttgatgaagagatacccaattgtctccatcgaagatccatttgctgaagatgactgggaagcttggtctcacttcttcaagaccgctggtatccaaattgttgctgatgacttgactgtcaccaacccagctagaattgctaccgccatcgaaaagaaggctgctgacgctttgttgttgaaggttaaccaaatcggtaccttgtctgaatccatcaaggctgctcaagactctttcgctgccaactggggtgttatggtttcccacagatctggtgaaactgaagacactttcattgctgacttggttgtcggtttgagaactggtcaaatcaagactggtgctccagctagatccgaaagattggctaagttgaaccaattgttgagaatcgaagaagaattgggtgacaaggctgtctacgccggtgaaaacttccaccacggtgacaagttgtaa

SEQ ID NO: 1371 - DNA, 1470 bp, Saccharomyces cerevisiae
atgtctgctgatttcggtttgattggtttggccgtcatgggtcaaaatttgatcttgaacgctgctgaccacggtttcactgtttgtgcttacaacagaactcaatccaaggtcgaccatttcttggccaatgaagctaagggcaaatctatcatcggtgctacttccattgaagatttcatctccaaattgaagagacctagaaaggtcatgcttttggttaaagctggtgctccagttgacgctttgatcaaccaaatcgtcccacttttggaaaagggtgatattatcatcgatggtggtaactctcacttcccagattctaatagacgttacgaagaattgaagaagaagggtattcttttcgttggttctggtgtctccggtggtgaggaaggtgcccgttacggtccatctttgatgccaggtggttctgaagaagcttggccacatattaagaacatcttccaatccatctctgctaaatccgacggtgaaccatgttgcgaatgggttggcccagccggtgctggtcactacgtcaagatggttcacaacggtattgaatacggtgatatgcaattgatttgtgaagcttatgacatcatgaagagattgggtgggtttaccgataaggaaatcagtgacgtttttgccaaatggaacaatggtgtcttggattccttcttggtcgaaattaccagagatattttgaaattcgacgacgtcgacggtaagccattagttgaaaaaatcatggatactgctggtcaaaagggtactggtaagtggactgccatcaacgccttggatttgggtatgccagttactttgattggtgaagctgtctttgcccgttgtctatctgctttgaagaacgagagaattagagcctccaaggtcttaccaggcccagaagttccaaaagacgccgtcaaggacagagaacaatttgtcgatgatttggaacaagctttgtatgcttccaagattatttcttacgctcaaggtttcatgttgatccgtgaagctgctgctacttatggctggaaactaaacaaccctgccatcgctttgatgtggagaggtggttgtatcattagatctgttttcttgggtcaaatcacaaaggcctacagagaagaaccagatttggaaaacttgttgttcaacaagttcttcgctgatgccgtcaccaaggctcaatctggttggagaaagtcaattgcgttggctaccacctacggtatcccaacaccagccttttccaccgctttgtctttctacgatgggtacagatctgaaagattgccagccaacttactacaagctcaacgtgactactttggtgctcacactttcagagtgttgccagaatgtgcttctgacaacttgccagtagacaaggatatccatatcaactggactggccacggtggtaatgtttcttcctctacataccaagcttaa

SEQ ID NO: 1372 - DNA, 525 bp, Saccharomyces cerevisiae
atgtctgctatcccagaaaacgccaacgttaccgtcttaaacaagaacgaaaagaaagccagagaattgattggcaaattgggtttgaagcaaatcccaggtatcatcagagtcactttcaggaagaaggacaaccaaatctatgctattgaaaagccagaagtcttcagatctgccggtggtaactacgttgtcttcggtgaagctaaggttgacaactttacccaaaagctagccgctgctcaacaacaagctcaagctagcggtattatgccatctaacgaagacgtcgctaccaagtccccagaagacatccaagctgacatgcaagccgccgcagaaggcagtgtcaacgccgcagcagaagaagatgacgaagaaggtgaagttgatgccggtgacttgaataaggatgatatcgagttagtcgttcaacaaactaacgtttccaaaaaccaagccatcaaagccctgaaagctcacaatggtgacttagtcaacgctatcatgtccttgtctaaataa

SEQ ID NO: 1373 - DNA, 855 bp, Saccharomyces cerevisiae
atggctattgatgctcaaaagcttgtggtggtcatcgtgatcgtggtcgtgcctttgctcttcaagttcattatcggaccgaagaccaagcctgtgctggatcccaaaaggaatgacttccaatcatttccgctggttgaaaaaaccatcttaacgcataatacttcgatgtacaagttcgggctacctcatgctgacgacgtactcggtttaccaattggtcagcatatcgtaattaaggccaatatcaatggtaaggatattaccagatcgtatacgcccacatcgttggatggagatacaaagggaaactttgaattactagtgaagtcttaccccacaggtaacgtttctaagatgattggagagttgaagataggtgactcgatccagatcaagggccctcgtgggaactatcattatgagagaaactgccgttcccatctagggatgattgctggtggtactggtattgcgcccatgtatcagatcatgaaagctattgccatggaccctcacgacactaccaaggtctctctagtctttgggaacgtccatgaggaggatattctgttgaagaaggaactggaagcgttggtggccatgaagccttcccaatttaagatagtttactacttagactctcctgaccgtgaagactggactggtggtgtaggatacattaccaaggatgtcatcaaggaacacttgcccgctgctacaatggacaacgttcaaattttgatctgtggtcctccagccatggttgcctcagttagaagaagtaccgtggacttggggttcagacgttccaaaccgctttccaagatggaagaccaggtgtttgtgttttaa

SEQ ID NO: 1374 - DNA, 366 bp, Saccharomyces cerevisiae
atggctcaacgtgttactttcagaagaagaaatccatacaacacccgttctaacaaaatcaaggttgttaagaccccaggtggtatcttgcgtgcccaacacgttaagaagttggctactagaccaaagtgtggtgactgtggtagtgctctacaaggtatttccactttgagaccaagacaatacgctactgtctccaagacccacaagactgtttccagagcttacggtggttccagatgtgccaactgtgtcaaggaaagaatcgtcagagctttcttgattgaagaacaaaagattgttaagaaggtcgttaaggaacaaactgaggctgctaagaagtctgaaaagaagtctaagaaataa

SEQ ID NO: 1375 - DNA, 600 bp, Saccharomyces cerevisiae
atgtctgttgaaccagttgttgtcattgatggtaagggtcatttagtaggtcgtttagcttccgttgttgctaagcaattattaaacggtcaaaaaatcgttgttgttagagctgaagaattaaacatttctggtgaatttttcagaaacaaattaaagtaccatgatttcttgagaaaggctaccgctttcaataagacccgtggtccattccatttcagagccccatctagaatcttctacaaagctcttcgtggtatggtttctcacaagactgctcgtggtaaggccgctttggaacgtttaaaggtctttgaaggtatcccacctccatacgataagaagaagagagttgttgtcccacaagcattgagagttttgagattgaagccaggtagaaagtacaccaccttgggtaagttgtctacttccgttggttggaaatacgaagatgttgttgccaaattggaagcaaagagaaaggtttcatccgctgaatactatgccaagaagagagctttcaccaagaaagttgcctctgctaatgctactgctgctgaatctgatgttgctaaacaattagccgctttgggttactaa

SEQ ID NO: 1376 - DNA, 5277 bp, Saccharomyces cerevisiae
atgaaagtttccgataggcgtaagtttgaaaaagcaaactttgacgagtttgagtcggctctaaataacaaaaacgacttggtacattgtccctcaataactttatttgaatcgatccccacggaagtgcggtcattctacgaagacgaaaagtctggcctaatcaaagtggtaaaattcagaactggtgcaatggataggaaaaggtcttttgaaaaagttgtcatttccgtcatggtcgggaaaaatgtaaaaaagttcctgacgtttgttgaagacgaaccagatttccagggcggaccaatcccttcaaagtatcttattcccaagaaaatcaacttgatggtctacacgttgtttcaagtgcatactttgaaattcaatagaaaggattacgataccctttctcttttttacctcaacagaggatactataatgagttgagtttccgtgtcctggaacgttgtcacgaaatagcgagtgctaggccgaacgacagctctacgatgcgtactttcactgactttgtttccggcgcacctattgtaaggagtcttcagaaaagcaccataaggaaatatgggtacaatttggcaccctacatgtttttgttactacacgtagatgagctatcgattttttctgcataccaagcaagtttacctggcgaaaagaaagtcgacacagagcggctgaagcgtgatctatgcccacgtaaacccattgagataaagtacttttcacagatatgtaacgatatgatgaacaaaaaggaccgattgggtgatattttgcatattatcttgcgagcatgtgcactcaatttcggggcgggtccccgtggtggcgctggtgacgaagaggatcgatctattacgaatgaagaacccattattccctctgtggacgagcatggcctgaaagtatgtaagttgcgcagtcctaacactccacgaagactcagaaaaacactagatgccgtgaaagctttattggtgtcgtcttgtgcttgtaccgcaagggatttagatatatttgatgacaacaacggcgttgcaatgtggaaatggatcaaaattctgtaccacgaagtagcgcaggaaaccacgctgaaggactcttatagaataactttggtaccttcttctgatggtatatcactactcgcttttgccggtcctcagcgcaacgtatacgtcgatgatacaacaagacgcatccaactgtacactgattacaacaagaacggttcatcggagcctcgactaaagacgcttgacggactcacctcagattacgtgttttattttgtcactgtgctaaggcaaatgcaaatatgtgcgcttggtaacagttatgacgcttttaatcatgatccttggatggatgtggtgggatttgaggatccaaatcaagtaacaaatcgagacatttcgaggatagttttgtattcctacatgtttctgaataccgcgaagggctgtctggttgaatacgcaacttttcggcagtacatgagggaacttccgaagaatgcacctcagaagctgaattttcgggagatgcgtcaggggttgattgccctaggacggcactgcgtaggtagcagatttgaaacagatttgtacgagtcggcgacgagtgaactcatggccaatcattccgttcaaacagggcgaaatatttacggtgtggattccttttcgttaactagtgtcagtgggacgaccgccactttattgcaggaacgagcttccgagcgctggattcagtggttaggccttgaaagcgactaccattgttcattctccagtactcggaatgcggaagacgtagtggcaggtgaggcggcgagttcaaatcatcatcaaaaaatttcaagagtaacgcgaaaaaggccccgagagcccaagagtacaaacgatatcctcgtcgcaggccagaaactctttggcagctcctttgaattcagggacttgcatcagttgcgcttatgttatgaaatatacatggcagacacaccctctgtggcagtacaggccccaccgggctatggtaagacggagttatttcatctccccttgatagcactggcatctaagggcgacgtggaatatgtgtcgtttctgtttgtaccgtacacagtgttgcttgctaattgcatgatcaggttgggccgatgcggttgcttgaatgtggcccctgtaagaaactttattgaagaaggttacgatggcgttactgatttatacgtggggatctacgatgatcttgctagcactaatttcacagacaggatagctgcgtgggagaatattgttgagtgcacctttaggaccaacaacgtaaaattgggttacctcattgtagatgagtttcacaactttgaaacggaggtctaccggcagtcgcaatttgggggcataactaaccttgattttgacgcttttgagaaagcaatctttttgagcggcacagcccctgaggctgtagctgatgctgcgttgcagcgtattgggcttacgggactggccaagaaatcgatggacatcaacgagctcaaacggtcggaagatctcagcagaggtctatccagctatccaacacggatgtttaatctaatcaaggagaaatccgaggtgcctttagggcatgttcataaaattcggaagaaagtggaatcacagcccgaagaagcactgaagcttcttttagccctctttgaaagtgaaccagagtcgaaggccattgtagttgcaagcacaaccaacgaagtggaagaattggcctgctcttggagaaagtattttagggtggtatggatacacgggaagctgggtgctgcagaaaaggtgtctcgcacaaaggagtttgtcactgacggtagcatgcaagttctcatcggaacgaaattagtgactgaaggaattgacattaagcaattgatgatggtgatcatgcttgataatagacttaatattattgagctcattcaaggtgtagggagactaagagatgggggcctctgttatctattatctagaaaaaacagttgggcggcaaggaatcgtaagggtgaattaccaccgattaaggaaggctgtataaccgaacaggtacgcgagttctatggacttgaatcaaagaaaggaaaaaagggccagcatgttggatgctgtggctccaggacagacctgtctgctgacacagtggaactgatagaaagaatggacagattggctgaaaaacaggcgacagcttccatgtcgatcgttgcgttaccgtctagcttccaggagagcaatagcagtgacaggtacagaaagtattgcagcagtgatgaggacagcaacacgtgcattcatggtagtgctaatgccagtactaacgccagtactaatgcgattaccactgctagtaccaacgtcaggactaatgcgactaccaatgctagtactaatgcgactaccaatgccagtaccaatgccagtactaatgcgaccaccaatgccagtaccaatgcgactaccaactccagcactaatgctactaccactgccagcaccaacgtcaggactagtgctactaccactgccagcatcaacgtcaggactagtgctactaccactgaaagtaccaactccagcactaatgcgactaccactgaaagtaccaactccagcactaatgctactaccaccgaaagtaccaactccaacactagtgctactaccactgccagcatcaacgtcaggactagtgctactaccactgaaagtaccaactccagcactagtgcgactaccactgccagcatcaacgtcaggactagtgctactaccactaaaagtatcaactctagcactaatgctactaccactgaaagtaccaactccaacactaatgctactaccactgaaagtaccaactccagcactaatgctactaccactgaaagtaccaactccagcactaatgctactaccactgaaagtaccaactccaacactagtgctgctaccaccgaaagtaccaactccaacactagtgctactaccactgaaagtaccaacgctagtgccaaggaggacgccaataaagatggcaatgctgaggataatagattccatccagtcaccgacattaacaaagagtcgtataagcggaaagggagtcaaatggttttgctagagagaaagaaactgaaagcacaatttcccaatacttccgagaatatgaatgtcttacagtttcttggatttcggtctgacgaaattaaacatcttttcctctatggtattgacatatacttctgcccagagggagtgttcacacaatacggattatgcaagggctgtcaaaagatgttcgagctctgtgtctgttgggctggccagaaagtatcgtatcggaggatagcttgggaagcactagctgtggagagaatgctgcgaaatgacgaggaatacaaagaatacttggaagacatcgagccatatcatggggaccctgtaggatatttgaaatattttagcgtaaaaaggagagagatctactctcagatacagagaaattatgcttggtacctggccattactagaagaagagaaacaattagtgtattggattcgacaagaggcaagcaagggagccaagttttccgcatgtctggaaggcagatcaaagagttgtattttaaagtatggagcaacttgcgtgaatcgaagacagaggtgctgcagtactttttgaactgggacgaaaaaaagtgccaggaagaatgggaggcaaaagacgatacggttgttgtggaagcgctcgagaaaggtggagtttttcagcgtttgcgttccatgacgagcgctggactgcagggtccgcagtacgtcaagctgcagtttagcaggcatcatcgacagttgaggagcagatatgaattaagtctaggaatgcacttgcgagatcagattgcgctgggagttaccccatctaaagtgccgcattggacggcattcctctcgatgctgatagggctgttctacaataaaacatttcggcagaaactggagtatcttttggagcagatttcggaggtgtggttgttaccacattggcttgatttggcaaacgttgaagttctcgctgcagatgacacgagggtaccactgtacatgctgatggtagcggttcacaaagagctggatagcgatgatgttccagacggtagatttgatatattattatgtagggattcgagcagagaagttggagagtga

SEQ ID NO: 1377 - DNA, 2049 bp, Saccharomyces cerevisiae
atgtttttcaacagactaagcgctggcaagctgctggtaccactctccgtggtcctgtacgcccttttcgtggtaatattacctttacagaattctttccactcctccaatgttttagttagaggtgccgatgatgtagaaaactacggaactgttatcggtattgacttaggtactacttattcctgtgttgctgtgatgaaaaatggtaagactgaaattcttgctaatgagcaaggtaacagaatcaccccatcttacgtggcattcaccgatgatgaaagattgattggtgatgctgcaaagaaccaagttgctgccaatcctcaaaacaccatcttcgacattaagagattgatcggtttgaaatataacgacagatctgttcagaaggatatcaagcacttgccatttaatgtggttaataaagatgggaagcccgctgtagaagtaagtgtcaaaggagaaaagaaggtttttactccagaagaaatttctggtatgatcttgggtaagatgaaacaaattgccgaagattatttaggcactaaggttacccatgctgtcgttactgttcctgcttatttcaatgacgcgcaaagacaagccaccaaggatgctggtaccatcgctggtttgaacgttttgagaattgttaatgaaccaaccgcagccgccattgcctacggtttggataaatctgataaggaacatcaaattattgtttatgatttgggtggtggtactttcgatgtctctctattgtctattgaaaacggtgttttcgaagtccaagccacttctggtgatactcatttaggtggtgaagattttgactataagatcgttcgtcaattgataaaagctttcaagaagaagcatggtattgatgtgtctgacaacaacaaggccctagctaaattgaagagagaagctgaaaaggctaaacgtgccttgtccagccaaatgtccacccgtattgaaattgactccttcgttgatggtatcgacttaagtgaaaccttgaccagagctaagtttgaggaattaaacctagatctattcaagaagaccttgaagcctgtcgagaaggttttgcaagattctggtttggaaaagaaggatgttgatgatatcgttttggttggtggttctactagaattccaaaggtccaacaattgttagaatcatactttgatggtaagaaggcctccaagggtattaacccagatgaagctgttgcatacggtgcagccgttcaagctggtgtcttatccggtgaagaaggtgtcgaagatattgttttattggatgtcaacgctttgactcttggtattgaaaccactggtggtgtcatgactccattaattaagagaaatactgctattcctacaaagaaatcccaaattttctctactgccgttgacaaccaaccaaccgttatgatcaaggtatacgagggtgaaagagccatgtctaaggacaacaatctattaggtaagtttgaattaaccggcattccaccagcaccaagaggtgtacctcaaattgaagtcacatttgcacttgacgctaatggtattctgaaggtgtctgccacagataagggaactggtaaatccgaatctatcaccatcactaacgataaaggtagattaacccaagaagagattgatagaatggttgaagaggctgaaaaattcgcttctgaagacgcttctatcaaggccaaggttgaatctagaaacaaattagaaaactacgctcactctttgaaaaaccaagttaatggtgacctaggtgaaaaattggaagaagaagacaaggaaaccttattagatgctgctaacgatgttttagaatggttagatgataactttgaaaccgccattgctgaagactttgatgaaaagttcgaatctttgtccaaggtcgcttatccaattacttctaagttgtacggaggtgctgatggttctggtgccgctgattatgacgacgaagatgaagatgacgatggtgattatttcgaacacgacgaattgtag

SEQ ID NO: 1378 - DNA, 999 bp, Saccharomyces cerevisiae
atgatcagaattgctattaacggtttcggtagaatcggtagattggtcttgagattggctttgcaaagaaaagacattgaggttgttgctgtcaacgatccatttatctctaacgattatgctgcttacatggtcaagtacgattctactcatggtagatacaagggtactgtttcccatgacgacaagcacatcatcattgatggtgtcaagatcgctacctaccaagaaagagacccagctaacttgccatggggttctctaaagatcgatgtcgctgttgactccactggtgttttcaaggaattggacaccgctcaaaagcacattgacgctggtgccaagaaggttgtcatcactgctccatcttcttctgctccaatgtttgttgttggtgttaaccacactaaatacactccagacaagaagattgtctccaacgcttcttgtaccaccaactgtttggctccattggccaaggttatcaacgatgctttcggtattgaagaaggtttgatgaccactgttcactccatgaccgccactcaaaagactgttgatggtccatcccacaaggactggagaggtggtagaaccgcttccggtaacattatcccatcctctaccggtgctgctaaggctgtcggtaaggtcttgccagaattgcaaggtaagttgaccggtatggctttcagagtcccaaccgtcgatgtttccgttgttgacttgactgtcaagttggaaaaggaagctacttacgaccaaatcaagaaggctgttaaggctgccgctgaaggtccaatgaagggtgttttgggttacaccgaagatgccgttgtctcctctgatttcttgggtgacactcacgcttccatcttcgatgcctccgctggtatccaattgtctccaaagttcgtcaagttgatttcctggtacgataacgaatacggttactccgccagagttgttgacttgatcgaatatgttgccaaggcttaa

SEQ ID NO: 1379 - DNA, 900 bp, Saccharomyces cerevisiae
atgaaactttctaaattatcgatcttaacctccgccttagccacgtctgcattggccgctcctgccgttgttactgtcactgaacacgcccatgaggctgcagtcgttactgtgcaaggcgtagtttatgtcgaaaacggccaaacacgtacaacttacgaaacactagctcctgcttccactgccactccaacttctacagctacagctttggttgctccccctgtcgctccttcctctgcttccagcaattccgatgtggtcttgtctgctttgaagaacttagcctctgtttggggtaaaactaccgattcaacgaccacgttgacatcttctgaatctacatcgcaatcgttggctcaagctactacgacttctacacccgctgctgcttccaccacttccacacccgctgctaccaccaccacttctcaagccgctgctactagctcagcatcgtcttcggatagtgacctgtcagattttgcctcttctgtgttggctgaacacaacaagaagagagctttgcacaaggacacaccagctttgtcctggtccgatactttggcctcctacgctcaagactatgctgacaactatgattgctccggcactttgacccattctggcggtccatacggtgaaaacttggctttgggttatgacggcccagctgccgtcgacgcttggtacaatgaaatttccaactacgacttctcgaatccaggcttttcaagtaacactggccactttactcaagtcgtttggaagtccaccacccaagttggttgtggcatcaaaacctgtggcggtgcatggggtgactatgtcatctgtagttacgaccccgcaggaaactacgaaggcgaatacgccgataatgtcgagcccctagcttaa

SEQ ID NO: 1380 - DNA, 6645 bp, Saccharomyces cerevisiae
atggccactattgctcccactgctccaatcacccctccaatggaatctacgggtgaccgtctggttacgttggaacttaaggacggcacggtcttacaaggttattcatttggtgctgagaaatccgtcgctggtgaattagttttccaaactggtatggttggttatcctgaatctgtgaccgatccatcttatgaaggccagatcttagtcatcacttacccattggtaggcaattatggtgtcccagatatgcacttgagagatgaattggtcgaagaattgccaagatattttgaaagtaatagaatccatattgccggtttagttatttctcactataccgacgagtactctcattatcttgctaaatcttccttaggtaaatggttacaaaatgaagggatcccagctgtttatggtgttgatacaagatcattgaccaagcatttgagagatgcaggttcaatgttgggtaggttgtctttggaaaaaagcggctctgacagaaccatctccagatcttcctcttggagaagtgcgtttgatgttcctgaatgggtggatccaaatgttcaaaacctagtttctaaggtctccatcaatgaacctaaattgtacgttcctccagcagacaataagcacatcgaattgcaaaccggacccgatggtaaagttttaaggattctagccattgacgtgggtatgaaatacaatcaaattcgttgttttatcaaaaggggtgtagaattgaaagttgttccatggaactacgatttcactaaagaagattatgatggtctgtttatttcaaatggtccaggtgatccatctgttctagatgatctatctcaaagattgtcaaatgtcctggaggctaaaaagacgccagtattcggtatttgtctcggtcatcaattgatagcaagagctgccggtgcatccaccctaaaactaaaatttggtaaccgtggtcataacataccttgtacatcaactataagtggtcgttgttacataacatctcaaaaccatgggttcgctgtggatgttgacactctaacttccggatggaagccattgtttgttaacgcgaatgatgactctaacgaaggtatctatcattctgaattaccttatttttccgtccaattccatccagaatccacacctggcccaagagatacagaattcttgtttgacgtttttatccaagcagttaaagaattcaagtatacacaagtgttgaaaccaatcgctttcccaggtggcctattagaggataacgttaaggcacaccctagaatcgaagcgaagaaggttctagttctcggttctggtggtttgtccatcggtcaagctggtgaatttgactactctggttctcaagccatcaaagctttgaaagaagaaggtatctatacaattttaattaatccaaacattgctaccatccaaacttcgaaagggttggctgataaggtttattttgttcctgttactgcagagttcgtgagaaaagttattttacatgaaaggccggacgccatttatgtgacatttggtggacaaactgctttatctgttggtatagccatgaaagatgaatttgaggcgttaggagttaaagtattgggtactccaatcgatactattattaccacggaagaccgtgaactcttcagtaatgccattgacgaaattaatgaaaaatgtgcgaaatctcaagctgctaattcagtggacgaggcattggccgctgtcaaggagatcggtttcccagttattgtacgtgctgcatatgcattgggaggtttaggttccggtttcgctaataatgaaaaagaattggttgatctatgtaatgttgcattttcatcctcacctcaagttttagtcgagaaatctatgaaaggttggaaagaagtcgaatatgaagttgttcgtgatgcttttgacaactgtattactgtttgtaatatggaaaattttgatccactaggtattcacaccggtgattccatcgttgtagccccatctcaaactttatctgatgaagattacaatatgttaagaactactgctgttaatgttattagacacttaggtgttgttggtgaatgtaatatccaatatgctttaaatcccgtttctaaggattattgcatcattgaagttaatgcgcgtttgtcacgttcctctgctttagcttctaaggctactggttacccattggcctacactgcggctaagttaggtttgaatatcccattaaatgaagttaagaattccgtcacaaaatccacatgtgcttgttttgaaccttctctagactactgtgttgtcaaaatgccaagatgggatttgaagaagttcaccagagtttctaccgaattatcttcatcaatgaaatctgttggtgaagttatgagcatcggtagaaccttcgaagaagctattcaaaaagctatcagatccacagaatatgctaacctcggattcaatgagacagatctagatatcgacattgattacgagttgaacaaccctacggatatgcgtgtcttcgccattgcaaatgcttttgctaagaagggatattctgttgataaagtctgggaaatgactagaattgataagtggtttttaaacaaactgcacgatttggtccaatttgctgagaaaattagttcatttggtactaaagaggaattaccttccttagttttaagacaggctaagcagttaggttttgatgacagacagattgcaagatttttggattccaacgaagttgccatccgtagattaagaaaagaatatggaattacaccatttgtcaaacaaattgatacagttgccgctgaattccccgcttacacgaactatttatacatgacatacaatgctgactcacacgatttatcctttgatgaccacggtgttatggtcttgggttctggtgtttaccgtatcggttcttctgtcgaatttgattggtgtgctgttactgcagttagaacattacgtgccaacaatatcaaaactatcatggtcaactataatccagaaactgtttccacagattatgatgaggctgatagactatactttgaaaccatcaaccttgaaagagttttggatatttacgagattgaaaactcaagcggtgttgtcgtatcaatgggtggtcaaacttccaacaacatcgccatgactttacatcgtgaaaatgtaaagattcttggtacatcccctgacatgattgattctgctgaaaaccgttacaagttctctcgtatgttggatcaaattggtgttgaccaaccagcttggaaagaattgacatccatggacgaagctgaatcttttgccgaaaaggtgggttatccagttttggtacgtccatcttatgtgttatccggtgccgccatgaatactgtttattctaaaaacgatttggaatcctacttaaaccaagccgtcgaagtttcacgtgattatcctgttgttatcactaaatatattgaaaacgcaaaggagattgaaatggatgcagttgcaagaaatggtgaattggttatgcatgttgtctctgagcatgttgaaaatgcaggtgtccactcgggtgatgcaacattaatcgttccacctcaagatttggctcctgaaactgtggatagaattgttgtcgccactgctaaaattggtaaggctttgaaaattacaggtccatacaacatccaattcattgcaaaggacaatgaaatcaaggtcatagaatgtaatgttcgtgcttcgagatctttcccattcatttcaaaggttgttggcgtcaatctgattgaattggcaacaaaggccataatgggtttgcctttgacgccttatcctgttgaaaaattaccagatgattatgtcgccgttaaagtaccacaattctctttcccacgtttagcaggagctgatccagtcttaggtgttgaaatggcctctactggtgaagtcgctacttttggccactcgaagtatgaagcatacttaaagtctttgttggcaaccggcttcaaacttccaaagaagaatattttattgtctattggttcttacaaggaaaaacaagaattgctttcttccgtacaaaaactatacaacatgggatataaattatttgcaacatcaggtactgctgactttttatctgaacatggtattgccgtccaatatctggaggttttaaacaaggatgatgatgatcaaaaatcagaatactcacttactcaacatttggctaataatgaaattgacctttacatcaacttgccttctgccaacaggttccgtcgtcctgcatcctatgtttcaaaggggtataaaacacgtcgtttggctgtcgattattcggttccgttggttactaacgttaaatgtgcaaaattgttgattgaagccatttcaagaaatatcactttagatgtttctgaacgtgatgcacaaacttcccacagaactattaccttacctggtttaatcaatatcgcaacttatgttccgaatgcatcccatgttatcaaaggcccagctgaactgaaggagaccacacgtctatttttggaatccggttttacatactgtcaattgatgcccagatccatcagcggacctgttattactgacgttgcatccttgaaggccgcaaactctgtttcccaagattcatcttacactgacttttctttcactattgctggtacagcacacaatgctcatagtgttacgcaatctgctagcaaagtgacagcattgtttttgcccctacgtgaattaaagaacaagatcacagcagtagctgaacttctgaatcagtggccaactgaaaagcaagtgattgcagaagctaaaactgcagatttggcatcggttttattgttaacctcccttcaaaacagatctattcacattactggtgtttcgaataaggaagatttagctttgatcatgacggtcaaggcaaaagaccctagagtgacttgtgatgtcaatatttattctttgtttattgcccaagatgactatccggaggcagttttcttgcctactaaggaagatcaagagtttttctggaacaaccttgatagtatcgatgctttctctgtcggtgctcttcctgtcgccttggcaaatgtcacaggtaacaaggttgatgttggtatgggtatcaaagattcattaccactattgttggctgctgttgaagaaggtaaattaaccattgatgatatcgtccttcgtctgcatgacaatcccgctaaaattttcaacatccctactcaggactcagttgtcgaaattgatttggattattctttcagacgtaataagagatggtcaccattcaacaaagatatgaacggtggtattgagcgtgttgtctataatggcgaaacattagttttgagcggtgaattagtttcaccaggcgccaaaggaaaatgcattgttaatccaagtccagcttccataactgcttccgcagagctccaatctactagtgctaaaagaaggttctcgatcacggaagaagcaatcgctgataatttagatgccgcggaggatgcaattccagaacagcctttggaacaaaaattgatgtcttcaaggccaccaagagaacttgttgctccaggcgccatccagaatttgatccgtagtaacaatccattccgcggaagacatatattgtctatcaaacaattcaaacgttctgatttccatgtgttgtttgctgttgcacaagaactaagggcagctgtcgcaagagaaggtgtcttagatttaatgaaaggccacgttattactacaattttctttgaaccatctactcgtacttgttcttcattcattgctgctatggaacgtttgggtggtagaattgtaaatgttaatccattggtgtcttctgtcaagaaaggtgaaacccttcaagatactatcagaactttggcttgttacagtgatgccattgtcatgcgtcattcagaagaaatgtctgttcatatcgccgctaaatattctcctgttccaattattaatggtggtaatggttctcgcgagcatcctacgcaggccttcttggatttgtttacgattcgtgaagaaatcggtactgttaatggtattactgttactttcatgggtgatctcaaacatggtagaaccgtacattcattgtgtcgtttgttaatgcactatcaagtcagaattaatcttgtttctcctccggaattgaggttaccagaaggattaagagaagagctaagaaaagctggcttacttggtgttgagagcattgaattaacccctcatatcatctcaaagaccgatgttctgtattgtacaagggtccaagaagaaagattcaatagccctgaagaatatgcacgtctgaaggatacttatatcgtggacaacaagatcttggcacacgccaaagaaaatatggctatcatgcatccattgcctcgtgtaaatgaaatcaaagaggaagtggactacgatcatcgtgctgcttacttcagacaaatgaagtatggtttgttcgtcagaatggctttgttggccatggtcatgggtgttgatatgtga

SEQ ID NO: 1381 - DNA, 264 bp, Saccharomyces cerevisiae
atggaaaacgataagggtcaattagttgaattatatgttccaagaaagtgttctgctaccaacagaatcatcaaagccgatgaccacgcttctgttcaaatcaacgttgccaaggttgatgaagaaggccgcgccattccaggtgaatacatcacttacgctttgtccggttacgttagatccagaggtgaatccgatgactctttgaaccgtttggctcaaaacgatggtttgttgaagaacgtttggtcttactcccgttaa

SEQ ID NO: 1382 - DNA, 1188 bp, Saccharomyces cerevisiae
atgtctgaaggtattactgatattgaagaatcccaaattcaaaccaactatgacaaggtcgtctacaagttcgatgatatggaattggacgaaaacttgttaagaggtgttttcggttacggtttcgaagaaccatctgccattcaacaacgtgccatcatgcctattattgaaggtcacgatgtcttggctcaagctcaatctggtactggtaagaccggtactttctccattgctgctttgcaaagaattgacacctctgtcaaggctcctcaagctttgatgttggctccaactagagaattggctttgcaaatccaaaaggttgtcatggctttggctttccacatggacatcaaggtccacgcttgtatcggtggtacttcctttgttgaagacgctgaaggtttgagagatgctcaaatcgtcgttggtactccaggtcgtgtttttgacaacatccaaagacgtagattcagaactgacaagatcaagatgttcatcttagatgaagctgatgaaatgttgtcttctggtttcaaggaacaaatctaccaaattttcaccttacttccaccaaccactcaagttgttctattgtccgccaccatgccaaatgacgtcttggaagttaccaccaaatttatgagaaacccagttagaattttggttaagaaggatgaattgactttggaaggtatcaaacaattctacgttaatgttgaagaagaagaatacaaatacgagtgtttgaccgatttatacgactctatctccgttactcaagctgtcatcttctgtaacaccagaagaaaggtcgaagaattgaccactaagttaagaaacgacaaatttaccgtttctgccatctattctgatttaccacaacaagaaagagacaccatcatgaaggaattcagaagtggttcttccagaattttgatctccactgatttgttggctagaggtatcgatgtccaacaagtttctttggttattaactacgacttaccagctaacaaagaaaactatattcacagaatcggtagaggtggtcgtttcggtagaaagggtgttgccatcaactttgttactaacgaagacgttggcgctatgagagaactagaaaagttctactccactcaaattgaagaattgccatccgacattgctaccttgttgaactaa

SEQ ID NO: 1383 - DNA, 402 bp, Saccharomyces cerevisiae
atggacagagaccatattaatgaccatgaccatcgaatgagctattccatcaacaaggacgacttgttgttaatggttttggcggttttcattcccccagtggccgtctggaagcgtaagggtatgttcaacagggatacactattgaacttacttctcttcctactgttattcttcccagcaatcattcacgcttgctacgttgtatatgaaacgagtagtgaacgttcgtacgatctttcacgcagacatgcgactgcgcccgccgtagaccgtgacctggaagctcaccctgcagaggaatctcaagcacagcctccagcatatgatgaagacgatgaggccggtgccgatgtgcccttgatggacaacaaacaacagctctcttccggccgtacttag

SEQ ID NO: 1384 - DNA, 555 bp, Saccharomyces cerevisiae
atggcaagatacggtgctacttcaaccaacccagctaaatctgcgtcagctcgtggttcttatttgcgtgtttctttcaagaacaccagggaaactgctcaagccattaatggttgggaattgactaaggctcaaaaatacttggaccaagttttggaccaccaaagagccatcccattcagaagatttaactcctctattggtagaactgcccaaggtaaggaatttggtgtcaccaaggctagatggccagctaaatctgttaagttcgttcaaggtttgttgcaaaacgccgctgccaatgctgaagctaagggtctagatgctaccaagttgtacgtttctcacatccaagttaaccaagcaccaaagcaaagaagaagaacttacagagcccacggtagaatcaacaagtacgaatcttctccatctcacattgaattggttgttaccgaaaaggaagaagctgtcgccaaggctgctgaaaagaaggttgtcagattgacttctagacaaagaggtagaattgctgcccaaaaacgtatctctgcttaa

SEQ ID NO: 1385 - DNA, 156 bp, Saccharomyces cerevisiae
atggctgctcaaaagtctttcagaatcaagcaaaaaatggctaaggctaagaagcaaaacagaccattgccacaatggatcagattgagaaccaacaacactatccgttacaacgctaagagaagaaactggagaagaaccaagatgaacatctaa

SEQ ID NO: 1386 - DNA, 393 bp, Saccharomyces cerevisiae
atgaccagatcttccgttttagctgatgctttgaatgccattaacaacgctgaaaagaccggtaagcgtcaagttttaatcagaccatcctccaaggtcattatcaagtttttgcaagttatgcaaaagcacggttacattggtgaatttgaatacatcgatgaccacagatctggtaagattgttgttcaattgaacggtagattgaacaagtgtggtgttatttccccaagattcaacgttaagattggtgacattgaaaaatggactgccaacttgttgccagccagacaattcggttacgtcatcttgaccacctctgctggtatcatggaccatgaagaagccagaagaaagcacgtttctggtaagattttgggtttcgtttactaa

SEQ ID NO: 1387 - DNA, 999 bp, Saccharomyces cerevisiae
atggttagagttgctattaacggtttcggtagaatcggtagattggttatgagaattgctttgcaaagaaagaacgtcgaagttgttgctttgaacgatcctttcatctctaacgactactccgcttacatgttcaagtacgactctactcacggtagatacgctggtgaagtttcccacgatgacaagcacatcatcgttgatggtcacaagatcgccactttccaagaaagagacccagctaacttgccatgggcttctctaaacattgacatcgccattgactccactggtgttttcaaggaattggacactgctcaaaagcacattgacgctggtgccaagaaggttgtcatcactgctccatcttccaccgccccaatgttcgtcatgggtgttaacgaagaaaaatacacttctgacttgaagattgtttccaacgcttcttgtaccaccaactgtttggctccattggccaaggttatcaacgatgctttcggtattgaagaaggtttgatgaccactgttcactccatgaccgccacccaaaagactgttgacggtccatcccacaaggactggagaggtggtagaaccgcttccggtaacatcatcccatcctctaccggtgctgctaaggctgtcggtaaggtcttgccagaattgcaaggtaagttgaccggtatggctttcagagtcccaaccgtcgatgtttccgttgttgacttgactgtcaagttgaacaaggaaaccacctacgatgaaatcaagaaggttgtcaaggctgccgctgaaggtaagttgaagggtgtcttgggttacactgaagacgctgttgtctcctctgacttcttgggtgactctaactcttccatcttcgatgctgccgctggtatccaattgtctccaaagttcgtcaagttggtttcctggtacgacaacgaatacggttactctaccagagttgtcgacttggttgaacacgttgccaaggcttaa

SEQ ID NO: 1388 - DNA, 1758 bp, Saccharomyces cerevisiae
atgggcttgttaacgaaagttgctacatctagacaattctctacaacgagatgcgttgcaaagaagctcaacaagtactcgtatatcatcactgaacctaagggccaaggtgcgtcccaggccatgctttatgccaccggtttcaagaaggaagatttcaagaagcctcaagtcggggttggttcctgttggtggtccggtaacccatgtaacatgcatctattggacttgaataacagatgttctcaatccattgaaaaagcgggtttgaaagctatgcagttcaacaccatcggtgtttcagacggtatctctatgggtactaaaggtatgagatactcgttacaaagtagagaaatcattgcagactcctttgaaaccatcatgatggcacaacactacgatgctaacatcgccatcccatcatgtgacaaaaacatgcccggtgtcatgatggccatgggtagacataacagaccttccatcatggtatatggtggtactatcttgcccggtcatccaacatgtggttcttcgaagatctctaaaaacatcgatatcgtctctgcgttccaatcctacggtgaatatatttccaagcaattcactgaagaagaaagagaagatgttgtggaacatgcatgcccaggtcctggttcttgtggtggtatgtatactgccaacacaatggcttctgccgctgaagtgctaggtttgaccattccaaactcctcttccttcccagccgtttccaaggagaagttagctgagtgtgacaacattggtgaatacatcaagaagacaatggaattgggtattttacctcgtgatatcctcacaaaagaggcttttgaaaacgccattacttatgtcgttgcaaccggtgggtccactaatgctgttttgcatttggtggctgttgctcactctgcgggtgtcaagttgtcaccagatgatttccaaagaatcagtgatactacaccattgatcggtgacttcaaaccttctggtaaatacgtcatggccgatttgattaacgttggtggtacccaatctgtgattaagtatctatatgaaaacaacatgttgcacggtaacacaatgactgttaccggtgacactttggcagaacgtgcaaagaaagcaccaagcctacctgaaggacaagagattattaagccactctcccacccaatcaaggccaacggtcacttgcaaattctgtacggttcattggcaccaggtggagctgtgggtaaaattaccggtaaggaaggtacttacttcaagggtagagcacgtgtgttcgaagaggaaggtgcctttattgaagccttggaaagaggtgaaatcaagaagggtgaaaaaaccgttgttgttatcagatatgaaggtccaagaggtgcaccaggtatgcctgaaatgctaaagccttcctctgctctgatgggttacggtttgggtaaagatgttgcattgttgactgatggtagattctctggtggttctcacgggttcttaatcggccacattgttcccgaagccgctgaaggtggtcctatcgggttggtcagagacggcgatgagattatcattgatgctgataataacaagattgacctattagtctctgataaggaaatggctcaacgtaaacaaagttgggttgcacctccacctcgttacacaagaggtactctatccaagtatgctaagttggtttccaacgcttccaacggttgtgttttagatgcttga

SEQ ID NO: 1389 - DNA, 534 bp, Saccharomyces cerevisiae
atgtttaatactacaccaattaatatcgacaaatggttgaaggagaacgaaggccttttgaaaccaccggtgaataattattgcttacataaagggggattcactgtgatgattgtcggtgggcctaatgaaagaaccggttatcacatcaatccaactcccgaatggttctatcaaaaaaaaggatctatgcttttaaaggttgtggatgagacagacgctgaaccaaagttcattgatatcatcatcaatgaaggcgattcatatttattgccaggaaatgttcctcacagtcctgttcggtttgctgatactgtgggtattgttgtggaacaagataggcctgggggagaaaacgataagataaggtggtactgttctcattgtcgccaagtggtccacgagagtgaactgcaaatgttagacttaggtacccaagtgaaagaagccattttagattttgaaaatgatgtcgaaaagaggacatgtttccattgcaagacgttaaactacgcacgccctcaatctaattaa

SEQ ID NO: 1390 - DNA, 936 bp, Saccharomyces cerevisiae
atgtctgtgtctgctgctcctgctattccacagtactctgtctctgactacatgaaattcgccctagccggcgccatagggtgcgggtcgactcactccagtatggtcccgatcgatgtcgttaagacgagaatccaactggaacctaccgtgtacaacaagggtatggtcggctctttcaagcaaatcatcgccggagaaggtgctggtgcgttgttgaccgggtttggtcctactttgttgggttactctatccaaggtgccttcaagttcggtggttacgaagtgttcaagaagttcttcattgacaacttgggttacgataccgcctctcgctacaagaactctgtttacatgggttctgctgccatggccgaattcttggcagacattgccttgtgtcccctagaagccactagaatcagattggtctcccaaccacagttcgctaatggactcgtcggagggttttccagaattttgaaagaagaaggtatcggctctttctacagtgggttcactccaattttgttcaagcaaattccttacaacattgctaaattcttggtctttgaacgtgcctccgagttctactacgggttcgccggtccaaaagaaaaattgtcctctacttccactactttgttgaatttgctttccggtttgactgctggtttggccgctgccattgtttcccagccagcagacactctgttgtccaaggtcaacaagactaagaaggctcctggccaatccacagtcggtttgttggctcagttggccaaacagttaggatttttcggttcctttgctgggttgcctactcgtttggtcatggttggtaccttgacctccttgcaatttggtatttatggttctttaaagagcactttgggttgcccaccaaccattgaaattggtggtggtggtcattag

SEQ ID NO: 1391 - DNA, 318 bp, Saccharomyces cerevisiae
atggaacatccagcatatacattgagtcttttgactacagccggtggccttatgggatactaccgtaagggctccattccatctctagtatctggcttagtattcggtagtgtatatgggattgccggttacttgctacatatgaatagagatggtgggctcgaaatggcattgggtgcatcgaccttactacttggtgctggtgtcataagaggcatgccttccaggttcactaaacctgtccctgtcgttttgacagctttgggtgggctcggcagttactactattataacaaatacaaggaattttacccttag

SEQ ID NO: 1392 - DNA, 279 bp, Saccharomyces cerevisiae
atggctaagagaacaaagaaggtcggtatcacaggtaaatacggtgtccgttatggttcatcattgagaagacaagttaagaagcttgaaattcaacaacatgccagatatgactgttccttctgtggtaagaagactgttaagagaggtgcagctggtatttggacttgttcctgttgtaagaagaccgttgccggtggtgcttatactgtttctactgcagctgccgctactgttagatctaccatcagaagattaagagaaatggttgaagcttaa

SEQ ID NO: 1393 - DNA, 465 bp, Saccharomyces cerevisiae
atggttcaagcagtcgcagtgttaaagggtgatgccggtgtctctggtgttgtcaagttcgaacaggcttccgaatccgagccaaccactgtctcttacgagatcgctggtaacagtcctaacgcagaacgtgggttccacattcatgagtttggagatgccaccaatggttgtgtctctgctggtcctcacttcaatcctttcaagaagacacatggtgctccaactgacgaagtcagacatgtcggtgacatgggtaacgtaaagacggacgaaaatggtgtggccaagggctccttcaaggactctttgatcaagcttatcggtcctacctccgttgtaggcagaagcgtcgttatccacgccggccaagatgacttaggtaagggtgacactgaagaatctttgaagactggtaatgccggtccaagaccagcctgtggtgtcattggtctaaccaactaa

SEQ ID NO: 1394 - DNA, 1023 bp, Saccharomyces cerevisiae
atgaccgcaccattggtagtattgggtaacccacttttagatttccaagccgacgtcacggctgaatacctggccaagtattctctaaaggaaaacgacgcaattttggtcgatgccaaatcaggcgatgctaagatggctatttttgacgagctcttacagatgccagaaacaaagcttgttgcaggtggtgctgctcaaaacactgctagaggggcagcatacgttttgggcgccggccaggtggtgtacttcggttccgtcggtaaggacaagttcagcgagagattgcttaacgaaaacgaaaaagctggtgtcaagtctatgtaccaagttcaaaatgatattggtaccggtaagtgtgccgcattaatcactggccataaccggtccttggtcactgacttgggtgctgccaatttctttactccagaccacttggacaagcattgggacttggtcgaagcagctaagctcttctacatcggtggtttccacttgaccgtgtctccagacgctatcgttaagttgggccaacatgctaaagagaacagcaaacctttcgtgttgaactttagtgctcctttcattcctcatgtcttcaaagacgcattggccagagttttgccttatgctaccgtcatcatcgctaacgaatcggaggccgaagccttttgcgacgccttccaattagactgtgccaacactgatttggaagctattgctcaaagaattgtcaaggactctccagttgaaaagactgtcatcttcacccacggtgtcgaaccaacagtggtcgtgtcctccaagggtaccagcacatatccagtcaaacctttggactcttctaagatcgtcgacaccaacggtgctggtgacgccttcgctggtggctttatggctgggttgactaaaggtgaagatttggaaacctctattgacatgggtcaatggctagctgctttgtctattcaagaagttggtccctcttacccttccgaaaaaatatcttactctaaatag

SEQ ID NO: 1395 - DNA, 678 bp, Saccharomyces cerevisiae
atgtctgacaccgaagctccagttgaagttcaagaagatttcgaagttgttgaagaattcaccccagtcgtcttggctactccaattccagaagaagtccaacaagctcaaaccgagattaagttgttcaacaaatggtcttttgaagaagttgaagttaaggatgcttctttggttgactacgttcaagttagacaaccaatctttgttgctcacaccgctggtcgttacgccaacaagagattcagaaaggctcaatgtccaatcattgaaagattgaccaactccttgatgatgaacggtagaaacaacggtaagaaattaaaggctgttagaatcatcaagcacactttggacatcatcaatgtcttgactgaccaaaacccaatccaagttgttgttgacgctatcaccaacactggtccaagagaagacaccaccagagtcggtggtggtggtgctgctagacgtcaagctgtcgatgtttctccattgagaagagttaaccaagctattgctttgttgaccattggtgccagagaagctgctttcagaaacatcaagaccattgctgaaactttggccgaagaattgatcaatgctgctaagggttcctctacttcttacgctatcaagaagaaggatgaattggaacgtgttgccaagtctaaccgttaa

SEQ ID NO: 1396 - DNA, 1080 bp, Saccharomyces cerevisiae
atgagcactaaagttgttaatgttgccgttatcggtgccggtgttgttggttcagctttcttggatcaattgttagccatgaagtctaccattacttacaatctagttcttttggctgaagctgagcgttctttaatctccaaggacttttctccattaaatgttggttctgattggaaggctgctttagcagcctccactactaaaacgttgcctttggatgatttaattgctcatttgaagacttcacctaagccagtcattttggttgataacacttccagcgcttacattgctggtttttacactaagtttgtcgaaaatggtatttccattgctactccaaacaagaaggccttttcctctgatttggctacctggaaggctcttttctcaaataagccaactaacggttttgtctatcatgaagctaccgtcggtgctggtttgcctatcatcagtttcttaagagaaattattcaaaccggtgacgaagttgaaaaaattgaaggtatcttctctggtactctatcttatattttcaacgagttctccactagtcaagctaacgacgtcaaattctctgatgttgtcaaagttgctaaaaaattgggttatactgaaccagatccaagagatgatttgaatgggttggatgttgctagaaaggttaccattgttggtaggatatctggtgtggaagttgaatctccaacttccttccctgtccagtctttgattccaaaaccattggaatctgtcaagtctgctgatgaattcttggaaaaattatctgattacgataaagatttgactcaattgaagaaggaagctgccactgaaaataaggtattgagattcattggtaaagtcgatgttgccaccaaatctgtgtctgtaggaattgaaaagtacgattactcacacccattcgcatcattgaagggatcagataacgttatttccatcaagactaagcgttacaccaatcctgttgtcattcaaggtgccggtgccggtgctgccgttactgccgctggtgttttgggtgatgttatcaagattgctcaaagactttag

SEQ ID NO: 1397 - DNA, 786 bp, Saccharomyces cerevisiae
atggctagaggaccaaagaagcatctaaaaagattagcagctccacaccactggttattggacaagttgtccggttgttacgccccaagaccatctgctggtccacacaaattgcgtgaatccttgccattgattgtctttctaagaaacagattaaagtatgctttgaacggccgtgaagtcaaggctatcttgatgcaacgtcacgttaaagtggacggtaaggttagaaccgacactacctacccagctggtttcatggatgtcatcactctagatgccaccaatgaaaacttcagattggtctacgatgtcaagggtagattcgctgtccaccgtatcaccgatgaagaagcttcttacaagttgggtaaggtcaagaaggttcaattaggtaagaagggtgttccatacgttgttacccacgatggtagaactatcagatacccagacccaaacatcaaggtcaatgacactgttaagatcgacttggcctctggtaagattactgatttcatcaagttcgatgccggtaagttggtttacgttactggtggtcgtaacttgggtcgtatcggtactatcgttcacaaggaaagacacgatggtggtttcgatttagttcacatcaaggactccttggacaacactttcgtcactagattgaacaatgtcttcgtcatcggtgaacaaggtaagccttacatttctttgccaaagggtaagggtatcaagttgtctattgctgaagaacgtgacagaagaagagctcaacaaggtttataa

SEQ ID NO: 1398 - DNA, 609 bp, Saccharomyces cerevisiae
atggctactaatattacttggcatccaaatcttacttacgacgaacgcaaggcattgagaaaacaggacggttgtactatttggttaacaggtctaagtgcgtcaggtaaaagtacaatcgcctgtgcgctagaacagttactgctccaaaaaaacttgtctgcatatagattggatggtgacaacattcgttttggattgaacaaggatttgggtttctcagaaaaggacagaaatgaaaacattcgtagaattagcgaagtttctaagctatttgctgattcatgtgctatttcaatcacctcatttatctctccatacagagttgacagagatagagctcgtgaactacataaggaggctggtttgaagttcattgaaatatttgttgatgttccattagaagtcgctgagcaaagggaccctaagggtttatacaagaaagctagggagggtgtaatcaaggagtttacaggtatttctgccccatatgaagcgccaaaagctccagagctacatttgagaaccgaccagaagacggttgaagaatgtgctaccattatttatgagtacttaatcagtgaaaaaatcatccgtaagcatttgtaa

SEQ ID NO: 1399 - DNA, 417 bp, Saccharomyces cerevisiae
atgtccaccgattctattgtcaaggcttctaactggagattagtcgaagttggccgtgtggttttgatcaagaagggtcaatccgcaggtaaattggccgctatcgtcgaaattattgaccaaaagaaggttttgattgacggtccaaaagctggtgttccacgtcaagccatcaacttgggtcaagttgtcttaactccattgacctttgctctaccaagaggtgctagaactgctaccgtttctaagaagtgggctgctgctgctgtctgcgaaaagtgggctgcttcatcttgggctaagaagattgctcaacgtgaaagacgtgctgctttgactgactttgaaagattccaagttatggttttaagaaagcaaaagagatacactgtcaagaaggctttggctaaggcttaa

SEQ ID NO: 1400 - DNA, 504 bp, Saccharomyces cerevisiae
atgattatttacaaggatatcttctctaacgacgaattgttgtctgatgcttacgacgctaagttagttgatgacgttatctacgaagccgactgtgctatggtcaatgtcggaggtgacaacatcgatatcggtgctaacccatctgctgaaggtggtgacgatgatgttgaagaaggtgctgaaatggtcaacaacgttgtccactctttccgtctacaacaaaccgcttttgacaagaagtccttcttgacctacattaagggttacatgaaggctgttaaagctaagttgcaagaaactaacccagaagaagttcctaaattcgaaaagggtgctcaaacttacgtcaagaaggttattggttctttcaaggactgggagttcttcactggtgaatccatggacccagatgccatggttgtcatgttgaactaccgtgaagatggtaccactccatttgttgccatctggaagcacggtattgtggaagaaaagatctaa

SEQ ID NO: 1401 - DNA, 1080 bp, Saccharomyces cerevisiae
atgggtgttgaacaaatcttaaagagaaagaccggtgtcatcgttggtgaagatgtccacaacttattcacttacgctaaggaacacaagttcgctattccagctattaacgtcacctcttcttctactgccgtcgctgctttagaagctgctagagacagcaagtccccaatcattttgcaaacctctaacggtggtgctgcttacttcgctggtaagggtatctctaacgaaggtcaaaatgcttccatcaagggtgctattgccgctgcccactacatcagatccattgctccagcttacggtatcccagttgtcttacactctgaccactgtgccaagaagttgttgccatggttcgatggtatgttggaagctgatgaagcttacttcaaggaacacggtgaaccattattctcctcccacatgttggatttgtctgaagaaaccgatgaagaaaacatctctacttgtgtcaagtacttcaagagaatggccgctatggaccaatggttagaaatggaaatcggtattaccggtggtgaagaagatggtgttaacaacgaaaacgctgacaaggaagacttgtacaccaagccagaacaagtttacaacgtctacaaggctttgcacccaatctctccaaacttctccattgctgctgctttcggtaactgtcacggtttgtacgctggtgacatcgctttgagaccagaaatcttggctgaacaccaaaagtacaccagagaacaagttggttgcaaggaagaaaagccattgttcttggtcttccacggtggttccggttctactgtccaagaattccacactggtattgacaacggtgttgtcaaggtcaacttggacactgactgtcaatacgcttacttgactggtatcagagactacgtcttgaacaagaaggactacataatgtccccagtcggtaacccagaaggtccagaaaagccaaacaagaagttcttcgacccaagagtctgggttagagaaggtgaaaagaccatgggtgctaagatcaccaagtctttggaaactttccgtaccactaacactttataa

SEQ ID NO: 1402 - DNA, 1005 bp, Saccharomyces cerevisiae
atgttgtcaagagtagctaaacgtgcgttttcctctacagttgccaacccttataaagtgactgttttgggtgcaggcggtggtattggacaaccattgtctttgcttctaaagcttaaccataaagtcacggacttaagactgtacgacctaaagggcgcaaaaggtgttgccaccgatttgtctcatattccaacaaactccgtggtcaaggggtttactccagaagagccagacggattgaacaacgctttaaaggacacagacatggttttaattcctgctggtgtgcccagaaagcctggtatgacacgtgatgacttgttcgccatcaacgcaagcatcgttcgcgatttggcagcagcaaccgccgaatccgctcccaatgctgccattctggtcatttccaacccagtcaattctaccgttccaattgtcgcccaagtcttgaaaaacaagggtgtttacaacccaaagaaattgttcggtgtgactaccttggactctattagagccgccagattcatctcagaagtcgagaacaccgatccaactcaggaaagggttaacgtcatcggtggacattctggtattaccatcatcccattgatttcgcaaacaaaccataagttgatgtctgatgacaagagacacgaattgattcacagaatacagtttggtggtgacgaagtcgtcaaagcaaagaatggtgctggctctgctacgttgtcaatggcccatgctggtgctaaattcgctaacgctgttttgtccggtttcaaaggcgaaagagacgtcatcgagccttccttcgtggactctcccttgttcaaatccgaaggcatcgaattctttgcatctccggtcactttgggcccagatggtattgaaaagatccatccaataggtgagttatcttcagaagaagaagaaatgctacaaaaatgtaaagaaaccttgaagaagaatatcgaaaagggtgtcaactttgttgctagtaaatag

SEQ ID NO: 1403 - DNA, 597 bp, Saccharomyces cerevisiae
atgtctgcaatgatggtcaagttaggactgaataagtcggctctattactgaaaccctccgccttttcaagagcagctgccttgagctcctcgaggaggctgctttttaatacagctagaacaaacttcctttctacctcaccattgaagaatgtggccagtgaaatgaacaccaaagcggcaattgctgaagaacaaatattaaacaagcaaagagcaaagagacctatttctccacatctgaccatttaccagccacaattaacttggtacctgtcttctcttcaccgtatttcgttggtgcttatgggactaggtttctacttgtttactatactcttcggagtctctggtttattaggtcttggattgactaccgaaaaggtttctaattggtaccatcagaagttttccaagattaccgaatggtccatcaagggttcctttgcttacttatttgcaattcactatggtggcgccattagacacttgatctgggataccgctaaggaattgacattgaaaggcgtttacagaactggttacgctctcattggtttcaccgccgttctcggtacttatttattaactttatga

SEQ ID NO: 1404 - DNA, 744 bp, Saccharomyces cerevisiae
atgccaaagttagttttagttagacacggtcaatccgaatggaacgaaaagaacttattcaccggttgggttgatgttaaattgtctgccaagggtcaacaagaagccgctagagccggtgaattgttgaaggaaaagaaggtctacccagacgtcttgtacacttccaagttgtccagagctatccaaactgctaacattgctttggaaaaggctgacagattatggattccagtcaacagatcctggagattgaacgaaagacattacggtgacttacaaggtaaggacaaggctgaaactttgaagaagttcggtgaagaaaaattcaacacctacagaagatccttcgatgttccacctcccccaatcgacgcttcttctccattctctcaaaagggtgatgaaagatacaagtacgttgacccaaatgtcttgccagaaactgaatctttggctttggtcattgacagattgttgccatactggcaagatgtcattgccaaggacttgttgagtggtaagaccgtcatgatcgccgctcacggtaactccttgagaggtttggttaagcacttggaaggtatctctgatgctgacattgctaagttgaacatcccaactggtattccattggtcttcgaattggacgaaaacttgaagccatctaagccatcttactacttggacccagaagctgccgctgctggtgccgctgctgttgccaaccaaggtaagaaataa

SEQ ID NO: 1405 - DNA, 249 bp, Saccharomyces cerevisiae
atggttttagttcaagatttattgcacccaactgcagcttctgaagcaagaaagcacaaattaaagacattagtccaaggtccaagatcgtacttcctagacgttaagtgcccaggttgtttgaacatcactacagttttctcacacgcccaaactgcagttacctgcgaatcctgctcaacaattttgtgcaccccaactggtggtaaggcaaagctttctgagggtacatctttcagaagaaagtaa

SEQ ID NO: 1406 - DNA, 1026 bp, Saccharomyces cerevisiae
atgcaatacaaaaaatcattagttgcctccgccttagttgctacatctttagctgcctatgctccaaaggacccgtggtccactttaactccatcagctacttacaagggtggtataactgattactcttctactttcggtattgctgttgaaccaattgccactactgcttcctccaaggctaagagagccgctgctatctctcaaattggtgacggtcaaatccaagccactaccaaaaccactgctgctgctgtttctcaaattggtgacggtcaaatccaagccactactaaaaccaaagctgctgctgtctctcaaattggtgacggccaaatccaagccaccaccaagactacctcagctaagactaccgctgcagccgtctcccaaattggtgacggtcaaattcaagccactactaaaaccaaagctgctgctgtctctcaaattggtgacggtcaaatccaagccactaccaaaacaactgctgcagctgtctctcaaattggtgacggtcaaatccaagccactactaaaaccactgctgctgctgtttctcaaattggtgacggtcaaatccaagccaccaccaatactactgttgctccagtctcccaaatcactgatggccaaatccaagccacaactttaacttctgcaaccattataccatctccagctccagctccaattactaatggcactgacccagtaactgctgaaacatgtaaaagcagtggcactttagaaatgaacttaaagggtggtatcctgactgacggtaaaggtagaattggttctatcgttgccaacagacaattccaattcgatggtcctccaccacaagctggtgctatctatgctgctggttggtccatcaccccagaaggtaacttggccatcggtgaccaggatactttttaccaatgtttgtcaggaaacttctacaacttatacgatgagcacattggaactcaatgtaatgcagtccacctacaagctatcgatttgctcaactgttaa

SEQ ID NO: 1407 - DNA, 555 bp, Saccharomyces cerevisiae
atggctagatacggtgctacttccactaaccctgctaaatccgcttctgctcgtggttcctacttgcgtgtttctttcaagaacaccagagaaactgctcaagctattaacggttgggaattgaccaaggctcaaaaatacttggaacaagttttggaccaccaaagagctattcctttcagaagatttaactcttccatcggtagaactgctcaaggtaaggaatttggtgtcaccaaggctagatggccagctaagtctgttaagttcgttcaaggtttgttgcaaaacgccgctgccaacgctgaagctaaaggtttggatgctactaaattgtacgtttctcatatccaagttaaccaagctccaaagcaaagaagaagaacttacagagctcacggtagaatcaacaagtacgaatcttctccatcccacattgaattagttgtcactgaaaaggaagaagctgtcgccaaggctgctgaaaagaaggtcgttagattgacttctagacaaagaggtagaatcgccgcccaaaagcgtattgctgcttaa

SEQ ID NO: 1408 - DNA, 1284 bp, Saccharomyces cerevisiae
atgcgtaagtgtaaaatttttgttggtaactctcacccagagttgggtaatatggtttgccaaagattaggtatcgaaccagctccatgtacattaaaaaaatttgcaaatggtgaaacgtcagttcaaatcggtgtatctgttcgtgacgaagatgtgtatgtcattcaatctggttctccatccataaatgatgacattatggaactgttgattttagtttctgcctgtaggggcggatctgctaggaaaattacagcagtcattcctcaatttccttactctaaacaatgtaaaatgaagagacacagaggcgctattactgcaaggatgttggccaatctgttggtcatggctggcgctgatcatgttgtgtctatggaccttcatgcttctcaaatgcaggggtttttcaccaaaccagtcgataacctatacgggggccctagtttagcgaaatggattagagaaaatgttgaagactatgaagatgcagtagttgtctctaagaatccaggtggtactaaaagagttacagccctggcggattctttgaagatcaactttgctatgatccatactgatcgtcgtcgttctaaggatctgtattctcaaaacaaggatttgcaacaactaaagttgagaaagcaatcaatgttgaggaaaaatagaccgatcatcagacaaggtgaccatccaaatgaggaggaaaacattattttaagtaacggtattcaaactgctaggatccgtaacggccacgttatcggtgacgatgaggcagacgatgatgaagacgctatcttagaatctgacagcgaattgcattctattgatggcttagactcgcatggcttgggcggtacatatgatgctgtcgactccgaagacgaagaggaaatcccagttctctatagggaacaactgattacattggtcggaaacgtccgtggtcgctctgccatcattctagatgatatgattgatagacctgggtcatttattagcgctgctgaacatttggtgcaaaattgtggtgccaaaaaggtttatgttgttgctactcacggtatattcactggagactgtttggaagaacttgaaaagtccgatgccattgacacaattgtggtcacaaatacatatccgatttctggcgaacgcatagctgggtccaagaaattggttactatcgatgtttctccaattttcgcagaatgtatccgtcgtgatcattatggtgagagtatttccgttttatttgactctttggcagctctgtaa

SEQ ID NO: 1409 - DNA, 1098 bp, Saccharomyces cerevisiae
atgaaattatccgctctattagctttatcagcctccaccgccgtcttggccgctccagctgtccaccatagtgacaaccaccaccacaacgacaagcgtgccgttgtcaccgttactcagtacgtcaacgcagacggcgctgttgttattccagctgccaccaccgctacctcggcggctgctgatggaaaggtcgagtctgttgctgctgccaccactactttgtcctcgactgccgccgccgctactacctctgccgccgcctcttcttcctcctcttcctcttcctcctcttcctcttcttcctctgttggttctggagattttgaagatggtaccatttcctgttctgatttcccatccggacaaggtgctgtctccttggactggttaggtctaggcggctgggcttccatcatggacatgaacggtaacaccgccacctcttgtcaagacggatactactgttcttacgcttgttctccaggttacgctaagacccaatggccttctgaacaaccttccgatggtagatccgttggtggtttatactgtaagaacggtaaattataccgttccaacaccgacactaacagtttgtgtgtagaaggtcaaggctctgctcaagctgttaacaaggtctccggctccattgctatctgtggtaccgattatccaggttctgaaaacatggtcgttcctaccgtagttggcgctggttcctcccaaccaatcaacgtcatcaaggaggactcctactatcaatggcaaggtaagaagacctctgcccaatactacgttaacaacgctggtgtctctgtggaagatggttgtatctggggtactgagggttccggtgtcggtaactgggccccagttgtcttgggtgctggttacactgatggtatcacttacttgtccatcattccaaacccaaacaacaaagaagcaccaaactttaacatcaagatcgttgccaccgatggctctaccgtcaatggtgcttgctcttacgaaaatggtgtctactctggctctggctctgacggttgtactgtttcagttacttctggttctgctaactttgtcttctactag

SEQ ID NO: 1410 - DNA, 264 bp, Saccharomyces cerevisiae
atggaaaacgataagggccaattagtcgaactttacgttccaagaaaatgttctgctaccaacagaatcatcaaggctgatgaccacgcatctgttcaaatcaacgtcgctaaggttgatgaagaaggacgtgctatcccaggtgagtacgttacctacgctttgtccggttacgttagatccagaggtgaatctgatgattctttgaaccgtttggctcaaaacgatggtttgttaaagaacgtctggtcttactcacgttaa

SEQ ID NO: 1411 - DNA, 1920 bp, Saccharomyces cerevisiae
atgtctaaagctgtcggtattgatttaggtactacctactcctgtgttgctcacttctctaatgatcgtgttgacattattgccaacgaccaaggtaacagaaccactccatctttcgttggtttcactgatactgaaagattgattggtgacgctgctaagaaccaagctgctatgaacccagctaacactgttttcgacgctaagcgtttgatcggtagaaacttcaatgacccagaagtccaaggtgatatgaagcacttcccattcaagttgatcgatgttgacggtaagccacaaattcaagttgaatttaagggtgaaaccaagaactttaccccagaacaaatctcctccatggtcttgggtaagatgaaggaaactgccgaatcttacttgggtgccaaggtcaatgacgctgtcgtcactgtcccagcttacttcaacgattctcaaagacaagctaccaaggatgctggtaccattgctggtttgaatgtcttgcgtattattaacgaacctaccgccgctgccattgcttacggtttggacaagaagggtaaggaagaacacgtcttgattttcgacttgggtggtggtactttcgatgtctctttgttgtccattgaagacggtatctttgaagttaaggccaccgctggtgacacccatttgggtggtgaagattttgacaacagattggtcaaccacttcatccaagaattcaagagaaagaacaagaaggacttgtctaccaaccaaagagctttgagaagattaagaactgcttgtgaaagagccaagagaactttgtcttcctccgctcaaacttccgttgaaattgactctttgttcgaaggtatcgatttctacacttccatcaccagagccagattcgaagaattgtgtgctgacttgttcagatctactttggacccagttgaaaaggtcttgagagatgctaaattggataaatctcaagtcgatgaaattgtcttggtcggtggttctaccagaattccaaaggtccaaaaattggtcactgactacttcaacggtaaggaaccaaacagatctatcaacccagatgaagctgttgcttacggtgctgctgttcaagctgctattttgactggtgacgaatcttccaagactcaagatctattgttgttggatgtcgctccattatccttgggtattgaaactgctggtggtgtcatgaccaagttgattccaagaaactctaccattccaactaagaaatccgaagttttctctacttatgctgacaaccaaccaggtgtcttgattcaagtctttgaaggtgaaagagccaagactaaggacaacaacttgttgggtaagttcgaattgagtggtattccaccagctccaagaggtgtcccacaaattgaagtcactttcgatgtcgactctaacggtattttgaatgtttccgccgtcgaaaagggtactggtaagtctaacaagatcactattaccaacgacaagggtagattgtccaaggaagatatcgaaaagatggttgctgaagccgaaaaattcaaggaagaagatgaaaaggaatctcaaagaattgcttccaagaaccaattggaatccattgcttactctttgaagaacaccatttctgaagctggtgacaagctagagcaagctgacaaggacgctgtcactaagaaggctgaagaaactattgcttggttagacagcaacaccactgctaccaaggaagaattcgatgaccaattgaaggaattgcaagaggttgccaacccaatcatgtctaaattgtaccaagctggtggtgctccagaaggcgcagctccaggtggtttcccaggtggtgctcctccagctccagaagctgaaggtccaactgtcgaagaagttgattaa

SEQ ID NO: 1412 - DNA, 801 bp, Saccharomyces cerevisiae
atgttgaacgtgctattgagaaggaaggccttttgtttggtgacgaagaagggtatggctactgccacaacagctgcagctacgcatacccccagattgaaaacttttaaagtttacagatggaatccagacgagccaagtgctaaacctcatttacagtcatatcaagtggatctgaatgactgtgggcccatggtacttgatgcgctgttaaagatcaaagacgaacaggattctaccctaacttttagaagatcatgtagagaaggtatctgcggttcatgtgccatgaacattggcggtagaaacacgctagcttgtatatgtaagatcgaccagaacgaatccaaacaactcaagatctatccattaccccacatgtttattgtcaaagatttggtacctgatttaactaacttctaccaacaatacaaatctatccaaccttacttacagagatcatcgtttccaaaggatggaacggaagtgctacaaagtattgaagatcgtaagaaactggatggtctttacgaatgtattctgtgtgcatgctgctctacttcatgtccatcgtactggtggaaccaagaacagtatttgggccctgccgtgctaatgcaagcctaccgttggctaattgactctagagaccaagctacaaagacaagaaaggccatgctaaacaactccatgtcattgtacagatgtcacaccatcatgaactgtactagaacttgtccaaagggcttgaatcctggtttggctattgctgaaattaagaaatctttggcatttgcctag

SEQ ID NO: 1413 - DNA, 771 bp, Saccharomyces cerevisiae
atggctccaggtaagaaagttgctccagctccattcggtgctaagtccactaagtctaacaaggctaagaacccattgactcactctactccaaagaacttcggtattggccaagctgtccaaccaaagagaaacttgtccagatacgtcaaatggccagaatatgtcagattgcaaagacaaaagaagatcttgtccatcagattgaaggttcctccaaccattgctcaattccaatacactttggacagaaacaccgctgctgaaaccttcaagttgttcaacaagtacagaccagaaaccgctgctgaaaagaaggaaagattgaccaaggaagctgccgctatcgctgaaggtaagtctaagcaagacgcttctccaaagccatacgctgttaagtacggtttgaaccatgttgtctctttgattgaaaacaagaaggccaagttggttttgattgctaacgacgtcgacccaattgaattggttgttttcctaccagctttgtgtaagaagatgggtgttccatacgccattatcaagggtaaggctagattgggtactttggttaaccaaaagacttctgctgttgccgctttgaccgaagtcagagccgaagacgaagctgctttggctaagttggtttccaccattgacgctaacttcgctgacaaatacgatgaagtcaagaagcactggggcggtggtatccttggtaacaaggctcaagctaagatggacaagagagctaagacttccgactccgcttaa

SEQ ID NO: 1414 - DNA, 432 bp, Saccharomyces cerevisiae
atgtctagatctggtgttgctgttgctgatgaatcccttaccgctttcaatgacttgaaattgggtaaaaaatacaaatttattttattcggattgaacgatgctaaaaccgaaatcgttgtcaaggaaacctctactgacccatcttacgatgccttcttagagaaattgccagaaaacgactgtctttacgccatttacgattttgaatacgaaattaatggtaatgaaggtaagagatccaagattgttttcttcacttggtctccagacactgctccagtcagatctaagatggtctatgcatcctccaaggatgccttaagaagagccttaaacggtgtctctaccgatgttcaaggtactgatttttccgaagtttcttacgattctgttttggaaagagtcagcagaggcgctggttctcattaa

SEQ ID NO: 1415 - DNA, 3618 bp, Saccharomyces cerevisiae
atgcgtactttcactgactttgtttctggcgcacctattgtaaggagtcttcagaaaagcaccataaggagatatgggtacaatttggcaccccacatgtttttgttactacacgtagatgagctatcgattttttctgcataccaagcaagtttacctggcgaaaagaaagtcgacacagagcggctgaagcgtgatctatgcccacgtaaacccattgagataaagtacttttcacagatatgtaacgatatgatgaacaaaaaggaccgattgggtgatgttttagctacagcgcaacgtatacgtcgacgatacaacaagaacggttcatcggagcctcgactaaagacgcttgacggactcacttccgagcgctggattcaatggttaggccttgaaagcgactaccattgttcattctctagtactcggaatgcggaagacgtagtggcaggtgaggcggcgagttcagatcatgatcaaaaaatttcaagagtaacgcgaaaaaggccccgagagcccaagagtacaaacgatatcctcgtcgcaggccagaaactctttggcagctcctttgaattcagggacttgcatcagttgcgcttatgtcatgaaatatacatggcagacacaccctctgtggcagtacaggccccaccgggctatggtaagacggagttatttcatctccccttgatagcactggcgtctaagggcgacgtgaaatatgtgtcgtttctgtttgtaccgtacacagtgttgcttgctaattgcatgatcaggttgggccgatgcggttgcttgaatgtggcccctgtaagaaactttattgaagaaggttgcgatggcgttactgatttatacgtggggatctacgatgatcttgctagcactaatttcacagacaggatagctgcgtgggagaatattgttgagtgcacctttaggaccaacaacgtaaaattgggttacctcattgtagatgagtttcacaactttgaaacggaggtctaccggcagtcgcaatttgggggcataactaaccttgattttgacgcttttgagaaagcaatctttttgagcggcacagcacctgaggctgtagctgatgctgcgttgcagcgtattgggcttacgggactggccaagaagtcgatggacatcaacgagctcaaacggtcggaagatctcagcagaggtctatccagctatccaacacggatgtttaatctaatcaaggagaaatccgaggtgcctttagggcatgttcataaaatttggaagaaagtggaatcacagcccgaagaagcactgaagcttcttttagccctctttgaaattgaaccagagtcgaaggccattgtagttgcaagcacaaccaacgaagtggaagaattggcctgctcttggagaaagtattttagggtggtatggatacacgggaagctgggtgctgcagaaaaggtgtctcgcacaaaggagtttgtcactgacggtagcatgcgagttctcatcggaacgaaattagtgactgaaggaattgacattaagcaattgatgatggtgatcatgcttgataatagacttaatattattgagctcattcaaggcgtagggagactaagagatgggggcctctgttatctattatctagaaaaaacagttgggcggcaaggaatcgtaagggtgaattaccaccgattaaggaaggctgtataaccgaacaggtacgcgagttctatggacttgaatcaaagaaaggaaaaaagggccagcatgttggatgctgtggctccaggacagacctgtctgctgacacagtggaactgatagaaagaatggacagattggctgaaaaacaggcgacagcttccatgtcgatcgttgcgttaccgtctagcttccaggagagcaatagcagtgacaggtgcagaaagtattgcagcagtgatgaggacagcaacacgtgcattcatggtagtgctaatgccagtaccaatgcgactaccaactccagcactaatgctactaccactgccagcaccaacgtcaggactagtgctactaccactgccagcatcaacgtcaggactagtgcgactaccactgaaagtaccaactccagcactaatgctactaccactgccagcaccaacgtcaggactagtgctactaccactgccagcatcaacgtcaggactagtgcgactaccactgaaagtaccaactccaacactagtgctactaccaccgaaagtaccgactccaacactagtgctactaccaccgaaagtaccgactccaacactagtgctactaccactgctagcaccaactccagcactaatgccactaccactgctagcaccaactccagcactaatgccactaccactgaaagtaccaacgctagtgccaaggaggacgccaataaagatggcaatgctgaggataatagattccatccagtcaccgacattaacaaagagtcgtataagcggaaagggagtcaaatggttttgctagagagaaagaaactgaaagcacaatttcccaatacttccgagaatatgaatgtcttacagtttcttggatttcggtctgacgaaattaaacatcttttcctctatggtattgacatatacttctgcccagagggagtattcacacaatacggattatgcaagggctgtcaaaagatgttcgggctctgtgtctgttgggctggccagaaagtatcgtatcggaggatggcttgggaagcactagctgtggagagaatgctgcgaaatgacgaggaatacaaagaatacttggaagacatcgagccatatcatggggaccctgtagggtatttgaaattttttagcgtaaaaaggggagagatctactctcagatacagagaaattatgcttggtacctggccattactagaagaagagaaacaattagtgtattggattcgacaagaggcaagcaagggagccaagttttccgcatgtctggaaggcagatcaaagagttgtattataaagtatggagcaacttgcgtgaatcgaagacagaggtgctgcagtactttttgaactgggacgagaaaaagtgccgggaagaatgggaggcaaaagacgatacggtctttgtggaagcgctcgagaaagttggagtttttcagcgtttgcgttccatgacgagcgctggactgcagggtccgcagtacgtcaagctgcagtttagcaggcatcatcgacagttgaggagcagatatgaattaagtctaggaatgcacttgcgagatcagcttgcgctgggagttaccccatctaaagtgccgcattggacggcattcctgtcgatgctgatagggctgttctacaataaaacatttcggcagaaactggaatatcttttggagcagatttcggaggtgtggttgttaccacattgggttgatttggcaaacgttgaagttctcgctgcagataacacgagggtaccgctgtacatgctgatggtagcggttcacaaagagctggatagcgatgatgttccagacggtagatttgatataatattactatgtagagattcgagcagagaagttggagagtga

SEQ ID NO: 1416 - DNA, 252 bp, Saccharomyces cerevisiae
atggctgatcaagaaaactctccactacatacagttggtttcgatgctagatttccccaacaaaaccaaacaaagcattgttggcaatcttatgtggattatcacaagtgtgttaatatgaagggcgaagattttgctccgtgcaaggtcttttggaagacctataacgccttatgtcccctagactggatcgaaaaatgggatgatcaaagagaaaaaggtattttcgcaggtgatatcaactcagactaa

SEQ ID NO: 1417 - DNA, 312 bp, Saccharomyces cerevisiae
atggttactcaattcaaaactgccagcgaattcgactctgcaattgctcaagacaagctagttgtcgtagatttctacgccacttggtgcggtccatgtaaaatgattgctccaatgattgaaaaattctctgaacaatacccacaagctgatttctataaattggatgtcgatgaattgggtgatgttgcacaaaagaatgaagtttccgctatgccaactttgcttctattcaagaacggtaaggaagttgcaaaggttgttggtgccaacccagcggctattaagcaagccattgctgctaatgcttaa

SEQ ID NO: 1418 - DNA, 1692 bp, Saccharomyces cerevisiae
atgtctgaaattactttgggtaaatatttgttcgaaagattaaagcaagtcaacgttaacaccgttttcggtttgccaggtgacttcaacttgtccttgttggacaagatctacgaagttgaaggtatgagatgggctggtaacgccaacgaattgaacgctgcttacgccgctgatggttacgctcgtatcaagggtatgtcttgtatcatcaccaccttcggtgtcggtgaattgtctgctttgaacggtattgccggttcttacgctgaacacgtcggtgttttgcacgttgttggtgtcccatccatctctgctcaagctaagcaattgttgttgcaccacaccttgggtaacggtgacttcactgttttccacagaatgtctgccaacatttctgaaaccactgctatgatcactgacattgctaccgccccagctgaaattgacagatgtatcagaaccacttacgtcacccaaagaccagtctacttaggtttgccagctaacttggtcgacttgaacgtcccagctaagttgttgcaaactccaattgacatgtctttgaagccaaacgatgctgaatccgaaaaggaagtcattgacaccatcttggctttggtcaaggatgctaagaacccagttatcttggctgatgcttgttgttccagacacgacgtcaaggctgaaactaagaagttgattgacttgactcaattcccagctttcgtcaccccaatgggtaagggttccattgacgaacaacacccaagatacggtggtgtttacgtcggtaccttgtccaagccagaagttaaggaagccgttgaatctgctgacttgattttgtctgtcggtgctttgttgtctgatttcaacaccggttctttctcttactcttacaagaccaagaacattgtcgaattccactccgaccacatgaagatcagaaacgccactttcccaggtgtccaaatgaaattcgttttgcaaaagttgttgaccactattgctgacgccgctaagggttacaagccagttgctgtcccagctagaactccagctaacgctgctgtcccagcttctaccccattgaagcaagaatggatgtggaaccaattgggtaacttcttgcaagaaggtgatgttgtcattgctgaaaccggtacctccgctttcggtatcaaccaaaccactttcccaaacaacacctacggtatctctcaagtcttatggggttccattggtttcaccactggtgctaccttgggtgctgctttcgctgctgaagaaattgatccaaagaagagagttatcttattcattggtgacggttctttgcaattgactgttcaagaaatctccaccatgatcagatggggcttgaagccatacttgttcgtcttgaacaacgatggttacaccattgaaaagttgattcacggtccaaaggctcaatacaacgaaattcaaggttgggaccacctatccttgttgccaactttcggtgctaaggactatgaaacccacagagtcgctaccaccggtgaatgggacaagttgacccaagacaagtctttcaacgacaactctaagatcagaatgattgaaatcatgttgccagtcttcgatgctccacaaaacttggttgaacaagctaagttgactgctgctaccaacgctaagcaataa

SEQ ID NO: 1419 - DNA, 1098 bp, Saccharomyces cerevisiae
atggatttggtcttagaagtcgctgaccattatgtcttagacgacttgtacgctaaagttctgcccgcttcgttggcagctaatattcctgtcaagtggcagaaattgctagggttgaacagtgggttcagcaattctacgattttgcaggagactttgaactccaagaatgccgtcaaagaatgtagaaggttctacgggcaggtgccattcctgtttgatatgtcgacgacgtcttttgcatcgctattgcctcgttccagcatcttgagagaattcctctcactatgggttattgttacgatctttggtttactactttacttattcacggctagtctcagctacgtgtttgtgtttgacaagtcgattttcaaccatcctcgttacttgaaaaaccaaatggcaatggaaatcaagttggcagtcagtgctatcccatggatgtcgatgttgaccgttccatggtttgttatggaattgaacggccattctaaactatacatgaagattgattatgaaaaccacggtgtaaggaagctcattatcgagtacttcactttcatctttttcactgattgcggtgtgtatttagcgcacagatggttgcattggccaagggtctaccgtgctctgcacaagcctcatcacaagtggctggtctgcacacctttcgcatctcattctttccatcctgtagacgggtttttgcaatccatctcgtaccacatctacccattgattctgccattacacaaggtttcttatttgattctgttcacttttgttaacttttggactgttatgattcatgacggtcaatacctatcaaacaatcctgccgtcaacggtactgcctgccacacggttcaccatctatatttcaactacaactacggtcaattcaccactctgtgggacagactagggggttcttaccgtagaccagatgactcattgtttgatcctaagttaagagatgctaaggagacctgggacgctcaagttaaggaagttgaacatttcatcaaggaggtcgaaggtgatgataatgatagaatctatgaaaacgacccaaataccaagaagaacaactga

SEQ ID NO: 1420 - DNA, 1788 bp, Saccharomyces cerevisiae
atgcctaccgtctccgtgaacaagcagcaattatttgatcttctaggcaaaaactacacttcccaagagttcgatgaattatgttttgaattcggtatggaaatggacgaagacaccacagaggaggccttgaaaaccggggaggagccggaattgaagcttgatatcagtgccaatcgttacgatttgctttgtatcgaaggtatttcacagtcgctgaacgaatacttggaacgtaaagaaagacctgactataaattaagcaagccaaccactaagttgatcatcgacaaatcaacggagcaaattagaccttttgctaccgctgctgtattgagaaatatcaagcttaacgaaaaatcttacgcttcttttattgccttgcaagataaattacatgccaatctatgtagaaacagaagcttggttgccatgggtactcacgatttagattcaattgaaggtccattccattacagagctctaccaccaaaggacatcaagttcgtaccattgaatcaaacccaagagtttactggtgacaaattgatcgagttttataaatctccagaacagaaaaacaacatagggagatacgttcacattattgaggattctccagtcttcccagttattatggacagcaaagatcgtgtttgctccctgccaccattaatcaatagtgaacattcgaagatctctgtgaacacccgtaacattttgattgatataaccgccaccgataagaccaaagccgagatcgttttgaacatattaactacaatgttctcacgttattgtgacgaaccattcacggttgagcctgtagaaattgtctctgaacacaatggccaatcccgtttggcgccaaacttcaacgatagaattatggatgtctccattaagtacatcaactcctgtcttggcctagatcaatccgctgatgaaattgctcattgtctaaagaagatgtcgttgcatgccgttcaatcaaaggaagacaaggacatcttgcacgttgacattccggtaactagacctgatattttgcacgcttgtgatataatggaagatgccgctgtcggttatggtttcaataatttgccaaagggtgagaaattatccaatgccaacttcattgccaaaccattaccaatcaacaaggtttctgatattttcagagttgcatcctctcaagccacgtgggttgaggttttaccattgaccttatgttcgcacgatgaaaactttaaatttctaagacaatccgacaatggtgatttagctgtcaaattggccaacccaaagactttggaataccaagttgttagaaccactttattgcctggtatcttaaagacagtcaaggaaaacagaaaacattccttgccaatcaaagtctttgaaaccggtgacgttgtatttaaagacgacaaactagaaaggaaggcgtacaatgaacgtcactgggctgccatctacgtgggtaagaattctgggtttgaaatcattcaagggttattgggtaaaatcatgcaaacttttagaacagagtggattgcagactacggtgctgctgcttctggcagaggttactggattgaagaagacgattctgtgaaaacctacttcccaggtagaggtgccaaggtcatgttcagatccaaagaaggcgctgagccaaagcaaatcggccacttgggtgtcttgcatcctgaagtcatgatgaatttcgacgttccattcgctgcatcctttgtagaggttaatgccgaagtcttcctataa

SEQ ID NO: 1421 - DNA, 366 bp, Saccharomyces cerevisiae
atggccccaaacacttccagaaagcaaaagattgccaagacctttaccgtcgatgtctcttctccaactgaaaacggtgtcttcgacccagcttcctacgctaagtacttgatcgaccacatcaaggtcgaaggtgctgtcggtaacttgggtaacgctgtcactgtcactgaagatggtaccgttgttactgttgtttccactgccaagttctctggtaagtacttgaagtacttgacaaagaagtacttgaagaagaaccaattgagagactggatcagatttgtctctaccaagaccaacgaatacagattggccttctaccaagtcactccagaagaagacgaagaagaagacgaagaataa

SEQ ID NO: 1422 - DNA, 666 bp, Saccharomyces cerevisiae
atggctagaagaccagctagatgttacagataccaaaagaacaagccttacccaaagtctagatacaacagagctgttccagactccaagatcagaatctacgatttgggtaagaagaaggctaccgtcgatgaattcccattgtgtgtccatttggtttccaacgaattggaacaattgtcttctgaagctttggaagctgctcgtatctgtgccaacaagtacatgactactgtctccggtagagatgctttccacttaagagtcagagtccatcctttccatgtcttgagaatcaacaagatgttgtcttgtgccggtgcggatagattgcaacaaggtatgagaggtgcttggggtaagccacacggtttggccgctcgtgtcgacattggtcaaattatcttctctgtcagaaccaaggacagcaacaaggatgttgtcgttgaaggtttgagaagagccagatacaagttcccaggtcaacaaaagattattttgtctaagaagtggggtttcaccaacttggacagaccagaatacttgaagaagagagaagctggtgaagtcaaggacgacggtgctttcgttaagttcttgtccaagaagggttctttggaaaacaacatcagagaattcccagaatactttgctgctcaagcttaa

SEQ ID NO: 1423 - DNA, 531 bp, Saccharomyces cerevisiae
atgtctgacttagttaacaagaaattcccagctggcgactacaaattccaatacattgctatcagccaaagtgatgctgacagtgaatcttgtaagatgccacaaacagttgaatggtccaaattaatttctgaaaacaagaaggttatcattaccggtgctccagctgctttctccccaacctgtactgtcagccatattccaggttacatcaactacttggatgaattagttaaggaaaaggaagttgaccaagtgatcgttgttactgttgacaacccgttcgctaaccaagcgtgggctaagagtttaggtgttaaggacaccacacacatcaagtttgcctccgacccaggctgtgctttcaccaaatccattggtttcgaattagccgtcggtgacggtgtttactggagtggtagatgggccatggttgttgaaaacggtatcgttacttacgctgccaaggaaaccaacccaggtaccgatgtgaccgtttcctcagtcgaaagtgtcttggctcatttgtag

SEQ ID NO: 1424 - DNA, 402 bp, Saccharomyces cerevisiae
atgcaattttctactgtcgcttctatcgccgctgtcgccgctgtcgcttctgccgctgctaacgttaccactgctactgtcagccaagaatctaccactttggtcaccatcacttcttgtgaagaccacgtctgttctgaaactgtctccccagctttggtttccaccgctaccgtcaccgtcgatgacgttatcactcaatacaccacctggtgcccattgaccactgaagccccaaagaacggtacttctactgctgctccagttacctctactgaagctccaaagaacaccacctctgctgctccaactcactctgtcacctcttacactggtgctgctgctaaggctttgccagctgctggtgctttgttggctggtgccgctgctttgttgttgtaa

SEQ ID NO: 1425 - DNA, 822 bp, Saccharomyces cerevisiae
atgtccaacccatttgatttgttaggtaacgacgtcgaagacgctgacgttgtcgttttgccaccaaaggaaatcgtcaagagcaacacttcctccaagaaggctgacgtcccacctccatccgctgacccatccaaggctagaaagaacagaccaagaccttctggtaacgagggtgctatcagagacaagaccgctggtagaagaaacaacagatcaaaggatgtcactgactctgccaccaccaagaagtccaacaccagaagggccactgaccgccactctagaactggtaagactgacaccaagaagaaggttaaccaaggttggggtgatgacaagaaggaattgagtgctgaaaaggaagctcaagccgatgctgctgctgaaattgctgaagacgctgcagaagctgaagacgctggtaagccaaagaccgctcaattgtctttgcaagactacttgaaccaacaagctaacaaccagttcaacaaggtcccagaagctaagaaggttgaattagacgctgaaagaattgaaactgctgaaaaggaagcttacgttccagcaaccaaggtcaagaacgtcaaatctaagcaattgaagaccaaggagtacttggaatttgatgccacttttgttgaatctaacactagaaagaacttcggtgacagaaacaacaacagcagaaacaacttcaacaaccgtcgtggtggtagaggcgctagaaagggtaacaacactgctaacgctactaactctgctaacaccgttcaaaagaaccgtaacattgacgtttctaacttgccatctttggcttaa

SEQ ID NO: 1426 - DNA, 1089 bp, Saccharomyces cerevisiae
atgagatctttaaatacccttttactttctctctttgtcgcaatgtccagtggtgctccactactaaaaattcgtgaagagaagaattcttctttgccatcaatcaaaatttttggtaccggcggtactatcgcttccaagggttcgacaagtgcaacaacggcgggttatagcgtgggattaaccgtaaatgatttaatagaagccgtcccatctttagctgagaaggcaaatctggactatcttcaagtgtctaacgttggttcaaattctttaaactatacgcatctgatcccattgtatcacggtatctccgaggcactagcctctgatgactacgctggtgcggttgtcactcatgggaccgacactatggaggagacagctttcttcttagatttgaccataaattcagagaagccagtatgtatcgcaggcgctatgcgtccagccactgccacgtctgctgatggcccaatgaatttatatcaagcagtgtctattgctgcttctgagaaatcactgggtcgtggcacgatgatcactctaaacgatcgtattgcctctgggttttggacaacgaaaatgaatgccaactctttagatacattcagagcggatgaacagggatatttaggttacttttcaaatgatgacgtggagttttactacccaccagtcaagccaaatggatggcaattttttgacatttccaacctcacagacccttcggaaattccagaagtcattattctgtactcctatcaaggcttgaatcctgagctaatagtaaaggccgtcaaggacctgggcgcaaaaggtatcgtgttggcgggttctggagctggttcctggactgctacgggtagtattgtaaacgaacaactttatgaagagtatggtataccaattgttcacagcagaagaacagcagatggtacagttcctccagatgatgccccagagtacgccattggatctggctacctaaaccctcaaaaatcgcgtattttgctacaattatgtttgtactccggctacggcatggatcagattaggtctgttttttctggcgtctacggtggttaa

SEQ ID NO: 1427 - DNA, 459 bp, Saccharomyces cerevisiae
atgcaaattttcgtcaagactttaaccggtaagactattaccctggaagttgaatcttctgacactattgacaatgtcaagtccaagatccaagacaaggaaggtattccacctgaccaacaaagattgatctttgctggtaagcaattggaagatggtagaactttgtccgactacaacatccaaaaggaatctactctacacttggtcttgagattgagaggtggtggtaagaagagaaagaagaaggtctacaccaccccaaagaagatcaagcacaagcacaagaaggtcaagttggctgtcttgtcctactacaaggtcgatgctgaaggtaaggttaccaaattgagaagagaatgtagcaacccaacttgtggtgctggtgttttcttggctaaccacaaggacagattgtactgtggtaagtgtcattccgtctacaaggttaacgcttaa

SEQ ID NO: 1428 - DNA, 267 bp, Saccharomyces cerevisiae
atgggtaagggtactccttcattcggtaaacgtcacaacaagtcccacactttgtgtaacagatgtggtcgtcgttctttccatgttcaaaagaagacctgttcctcctgtggttatccagctgctaagaccagatcttacaactggggtgccaaggctaagagaagacacactactggtactggtagaatgagatacttgaaacacgtttcaagaagattcaagaacggtttccaaaccggctctgcttctaaggcttctgcttaa

SEQ ID NO: 1429 - DNA, 3135 bp, Saccharomyces cerevisiae
atgtctgattcccagcaatccattaaggttctagaagaactattccagaagttatctgttgccactgctgacaacagacacgaaatcgcttctgaagtcgcttctttcttgaatggtaacatcattgaacatgatgttccagaacacttcttcggtgaattggccaagggtatcaaggacaagaagaccgctgctaacgccatgcaagctgttgctcacattgctaaccaatctaacttgtctccatctgttgaaccatacatcgtccaattggttccagctatctgtaccaacgcaggtaacaaggacaaagaaattcaatctgttgcttccgaaactttgatttccatcgttaacgctgttaacccagttgccatcaaagctttgttgccacatttgactaacgctattgtcgaaactaacaaatggcaagaaaagattgctattttggcagctatctctgctatggtcgatgctgctaaggatcaagttgccctaagaatgccagaattgattccagtcttgtctgaaaccatgtgggacaccaagaaggaagtcaaggctgctgctactgccgccatgaccaaggctaccgaaactgttgacaacaaggatattgaacgtttcattccaagtttgattcaatgtattgctgacccaactgaagttccagaaaccgttcatttgttaggtgctactactttcgttgctgaagttactccagctactttgtccatcatggtcccattgttgtccagaggtttgaacgaaagagaaaccggtatcaagcgtaagtctgctgttattattgacaacatgtgtaagttggtcgaagacccacaagttattgctcctttcttgggtaaattgttgccaggtttgaagagtaactttgctaccattgctgacccagaagccagagaagttactttgagagctttgaagactttgagaagagttggtaacgttggtgaagacgatgctattccagaagtttctcacgctggtgacgtttctactactttgcaagtcgttaacgaattgttgaaggacgaaaccgttgctccaagatttaagattgtcgtcgagtacattgccgccattggtgctgatttgatcgatgaaagaatcattgaccaacaagcttggttcacccacatcaccccatacatgactatcttcttgcacgaaaagaaggccaaggacatcttggacgaattcagaaagagagctgtcgacaacattccagttggtccaaacttcgacgacgaagaagacgaaggtgaagacttatgtaactgtgaattctctttggcttatggtgctaaaatcttgttgaacaagacccaattaagattgaagagagccagaagatatggtatctgtggtccaaacggttgtggtaagtccactttaatgagagctattgccaacggtcaagttgatggtttcccaacccaagaagaatgtagaaccgtctacgtcgaacacgacattgatggtactcactctgacacttccgtcttggatttcgttttcgaatctggtgttggtactaaagaagctatcaaggacaaattgattgaattcggtttcaccgatgaaatgattgctatgccaatctctgctttgtctggtggttggaagatgaagttggctctagctagagctgtgttgagaaatgctgatatcttgttgttagatgaaccaactaaccatttggataccgtcaacgttgcttggttagttaactacttgaacacctgtggtatcacttctatcactatttctcacgactccgttttcttagataacgtctgtgaatatattattaactacgaaggtttgaagttgagaaagtacaagggtaactttaccgaattcgttaagaagtgtccagctgctaaggcttacgaagaattatccaacactgatttggaattcaagttcccagaaccaggttacttggaaggtgttaagactaagcaaaaggctattgtcaaggttaccaacatggaattccaatatccaggtacctctaagccacaaatcactgacattaacttccaatgttctttgtcttccagaattgctgtcattggtccaaatggtgctggtaagtctactttgattaacgtcttgactggtgaactattaccaacctctggtgaagtctacacccacgaaaattgtcgtatcgcttacattaagcaacacgcttttgctcatatcgaatctcatttggacaagactccatctgaatatatccaatggagattccaaaccggtgaagatagagaaaccatggacagagctaacagacaaatcaacgaaaacgatgctgaagctatgaacaagatcttcaagattgaaggtacccctagaagaattgccggtatccactccagaagaaagttcaagaacacttacgaatatgaatgttctttcttattgggtgaaaacattggtatgaaatctgaaagatgggttccaatgatgtccgtcgacaacgcttggattccaagaggtgaattggttgaatctcactctaagatggttgctgaagttgatatgaaggaagctttggcttctggtcaattccgtccattaaccagaaaagaaattgaagaacattgttccatgttgggtttggacccagaaattgtttctcactccagaattagaggtttgtctggtggtcaaaaggttaagttggtcttagctgccggtacatggcaaagacctcacttgattgtcttagatgaacctaccaactatctggacagagattctttgggtgctttgtctaaggctttgaaggaatttgaaggtggtgttattatcattactcactctgctgaattcacaaagaacttgactgaagaagtctgggccgtcaaggacggtagaatgactccatctggtcacaactgggttagtggtcaaggtgctggtccaagaatcgaaaagaaggaagacgaagaagataaattcgatgctatgggtaacaagattgccggtggtaagaagaagaagaagttgtcttctgcggaattgagaaagaagaagaaggaaagaatgaagaagaagaaggaattgggtgatgcttacgtttcttctgacgaagaattctaa

SEQ ID NO: 1430 - DNA, 1719 bp, Saccharomyces cerevisiae
atgttgagatcatccgttgttcgtagtcgcgctactttaaggcctttattgcgtcgtgcttactcctctcataaagaattgaaattcggtgtagaaggaagagcctcccttcttaagggtgtcgaaactttagctgaagcggttgctgctactttgggtccaaagggtagaaacgttttaatcgaacagcctttcggtcctccaaagattactaaggatggtgttacagttgccaaatctattgtgttgaaggacaagtttgaaaatatgggtgccaagttactacaagaagttgcctccaaaaccaatgaggctgctggtgacggtactacttctgctactgtcttaggtagagccatcttcacagaatccgtcaaaaatgtcgccgctggttgtaaccctatggatttgagaaggggttctcaagttgcagttgaaaaagtgattgaatttttgagcgccaacaagaaagaaattaccacatctgaggaaattgctcaagtagcaaccatttctgccaatggggactctcatgttggtaagttactagcttcagctatggaaaaggttggaaaagaaggtgtcatcactatcagagaaggtagaacattggaagatgaacttgaggttactgaaggtatgaggtttgatcgtggttttatttctccatacttcatcactgatccaaagtcgagcaaggtggaatttgaaaagccattgctattgttgagtgaaaagaaaatttcttccattcaagatatcttgccagctttggaaatttccaatcaaagcagaagacctttgttgatcattgctgaagatgttgacggtgaagctcttgcggcttgtattttgaacaagttgaggggtcaagttaaggtttgtgctgtgaaggcgcctggtttcggtgataatagaaagaatacaattggtgatattgcagtcttgacgggcggtactgtttttactgaggagttggatttgaaaccagaacaatgtaccatagaaaacttgggttcttgtgactctattaccgttactaaggaagacaccgttatcctgaacggtagtggtccaaaggaagctattcaagagagaattgaacaaatcaaaggctccatcgacattaccaccacaaattcatatgagaaggagaaactgcaagagcgtttggccaaattgtccgggggtgttgctgtcatcagggtcggtggtgcatctgaagttgaagttggtgaaaagaaggaccgttacgatgatgctttgaacgctaccagagctgcagttgaggaaggtatcttgccaggtggtggtactgccttagtgaaggcatctagagttttggatgaagttgttgtcgacaatttcgatcaaaaattgggtgtcgatatcataagaaaggccattacaagaccagccaagcagatcattgaaaacgctggtgaagaaggttcagttatcatcggcaaattgattgatgaatatggtgatgattttgccaagggttacgatgcctctaagtcagaatacaccgacatgttagccactggtatcatcgatccatttaaagtggttagatccggtttagttgatgcttctggtgttgcctcactattagctactaccgaagttgctattgttgatgccccagaaccaccagcagctgctggcgctggtggtatgccaggtggtatgccaggaatgccaggtatgatgtaa

SEQ ID NO: 1431 - DNA, 204 bp, Saccharomyces cerevisiae
atggattctaagaccccagtcaccttagctaaagtcatcaaagttttaggccgtaccggttctcgtggtggtgttacccaagttcgtgttgagttcttggaagacacttcccgtaccattgtcagaaatgtcaagggtccagttagagaaaacgacattttggtcttgatggaatctgaacgtgaagctcgtcgtttgcgttaa

SEQ ID NO: 1432 - DNA, 1689 bp, Saccharomyces cerevisiae
atgtcactcctttacatcattcttctattcacacaattcttactactgccaaccgatgcctttgataggtctgctaacacaaatattgctgtttattggggtcaaaactcagcaggaacgcaagaatccttagctacttactgtgaatcttctgatgctgatattttcctattatctttcttgaaccaatttccaacccttggtttgaactttgccaacgcatgctctgatactttttctgatggcttacttcactgcacccagattgctgaagatattgaaacttgccagtccctaggaaagaaagttctattatcattaggtggtgcatctggtagctacctcttttcagatgattctcaagcggaaacttttgcacaaactttatgggatactttcggtgaaggtacaggtgccagtgagagaccatttgactcagcagtcgttgatggttttgattttgatattgaaaacaacaacgaagtaggctatagtgcgttagctaccaagttaagaactttgtttgccgaaggtacaaagcaatattacctttctgccgcaccacaatgtccatacccggatgcttctgttggtgacttgttggaaaatgcagacattgattttgcgttcatccaattttacaataattactgcagtgtgagtggtcaattcaattgggatacttggttaacctatgctcaaactgtatccccaaataaaaatatcaaactgttcttaggtttacctggttctgcttctgctgctggctctggttatatttctgacacttctttattggaatcaactattgcagatattgcctcttcaagttcttttggtggtattgcgttatgggatgcatctcaagccttttccaacgagctaaatggtgaaccatatgttgagattttgaagaatttgctaacaagtgctagccagaccgccactactacagttgccacctcaaaaacctcagcagcctcaacttcatctgcttcaacttcatctgcttcaacttctcagaaaaagaccacacaatctacgacatctacacaaagtaaaagcaaagttactttatctccaactgcaagcagcgctatcaaaacatcaattactcaaactacaaaaacattgacgagtagcaccaagacaaaatctagtctaggtaccaccacaacagagagcactttaaattcagttgctatcacaagtatgaaaactactctatcttcccaaataaccagtgctgccttggtgacccctcaaacaactactactagcatagtttcttcggccccaattcaaacagctatcactagtactctttcgccagcaacgaagagttcttctgtcgtttccctacagacagctactactagtacgctttccccaacaacgaccagtacaagctcaggtagtacaagctcaggtagtacaagctcagacagtacagctcgtacattggctaaagaattgaatgctcaatatgcggctggtaaattgaacggtaaatctacctgtactgaaggtgaaattgcatgctctgctgatgggaagttcgccgtttgtgatcatagcgcttgggtttacatggaatgtgcttctggaaccacatgttatgcttatgactccggcgactcagtctatacccaatgtaatttctcttatttggaaagcaattacttttaa

SEQ ID NO: 1433 - DNA, 192 bp, Saccharomyces cerevisiae
atggctaaagttcatggttctctagctcgtgctggtaaagtcaagtctcaaacaccaaaggttgaaaaaaccgaaaagccaaagaagcctaagggtcgtgcttacaaaagattattgtacaccagaagattcgttaacgttaccttggttaacggtaagagaagaatgaacccaggtccatccgtccaataa

SEQ ID NO: 1434 - DNA, 1335 bp, Saccharomyces cerevisiae
atgccatctcatttcgatactgttcaactacacgccggccaagagaaccctggtgacaatgctcacagatccagagctgtaccaatttacgccaccacttcttatgttttcgaaaactctaagcatggttcgcaattgtttggtctagaagttccaggttacgtctattcccgtttccaaaacccaaccagtaatgttttggaagaaagaattgctgctttagaaggtggtgctgctgctttggctgtttcctccggtcaagccgctcaaacccttgccatccaaggtttggcacacactggtgacaacatcgtttccacttcttacttatacggtggtacttataaccagttcaaaatctcgttcaaaagatttggtatcgaggctagatttgttgaaggtgacaatccagaagaattcgaaaaggtctttgatgaaagaaccaaggctgtttatttggaaaccattggtaatccaaagtacaatgttccggattttgaaaaaattgttgcaattgctcacaaacacggtattccagttgtcgttgacaacacatttggtgccggtggttacttctgtcagccaattaaatacggtgctgatattgtaacacattctgctaccaaatggattggtggtcatggtactactatcggtggtattattgttgactctggtaagttcccatggaaggactacccagaaaagttccctcaattctctcaacctgccgaaggatatcacggtactatctacaatgaagcctacggtaacttggcatacatcgttcatgttagaactgaactattaagagatttgggtccattgatgaacccatttgcctctttcttgctactacaaggtgttgaaacattatctttgagagctgaaagacacggtgaaaatgcattgaagttagccaaatggttagaacaatccccatacgtatcttgggtttcataccctggtttagcatctcattctcatcatgaaaatgctaagaagtatctatctaacggtttcggtggtgtcttatctttcggtgtaaaagacttaccaaatgccgacaaggaaactgacccattcaaactttctggtgctcaagttgttgacaatttaaagcttgcctctaacttggccaatgttggtgatgccaagaccttagtcattgctccatacttcactacccacaaacaattaaatgacaaagaaaagttggcatctggtgttaccaaggacttaattcgtgtctctgttggtatcgaatttattgatgacattattgcagacttccagcaatcttttgaaactgttttcgctggccaaaaaccatga

SEQ ID NO: 1435 - DNA, 2337 bp, Saccharomyces cerevisiae
atgctgtctgcacgttctgccatcaagagacccattgttcgtggtcttgcgacagtctccaacttgactagagattcaaaagtcaaccaaaacttattagaagatcattcttttattaactacaagcagaatgtggaaacgctggatatcgtaagaaaaagattaaacaggccatttacctacgcggaaaagattttgtacggtcacttggatgaccctcatggtcaagatattcagagaggtgtttcatacctaaaattaagaccagatcgtgttgcctgtcaagatgctactgctcaaatggctattttacaatttatgtccgctggtttaccacaggttgctaagccagtcactgtccactgtgaccatttgattcaagcacaagttggtggtgaaaaagatttgaagagagctatagatctaaacaaggaagtttatgatttcttggcctctgccactgcgaaatataacatgggtttctggaagccaggttccggtatcattcaccaaattgttctggaaaactacgctttcccaggtgctttgatcattggtactgactcccatacaccaaatgctggtggtttaggtcaattggctattggtgttggtggtgctgatgccgttgatgttatggcaggtcgtccatgggaattgaaggctccaaagatcttaggtgttaagttgactggtaagatgaacggttggacttctccaaaggatattattttgaaattggctggtatcacaactgtcaaaggtggtactggtaaaattgttgaatatttcggtgatggtgttgacaccttctccgctactggtatgggtaccatttgtaatatgggtgctgaaatcggtgctaccacatctgttttcccattcaacaaatctatgattgaatatttggaagcaactggtcgtggtaagatcgctgactttgctaaattataccacaaggacctattatctgctgataaggatgctgaatacgatgaggtcgtcgaaattgacttgaacactctggaaccatacatcaatgggccatttacccccgatttggctactccagtttctaagatgaaggaagttgctgttgctaataactggccattggatgtcagagtcggtttgatcggttcttgtaccaattcctcttatgaagatatgtctcgttcagcatccattgtcaaggatgctgctgctcatggtttgaaatccaagaccattttcactgttactccaggttctgaacaaatcagagccactattgaacgtgatggccaattagaaaccttcaaagaatttggtggtatcgttttggcaaacgcctgtggcccatgtattggtcaatgggatcgtagagatatcaagaaaggtgacaagaatactatcgtttcctcttacaacagaaatttcacttctagaaatgatggtaacccacaaactcatgcttttgttgcatctccagaattagtaactgcgttcgccattgcgggtgatttgagattcaaccctctaacagacaaattaaaggacaaggatggtaatgagttcatgttgaaaccaccacatggtgatggtttgcctcaaagaggttatgatgctggtgagaacacttaccaagctccacctgcagaccgtagcaccgttgaagttaaagtttctccaacttcagaccgtctacaactgttgaaaccattcaaaccttgggatggtaaggatgctaaagacatgccaatcttgattaaggccgtcggtaagacaactactgatcatatttctatggctggtccatggttgaaatacagaggtcatttagaaaacatttctaataactatatgattggtgctattaatgctgaaaacaagaaggctaactgtgttaaaaatgtatatactggtgaatacaaaggtgttccagacactgctagagattacagagaccaaggtatcaagtgggttgttattggtgatgaaaactttggtgaaggttcctctcgtgaacacgctgctttggaaccaagattcttgggcggtttcgctatcatcacaaagtctttcgctcgtatccatgaaactaacttgaaaaaacaaggtctattgccattgaacttcaagaacccagctgactatgacaagatcaaccctgatgacagaatcgatattctgggtctagctgaattggctccaggtaagcctgtaacaatgagagttcatccaaagaatggtaagccatgggatgctgtgttgacccatactttcaacgatgagcaaattgaatggttcaaatatggttctgccttaaataaaattaaggccgatgagaagaaataa

SEQ ID NO: 1436 - DNA, 237 bp, Saccharomyces cerevisiae
atggctagagaaatcaccgacatcaaacaatttttggaattgaccagaagagctgacgttaagaccgccactgttaagattaacaaaaaattgaacaaggccggtaagccattcagacaaaccaagttcaaggttagaggctcttcttctttgtacactttggttatcaacgatgctggtaaggctaagaaattgatccaatctttgccaccaactttgaaggttaacagattataa

SEQ ID NO: 1437 - DNA, 939 bp, Saccharomyces cerevisiae
atgggaggcattcgtgaaaagaaagctgaatactttgctaaattaagagaatacttggaagaatacaagtctttgttcgttgttggtgttgacaatgtttcttcccaacaaatgcacgaagtcagaaaggaattgagaggcagagctgtcgtcttgatgggtaagaacaccatggttagaagagccatcagaggtttcttatccgacttgccagacttcgaaaagttgttgccttttgtcaaaggtaacgttggtttcgttttcactaacgaaccattgactgaaatcaagaacgttattgtctctaacagagttgctgctccagccagagctggtgccgttgctccagaagacatctgggttagagccgtcaacactggtatggaaccaggtaagacttctttcttccaagctttgggtgtcccaaccaagattgccagaggtaccattgaaattgtttctgatgtcaaggtcgttgacgccggtaacaaggtcggtcaatctgaagcttccttgttgaacttgttgaacatctctccattcactttcggtttgactgttgttcaagtttacgacaacggtcaagtgttcccatcttctatcttggatatcaccgatgaagaattggtttctcacttcgtttccgctgtcagcaccattgcttctatctctttggctattggttacccaaccttgccatctgtcggtcacactttgatcaacaactacaaggacttgttagctgttgccattgctgcttcctaccactaccctgaaattgaagatttggttgacagaattgaaaacccagaaaagtacgctgctgctgctccagctgctacctccgctgcttccggtgacgctgctccagctgaagaagctgctgctgaagaagaagaagaatctgatgacgacatgggtttcggtttattcgattaa

SEQ ID NO: 1438 - DNA, 5631 bp, Saccharomyces cerevisiae
atgaacactgatcaacaaccttatcagggccaaacggactatacccagggaccaggtaacgggcaaagtcaggaacaagactatgaccaatatggccagcctttgtatccttcacaagctgatggttactacgatccaaatgtcgctgctggtactgaagctgatatgtatggtcaacaaccaccaaacgagtcttacgaccaagactacacaaacggtgaatactatggtcaaccgccaaatatggctgctcaagacggtgaaaacttctcggattttagcagttacggccctcctggaacacctggatatgatagctatggtggtcagtataccgcttctcaaatgagttatggagaaccaaattcgtcgggtacctcgactccaatttacggtaattatgacccaaatgctatcgctatggctttgccaaatgaaccttatcccgcttggactgctgactctcaatctcccgtttcgatcgagcaaatcgaagatatctttattgatttgaccaacagactcgggttccaaagagactccatgagaaatatgtttgatcattttatggttctcttggactctaggtcctcgagaatgtctcctgatcaagctttactatctttacatgccgactacattggtggcgatactgctaactataaaaaatggtattttgctgctcagttagatatggatgatgaaattggttttagaaatatgagtcttggaaaactctcaaggaaggcaagaaaagctaagaagaaaaacaagaaagcaatggaagaggccaatcccgaagacactgaagaaactttaaacaaaattgaaggcgacaactccctagaggctgctgattttagatggaaggccaagatgaaccagttgtctcccctggaaagagttcgtcatatcgccttatatctgttatgttggggtgaagctaatcaagtcagattcactgctgaatgtttatgttttatctacaagtgtgctcttgactacttggattcccctctttgccaacaacgccaagaacctatgccagaaggtgatttcttgaatagagtcattacgccaatttatcatttcatcagaaatcaagtttatgaaattgttgatggtcgttttgtcaagcgtgaaagagatcataacaaaattgtcggttatgatgatttaaaccaattgttctggtatccagaaggtattgcaaagattgttcttgaagatggaacaaaattgatagaactcccattggaagaacgttatttaagattaggcgatgtcgtctgggatgatgtattcttcaaaacatataaagagacccgtacttggttacatttggtcaccaacttcaaccgtatttgggttatgcatatctccattttttggatgtactttgcatataattcaccaacattttacactcataactatcaacaattggtcgacaaccaacctttggctgcttacaagtgggcatcttgcgcattaggtggtactgtcgcaagtttgattcaaattgtcgctactttgtgtgaatggtcattcgttccaagaaaatgggctggtgctcaacatctatctcgtagattctggtttttatgcatcatctttggtattaatttgggtcctattatttttgtttttgcttacgacaaagatacagtctactccactgctgcacacgttgttgctgctgttatgttctttgttgcggttgctaccatcatattcttctccattatgccattgggggggttgtttacgtcatatatgaaaaaatctacaaggcgttatgttgcatctcaaacattcactgctgcatttgcccctctacatgggttagatagatggatgtcctatttagtttgggttactgtttttgctgccaaatattcagaatcgtactactttttagttttatctttgagagatccaattagaattttgtccaccactgcaatgaggtgtacaggtgaatactggtggggtgcggtactttgtaaagtgcaacccaagattgtcttaggtttggttatcgctaccgacttcattcttttcttcttggatacctacttatggtacattattgtgaataccattttctctgttgggaaatctttctatttaggtatttctatcttaacaccatggagaaatatcttcacaagattgccaaaaagaatatactccaagattttggctactactgatatggaaattaaatacaaaccaaaggttttgatttctcaagtatggaatgccatcattatttcaatgtacagagaacatctcttagccatcgaccatgtacaaaaattactatatcatcaagttccatctgaaatcgaaggtaaaagaactttgagagctcctaccttctttgtttctcaagatgacaataattttgagactgaatttttccctagggattcagaggctgagcgtcgtatttctttctttgctcaatctttgtctactccaattcccgaaccacttccagttgataacatgccaacgttcacagtattgactcctcactacgcggaaagaattctgctgtcattaagagaaattattcgtgaagatgaccaattttctagagttactcttttagaatatctaaaacaattacatcccgttgaatgggaatgttttgttaaggatactaagattttggctgaagaaaccgctgcctatgaaggaaatgaaaatgaagctgaaaaggaagatgctttgaaatctcaaatcgatgatttgccattttattgtattggttttaaatctgctgctccagaatatacacttcgtacgagaatttgggcttctttgaggtcgcagactctatatcgtaccatttcagggttcatgaattattcaagagctatcaaattactgtatcgtgtggaaaatcctgaaattgttcaaatgtttggtggtaatgctgaaggcttagaaagagagctagaaaagatggcaagaagaaagtttaaatttttggtctctatgcagagattggctaaattcaaaccacatgaactggaaaatgctgagtttttgttgagagcttacccagacttacaaattgcctacttggatgaagagccacctttgactgaaggtgaggagccaagaatctattccgctttgattgatggacattgtgaaattctagataatggtcgtagacgtcccaagtttagagttcaattatctggtaacccaattcttggtgacggtaaatctgataaccaaaaccatgctttgattttttacagaggtgaatacattcaattaattgatgccaaccaagataactacttggaagaatgtctgaagattagatctgtattggctgaatttgaggaattgaacgttgaacaagttaatccatatgctcccggtttaaggtatgaggagcaaacaactaatcatcctgttgctattgttggtgccagagaatacattttctctgaaaactctggtgtgctgggtgatgtggccgctggtaaagaacaaacttttggtacattatttgcgcgtactttatctcaaattggtggtaaattgcattatggtcatccggatttcattaatgctacgtttatgaccactagaggtggtgtttccaaagcacaaaagggtttgcatttaaacgaagatatttatgctggtatgaatgctatgcttcgtggtggtcgtatcaagcattgtgagtattatcaatgtggtaaaggtagagatttgggtttcggtacaattctaaatttcactactaagattggtgctggtatgggtgaacaaatgttatctcgtgaatattattatctgggtacccaattaccagtggaccgtttcctaacattctattatgcccatcctggtttccatttgaacaacttgttcattcaattatctttgcaaatgtttatgttgactttggtgaatttatcttccttggcccatgaatctattatgtgtatttacgataggaacaaaccaaaaacagatgttttggttccaattgggtgttacaacttccaacctgcggttgattgggtgagacgttatacattgtctattttcattgttttctggattgccttcgttcctattgttgttcaagaactaattgaacgtggtctatggaaagccacccaaagatttttctgccacctattatcattatcccctatgttcgaagtgtttgcgggccaaatctactcttctgcgttattaagtgatttagcaattggtggtgctcgttatatatccaccggtcgtggttttgcaacttctcgtataccattttcaattttgtattcaagatttgcaggatctgctatctacatgggtgcaagatcaatgttaatgttgctgttcggtactgtcgcacattggcaagctccactactgtggttttgggcctctctatcttcattaatttttgcgcctttcgttttcaatccacatcagtttgcttgggaagatttctttttggattacagggattatatcagatggttatcaagaggtaataatcaatatcatagaaactcgtggattggttacgtgaggatgtctagggcacgtattactgggtttaaacgtaaactggttggcgatgaatctgagaaagctgctggtgacgcaagcagggctcatagaaccaatttgatcatggctgaaatcataccctgtgcaatttatgcagctggttgttttattgccttcacgtttattaatgctcaaaccggtgtcaagactactgatgatgatagggtgaattctgttttacgtatcatcatttgtaccttggcgccaatcgccgttaacctcggtgttctattcttctgtatgggtatgtcatgctgctctggtcccttatttggtatgtgttgtaagaagacaggttctgtaatggctggaattgcccacggtgttgctgttattgtccacattgcctttttcattgtcatgtgggttttggagagcttcaactttgttagaatgttaatcggagtcgttacttgtatccaatgtcaaagactcatttttcattgcatgacagcgttaatgttgactcgtgaatttaaaaacgatcatgccaatacagccttctggactggtaagtggtatggtaaaggtatgggttacatggcttggacccagccaagtagagaattaaccgccaaggtaattgagctttcagaatttgcagctgattttgttctaggtcatgtgattttaatctgtcaactgccactcattataatcccaaaaatagataaattccactcgattatgctattctggctaaagccctctcgtcaaattcgtcccccaatttactctctgaagcaaactcgtttgcgtaagcgtatggtcaagaagtactgctctttgtactttttagtattggctatttttgcaggatgcattattggtcctgctgtagcctctgctaagatccacaaacacattggagattcattggatggcgttgttcacaatctattccaaccaataaatacaaccaataatgacactggttcccaaatgtcaacttatcaaagtcactactatactcatacgccatcattaaagacctggtcaactataaaataa

SEQ ID NO: 1439 - DNA, 384 bp, Saccharomyces cerevisiae
atggctaaacaatcattagacgtttcctccgacagaagaaaggctagaaaggcttatttcaccgccccatcctcccaacgtcgtgttttgctatctgctccattatctaaggagttgagagctcaatacggtatcaaggccttgccaatcagaagagatgatgaagttttggttgttcgtggttccaagaagggtcaagaaggtaagatttcatctgtttacagattgaaatttgccgttcaagttgacaaggttaccaaggaaaaggtcaacggtgcttccgttccaattaacttgcacccatccaagcttgtcattactaaattacatttggacaaggacagaaaagctttgatccaaagaaagggcggtaagttggaataa

SEQ ID NO: 1440 - DNA, 1188 bp, Saccharomyces cerevisiae
atgttgagaactcaagccgccagattgatctgcaactcccgtgtcatcactgctaagagaacctttgctttggccacccgtgctgctgcttacagcagaccagctgcccgtttcgttaagccaatgatcactacccgtggtttgaagcaaatcaacttcggtggtactgttgaaaccgtctacgaaagagctgactggccaagagaaaagttgttggactacttcaagaacgacacttttgctttgatcggttacggttcccaaggttacggtcaaggtttgaacttgagagacaacggtttgaacgttatcattggtgtccgtaaagatggtgcttcttggaaggctgccatcgaagacggttgggttccaggcaagaacttgttcactgttgaagatgctatcaagagaggtagttacgttatgaacttgttgtccgatgccgctcaatcagaaacctggcctgctatcaagccattgttgaccaagggtaagactttgtacttctcccacggtttctccccagtcttcaaggacttgactcacgttgaaccaccaaaggacttagatgttatcttggttgctccaaagggttccggtagaactgtcagatctttgttcaaggaaggtcgtggtattaactcttcttacgccgtctggaacgatgtcaccggtaaggctcacgaaaaggcccaagctttggccgttgccattggttccggttacgtttaccaaaccactttcgaaagagaagtcaactctgacttgtacggtgaaagaggttgtttaatgggtggtatccacggtatgttcttggctcaatacgacgtcttgagagaaaacggtcactccccatctgaagctttcaacgaaaccgtcgaagaagctacccaatctctatacccattgatcggtaagtacggtatggattacatgtacgatgcttgttccaccaccgccagaagaggtgctttggactggtacccaatcttcaagaatgctttgaagcctgttttccaagacttgtacgaatctaccaagaacggtaccgaaaccaagagatctttggaattcaactctcaacctgactacagagaaaagctagaaaaggaattagacaccatcagaaacatggaaatctggaaggttggtaaggaagtcagaaagttgagaccagaaaaccaataa

SEQ ID NO: 1441 - DNA, 171 bp, Saccharomyces cerevisiae
atggctcacgaaaacgtctggttctctcacccaagaagatacggtaaaggctcccgtcaatgtcgtgtttgttcttcccacaccggtttgatcagaaagtacggcttaaacatctgtcgtcaatgtttcagagaaaaagctaacgacattggtttcaacaaattcagataa

SEQ ID NO: 1442 - DNA, 237 bp, Saccharomyces cerevisiae
atgttgtgccaacagatgattagaacgacagctaagagaagtagcaatatcatgaccagacctattatcatgaagaggtcagtacacttcaaagacggtgtgtatgaaaatatcccattcaaagtcaaaggaagaaagacaccttacgccttatctcatttcgggttcttcgctattggatttgctgttccatttgttgcctgctatgttcaattgaaaaagtcaggtgctttttaa

SEQ ID NO: 1443 - DNA, 342 bp, Saccharomyces cerevisiae
atggccggtttaaaagacgttgtcactcgtgaatacaccatcaacttgcacaaaagactacatggtgtcagtttcaaaaagagagctccaagagctgtgaaggaaatcaagaaattcgccaaattacacatgggtactgaagatgtccgtctagccccagaattgaaccaagctatctggaaaagaggtgttaagggtgttgaatacagattgagattgagaatctccagaaagagaaacgaagaagaagatgccaagaacccattgttttcctacgtcgaaccagttttggttgcctctgctaagggtctacaaaccgttgtcgttgaagaagatgcttaa

SEQ ID NO: 1444 - DNA, 768 bp, Saccharomyces cerevisiae
atggctgtcggaaagaataagagactatccaagggtaagaaaggtcaaaagaagagagtcgttgacccatttaccagaaaggaatggttcgacattaaagctccatccacttttgaaaacagaaatgttggtaagactttagttaacaagtccactggtttgaagagtgcttcagatgctttgaaaggtagagttgtcgaagtttgcttggctgacttacagggttctgaagaccactctttcagaaaaatcaaattaagagttgacgaagtccaaggtaagaatttattgaccaacttccacggtatggacttcactactgataaattgagatccatggttagaaagtggcaaactttgatcgaagctaacgttactgttaagacttctgatgattacgttttgagaatctttgctatcgccttcaccagaaagcaagctaaccaagttaagagacactcttacgctcaatcttcccatatcagagctatcagaaaggttatttccgaaatcttgactaaggaagttcaaggatctaccttggcccaattgacctccaagttgattccagaagttatcaacaaggaaattgaaaacgccaccaaggacattttcccactacaaaacatccatgttagaaaggttaagttgttgaaacaaccaaagttcgatgtcggtgctttgatggctttgcacggtgaaggttctggtgaagaaaagggtaagaaggttaccggtttcaaggacgaagtcttggaaactgtgtaa

SEQ ID NO: 1445 - DNA, 531 bp, Saccharomyces cerevisiae
atgactgcccaacaagccccaaagtggtatccttccgaagacgttgctgccccaaagaaaaccagaaaggctgttcgcccacaaaagttgcgtgcctctctagttccaggcactgttttgatcttgctagctggccgtttcagaggtaagagagttgtctacttgaaacatctagaagacaacactctattggtcactggtccattcaaggtcaatggtgttccattgagaagagtcaacgctcgttatgtcattgctacctctaccaaagtctccgtggaaggtgtcaacgttgaaaaattcaacgttgaatactttgccaaggaaaaattgaccaagaaggaaaagaaggaagctaacttgttcccagaacaacaaactaaggaaatcaagactgaacgtgttgaagatcaaaaggttgttgacaaggctttgttggctgaaatcaagaagaccccattgttgaagcaatatttgtccgcttctttctctttgaagaacggtgacaagccacacctattgaaattctaa

SEQ ID NO: 1446 - DNA, 1152 bp, Saccharomyces cerevisiae
atgagtgaaacagaattgagaaaaagacaggcccaattcactagggagttacatggtgatgatattggtaaaaagacaggtttgagtgcattgatgtcgaagaacaactctgcccaaaaggaagccgttcagaagtacttgagaaattgggatggtagaaccgataaagatgccgaagaacgtcgtcttgaggattataatgaagccacacattcctactataacgtcgttacagatttctatgaatatggttggggttcctctttccatttcagcagattttataaaggtgagagtttcgctgcctcgatagcaagacatgaacattatttagcttacaaggctggtattcaaagaggcgatttagttctcgacgttggttgtggtgttgggggcccagcaagagagattgcaagatttaccggttgtaacgtcatcggtctaaacaataacgattaccaaattgccaaggcaaaatattacgctaaaaaatacaatttgagtgaccaaatggactttgtaaagggtgatttcatgaaaatggatttcgaagaaaacactttcgacaaagtttatgcaattgaggccacatgtcacgctccaaaattagaaggtgtatacagcgaaatctacaaggttttgaaaccgggtggtacctttgctgtttacgaatgggtaatgactgataaatatgacgaaaacaatcctgaacatagaaagatcgcttatgaaattgaactaggtgatggtatcccaaagatgttccatgtcgacgtggctaggaaagcattgaagaactgtggtttcgaagtcctcgttagcgaagacctggcggacaatgatgatgaaatcccttggtattacccattaactggtgagtggaagtacgttcaaaacttagctaatttggccacatttttcagaacttcttacttgggtagacaatttactacagcaatggttactgtaatggaaaaattaggtctagccccagaaggttccaaggaagttactgctgctctagaaaatgctgcggttggtttagttgccggtggtaagtccaagttattcactccaatgatgcttttcgtcgctaggaagccagaaaacgccgaaaccccctcccaaacttcccaagaagcaactcaataa

SEQ ID NO: 1447 - DNA, 636 bp, Saccharomyces cerevisiae
atgcaggtgttacagttatggttgacaactttgatctctttggtggtggcagtgcagggattacatttcgacattgcagcatctacagatccagaacaggtttgtattcgtgattttgtcactgaaggtcaattggttgtcgcggatattcactcagatggttctgttggtgatggacagaaactaaacctcttcgtgcgtgattcagttggaaacgagtatcgtagaaagagggactttgcaggcgacgttcgtgttgcgtttactgctccatcctccacggcattcgacgtttgttttgaaaatcaggctcagtatcgtggccgttctttaagcagggccattgaattggacattgagagtggtgctgaagctcgtgactggaacaagatcagtgccaacgaaaaattgaaacctatagaagtggagttgcgtagagtggaggaaattaccgacgaaattgtcgacgaattgacttacttgaaaaacagagaggagagattaagagacaccaatgaatctaccaacagaagggtaagaaatttctcaattttggttattattgtcttgtcctcgctgggtgtttggcaagtcaactatttgaagaactacttcaaaacgaaacatatcatttaa

SEQ ID NO: 1448 - DNA, 411 bp, Saccharomyces cerevisiae
atgggtagagttagaaccaagaccgtcaagcgtgcttctaaggctttgattgaacgttactatccaaagttgactttggatttccaaaccaacaagagactttgtgatgaaatcgccactatccaatccaagagattgagaaacaagattgctggttacaccacccatttgatgaagagaatccaaaagggtccagttagaggtatctctttcaaattgcaagaagaagaaagagaaagaaaggaccaatacgtcccagaagtctctgctttggacttgtctcgttctaacggtgttttgaacgttgacaaccaaacttctgacttggttaaatctttgggtttgaagttgccattatctgttatcaacgtttctgcccaaagagacagacgttacagaaagagagtttaa

SEQ ID NO: 1449 - DNA, 441 bp, Saccharomyces cerevisiae
atgtctttagttgtacaagaacaaggttccttccaacacattttacgtttgttgaacaccaatgtcgatggtaacattaaaattgtttacgctttgaccactattaagggtgttggtcgtcgttactccaacttggtctgtaagaaggctgatgttgatttgcacaagagagctggtgaattgacccaagaagaattggaaagaattgtccaaatcatgcaaaacccaactcattacaagatcccagcctggttcttaaaccgtcaaaacgacattactgatggtaaggactaccacactttggctaacaacgtcgaatccaagttgagagatgacttggaaagattaaagaagatcagagcccaccgtggtattagacacttctggggtttacgtgttagaggtcaacacaccaagaccactggtagaagaagagcttaa

SEQ ID NO: 1450 - DNA, 591 bp, Saccharomyces cerevisiae
atggtcgctcaagttcaaaagcaagctccaacttttaagaaaactgccgtcgtcgacggtgtctttgacgaagtctccttggacaaatacaagggtaagtacgttgtcctagcctttattccattggccttcactttcgtctgtccaaccgaaatcattgctttctcagaagctgctaagaaattcgaagaacaaggcgctcaagttcttttcgcctccactgactccgaatactcccttttggcatggaccaatatcccaagaaaggaaggtggtttgggcccaatcaacattccattgttggctgacaccaaccactctttgtccagagactatggtgtcttgatcgaagaagaaggtgtcgccttgagaggtttgttcatcatcgacccaaagggtgtcattagacacatcaccattaacgatttgccagtcggtagaaacgttgacgaagccttgagattggttgaagccttccaatggaccgacaagaacggtactgtcttgccatgtaactggactccaggtgctgctaccatcaagccaaccgttgaagactccaaggaatacttcgaagctgccaacaaataa

SEQ ID NO: 1451 - DNA, 768 bp, Saccharomyces cerevisiae
atggctgttggtaagaataagagactatccagaggtaagaagggtttgaagaagaaggtcgttgacccatttaccagaaaggaatggttcgatattaaagccccatccacttttgaaaacagaaatgttggtaagactttagttaacaagtccactggtttgaagaatgcttccgatgctttgaagggtagagttgtcgaagtttgtttggctgacttgcaaggttctgaagaccattctttcagaaaggtcaagttgagagtcgatgaagttcaaggtaagaacttgttgaccaacttccacggtatggacttcactaccgacaaattgagatcaatggtcagaaaatggcaaactttgatcgaagctaatgttaccgttaagacttccgatgattacgttttgagaatctttgctattgccttcaccagaaagcaagctaaccaagttaagagacactcttacgctcaatcttcccacatcagagctatcagaaaagttatttctgaaatcttgaccagagaagttcaaaactctactttggctcaattgacctccaaattgattccagaagttatcaacaaggaaatcgaaaatgctaccaaggacatcttcccactacaaaacatccacgttagaaaggttaagttattgaaacaaccaaagttcgacgttggtgctttgatggctttgcatggtgaaggttccggtgaagaaaagggtaagaaggtttctggtttcaaggatgaagtcttggaaactgtgtaa

SEQ ID NO: 1452 - DNA, 531 bp, Saccharomyces cerevisiae
atgagtgcccaaaaagctccaaagtggtatccatccgaagacgtcgctgctctaaagaagaccagaaaggctgctcgcccacaaaagttgcgtgcctctctagttccaggtaccgtcttgatcttactagctggtcgtttcagaggtaagagagttgtttacttgaagcatctagaagacaacactttgttgatttctggtccattcaaggtcaatggtgttcctttgagaagagtcaatgctcgttacgtcattgctacctctactaaggtttctgtcgaaggtgtcaacgttgaaaaattcaatgtcgaatactttgctaaggaaaaattgactaagaaggaaaagaaggaagctaacttgttcccagaacaacaaaacaaggaaatcaaggctgaacgtgttgaagaccaaaaggttgtcgacaaggctttgattgctgaaatcaagaagactccattattgaagcaatacttgtctgcttctttctctttgaagaacggtgacaagccacacatgttgaaattttaa

SEQ ID NO: 1453 - DNA, 180 bp, Saccharomyces cerevisiae
atgttgaaaagattccctacccctatccttaaagtatactggcctttctttgtggctggcgccgcagtgtattatggtatgagtaaagctgctgacctttcttctaacacgaaggaatttatcaatgatccaagaaatcccagattcgcaaaaggtggaaagtttgtggaagttgattga

SEQ ID NO: 1454 - DNA, 960 bp, Saccharomyces cerevisiae
atggcatctaacgaagttttagttttgagaggtaccttggaaggtcacaacggttgggtcacatctttggctacttctgctggtcaaccaaacctattgttgtccgcttcccgtgataagactttgatctcctggaagttgactggtgacgaccaaaagtttggtgtcccagttagatctttcaagggtcacagtcacattgtccaagactgtactttgactgctgacggtgcttacgctttgtctgcttcttgggacaagaccttgagattatgggatgttgccaccggtgaaacctaccaaagattcgtcggtcacaagtccgatgttatgtccgttgacattgacaagaaggcttccatgattatctctggttcccgtgacaagaccatcaaggtctggaccatcaaaggtcaatgtttggccactttgttgggtcacaatgactgggtttcccaagtcagagttgttccaaacgaaaaagctgatgatgactctgtcaccatcatttctgccggtaacgacaaaatggttaaggcttggaacttaaaccaattccaaattgaagctgacttcatcggtcacaactccaacatcaacactttgactgcttccccagacggaactttgattgcttccgctggtaaggacggtgaaattatgttgtggaacttggctgctaagaaggctatgtacactttgtctgcccaagatgaagttttctctttggctttctctccaaacagatactggttggctgctgccactgctaccggtattaaggtcttttctttggacccacaatacttggtcgatgacttgagaccagaatttgctggttacagcaaggccgctgaaccacatgctgtttctttggcttggtctgctgacggtcaaactttgtttgccggttacaccgacaacgtcattagagtttggcaagttatgactgctaactaa

SEQ ID NO: 1455 - DNA, 255 bp, Saccharomyces cerevisiae
atggccagcagtacttccacttccgcttccgcttcctcctccatcaaaactaacagtgccttagtttccaacaatgtcgttgccgcctcttccgtctctgctacttctactgctagttccagtgccgctaagaacactacttccagttcaaagaacgctgctccaggcatggttgcaaaccctgtttcctcgaagtacggtatcatcatggccgcatttgctgctgtttctttcgtcctaggcaccggtatttaa

SEQ ID NO: 1456 - DNA, 600 bp, Saccharomyces cerevisiae
atggctatctccaagaatttaccaattttgaagaaccacttcagaaagcactggcaagaacgtgtcaaggttcactttgaccaagctggtaaaaaggtttctagacgtaatgctagagctgccagagccgccaagattgctccaagaccattggatttgttgagacctgttgtcagagctccaactgttaagtacaacagaaaggttagagctggtagaggtttcaccttggctgaagttaaggccgctggtttgactgctgcttacgccagaaccattggtattgctgttgaccacagacgtcaaaacagaaaccaagaaatctttgacgctaacgttcaaagattgaaggagtaccaatccaagattatcgttttcccaagagacggtaaggctccagaagctgaacaagttttgtctgctgctgccactttcccaattgctcaaccagctaccgatgttgaagctagagctgttcaagacaatggtgaatctgctttcagaaccttgagattagccagatccgaaaagaaattcagaggtatcagagaaaagagggctagagagaaggctgaagctgaagctgaaaagaagaaataa

SEQ ID NO: 1457 - DNA, 2118 bp, Saccharomyces cerevisiae
atggctggtgaaacttttgaatttcaagctgaaatcactcagttgatgagtttgatcatcaacactgtctattctaacaaggaaattttcttgagagaactgatctctaacgcctccgatgctttagacaaaattagataccaagctttgtctgatccaaagcaattggaaaccgaaccagatttgttcattagaatcaccccaaaaccagaagaaaaagttttggaaatcagagattctggtattggtatgaccaaggctgaattgattaacaatttgggtaccattgctaagtctggtactaaagctttcatggaagctctatctgctggtgccgatgtatccatgattggtcaattcggtgttggtttttactctttattcttagtcgccgacagagttcaagttatttccaagaacaatgaggacgaacaatatatttgggaatctaatgccggtggttctttcaccgttactttggacgaagttaacgaaagaattggtagaggtaccgtcttgagattattcttgaaagatgaccaattggagtacttggaagaaaagagaattaaagaagtcatcaagagacattctgaattcgttgcttaccctatccaacttctagtcaccaaggaagtcgaaaaggaagttccaattccagaagaagaaaagaaagacgaggaaaagaaggatgaagatgacaagaaaccaaaattggaagaagtcgatgaagaagaagaagaaaagaagccaaaaaccaaaaaagttaaagaagaggttcaagaattagaagagttgaacaagactaagccattatggactagaaacccatctgatatcactcaagaggaatacaatgctttctataagtctatttctaacgactgggaagacccattgtacgttaagcatttctctgttgaaggtcaattggaatttagagctatcttgttcattccaaagagagcaccattcgacttatttgagagtaagaagaagaagaacaatatcaagttgtacgttcgtcgtgtcttcatcactgatgaagctgaagacttgattccagagtggttatctttcgtcaagggtgttgttgactctgaagatttaccattgaatttgtccagagaaatgttacaacaaaataagattatgaaggttattagaaagaatattgtcaagaaattgattgaagccttcaacgaaatcgctgaagactccgagcaatttgacaaattttactctgccttcgctaagaacattaagctgggtgtacatgaggacactcaaaacagagctgctttagctaagttgctacgttacaattctactaaatctgtcgatgaattgacttccttgactgattacgttactagaatgccagaacaccaaaagaacatctattacatcaccggtgaatctctaaaggcagtcgaaaagtctccattcttggacgccttgaaggctaagaactttgaagttttgttcttgaccgacccaattgatgaatacgctttcactcaattgaaggaattcgagggtaaaactttggttgacattactaaagatttcgaattggaagaaacagacgaagaaaaagctgaaagagagaaggagatcaaagaatacgaaccattgaccaaggccttgaaggatatcttgggtgaccaagtggagaaggttgttgtttcttacaaattgctagatgctccagctgccatcagaactggtcaattcggctggtctgctaacatggaaagaatcatgaaggctcaagccttgagagactcttccatgtcctcctacatgtcttccaagaagactttcgaaatttctccaaaatctccaattattaaggaattgaaaaagagagttgatgagggtggtgcacaagataagaccgtcaaagatttgactaacttattattcgagaccgctttgttgacttctggtttcagtttggaagaaccaacttcttttgcatcaagaataaatagattgatttctttaggtttgaacattgatgaggatgaagaaacagaaaccgctccagaagcttctaccgaagctccagttgaagaggttccagctgacaccgagatggaagaagttgattaa

SEQ ID NO: 1458 - DNA, 303 bp, Saccharomyces cerevisiae
atgaccgttaagacaggaattgctattggtttaaacaaaggtaagaaggtcactagcatgaccccagctccaaaaatctcttacaagaaaggtgctgcttccaacagaaccaagttcgtaagatctttggtcagagaaatcgctggtttgtctccatacgaaagaagattgattgatctaataagaaactctggtgaaaagagagctagaaaggtcgccaagaagagattgggttctttcaccagagccaaggctaaggtcgaagaaatgaacaacatcattgctgcttctcgtcgtcactaa

SEQ ID NO: 1459 - DNA, 669 bp, Saccharomyces cerevisiae
atgaagtttttcccactccttttgttgattggtgttgtaggctacattatgaacgtattgttcactacctggttgccaaccaattacatgttcgatccaaaaactttgaacgaaatatgtaactcggtgattagcaaacacaacgcagcagaaggtttatccactgaagacctgttacaggatgtcagagacgcacttgcctctcattacggggacgaatacatcaacaggtacgtcaaagaagaatgggtcttcaacaatgctggtggtgcgatgggccaaatgatcatcctacacgcttccgtatccgagtacttaattctattcggaaccgctgttggtactgaagggcacacaggtgttcactttgctgacgactattttaccatcttacatggtacgcaaatcgcagcattgccatatgccactgaagccgaagtttacactcctggtatgactcatcacttgaagaagggatacgccaagcaatacagcatgccaggtggttcctttgcccttgaattggctcaaggctggattccatgtatgttgccattcgggtttttggacactttctccagtactcttgatttatacactctatatagaactgtctacctgactgccagggacatgggtaagaacttgttgcaaaacaaaaagttctaa

SEQ ID NO: 1460 - DNA, 2880 bp, Saccharomyces cerevisiae
atgactgttactactccttttgtgaatggtacttcttattgtaccgtcactgcatattccgttcaatcttataaagctgccatagatttttacaccaagtttttgtcattagaaaaccgctcttctccagatgaaaactccactttattgtctaacgattccatctctttgaagatccttctacgtcctgatgaaaaaatcaataaaaatgttgaggctcatttgaaggaattgaacagtattaccaagactcaagactggagatcacatgccacccaatccttggtatttaacacttccgacatcttggcagtcaaggacactctaaatgctatgaacgctcctcttcaaggctacccaacagaactatttccaatgcagttgtacactttggacccattaggtaacgttgttggtgttacttctactaagaacgcagtttcaaccaagccaactccaccaccagcaccagaagcttctgctgagtctggtctttcctctaaagttcactcttacactgatttggcttaccgtatgaaaaccaccgacacctatccatctctgccaaagccattgaacaggcctcaaaaggcaattgccgtcatgacttccggtggtgatgctccaggtatgaactctaacgttagagccatcgtgcgttccgctatcttcaaaggttgtcgtgcctttgttgtcatggaaggttatgaaggtttggttcgtggtggtccagaatacatcaaggaattccactgggaagacgtccgtggttggtctgctgaaggtggtaccaacattggtactgcccgttgtatggaattcaagaagcgcgaaggtagattattgggtgcccaacatttgattgaggccggtgtcgatgctttgatcgtttgtggtggtgacggttctttgactggtgctgatctgtttagatcagaatggccttctttgatcgaggaattgttgaaaacaaacagaatttccaacgaacaatacgaaagaatgaagcatttgaatatttgcggtactgtcggttctattgataacgatatgtccaccacggatgctactattggtgcttactctgccttggacagaatctgtaaggccatcgattacgttgaagccactgccaactctcactcaagagctttcgttgttgaagttatgggtagaaactgtggttggttagctttattagctggtatcgccacttccgctgactatatctttattccagagaagccagccacttccagcgaatggcaagatcaaatgtgtgacattgtctccaagcacagatcaaggggtaagagaaccaccattgttgttgttgcagaaggtgctatcgctgctgacttgaccccaatttctccaagcgacgtccacaaagttctagttgacagattaggtttggatacaagaattactaccttaggtcacgttcaaagaggtggtactgctgttgcttacgaccgtatcttggctactttacaaggtcttgaggccgttaatgccgttttggaatccactccagacaccccatcaccattgattgctgttaacgaaaacaaaattgttcgtaaaccattaatggaatccgtcaagttgaccaaagcagttgcagaagccattcaagctaaggatttcaagagagctatgtctttaagagacactgagttcattgaacatttaaacaatttcatggctatcaactctgctgaccacaacgaaccaaagctaccaaaggacaagagactgaagattgccattgttaatgtcggtgctccagctggtggtatcaactctgccgtctactcgatggctacttactgtatgtcccaaggtcacagaccatacgctatctacaatggttggtctggtttggcaagacatgaaagtgttcgttctttgaactggaaggatatgttgggttggcaatcccgtggtggttctgaaatcggtactaacagagtcactccagaagaagcagatctaggtatgattgcttactatttccaaaagtacgaatttgatggtttgatcatcgttggtggtttcgaagcttttgaatctttacatcaattagagagagcaagagaaagttatccagctttcagaatcccaatggtcttgataccagctactttgtctaacaatgttccaggtactgaatactctttgggttctgataccgctttgaatgctctaatggaatactgtgatgttgttaaacaatccgcttcttcaaccagaggtagagccttcgttgtcgattgtcaaggtggtaactcaggctatttggccacttacgcttctttggctgttggtgctcaagtctcttatgtcccagaagaaggtatttctttggagcaattgtccgaggatattgaatacttagctcaatcttttgaaaaggcagaaggtagaggtagatttggtaaattgattttgaagagtacaaacgcttctaaggctttatcagccactaaattggctgaagttattactgctgaagccgatggcagatttgacgctaagccagcttatccaggtcatgtacaacaaggtggtttgccatctccaattgatagaacaagagccactagaatggccattaaagctgtcggcttcatcaaagacaaccaagctgccattgctgaagctcgtgctgccgaagaaaacttcaacgctgatgacaagaccatttctgacactgctgctgtcgttggtgttaagggttcacatgtcgtttacaactccattagacaattgtatgactatgaaactgaagtttccatgagaatgccaaaggtcattcactggcaagctaccagactcattgctgaccatttggttggaagaaagagagttgattaa

SEQ ID NO: 1461 - DNA, 804 bp, Saccharomyces cerevisiae
atgtcccaaggtagaaaagctgcagaaagattggctaagaagactgtcctcattacaggtgcatctgctggtattggtaaggcgaccgcattagagtacttggaggcatccaatggtgatatgaaactgatcttggctgctagaagattagaaaagctcgaggaattgaagaagaccattgatcaagagtttccaaacgcaaaagttcatgtggcccagctggatatcactcaagcagaaaaaatcaagcccttcattgaaaacttgccacaagagttcaaggatattgacattctggtgaacaatgccggaaaggctcttggcagtgaccgtgtgggccagatcgcaacggaggatatccaggacgtgtttgacaccaacgtcacggctttaatcaatatcacacaagctgtactgcccatattccaagccaagaattcaggagatattgtaaatttgggttcaatcgctggcagagacgcatacccaacaggttctatctattgtgcctctaagtttgccgtgggggcgttcactgatagtttgagaaaggagctcatcaacactaaaattagagtcattctaattgcaccagggctagtcgagactgaattttcactagttagatacagaggtaacgaggaacaagccaagaatgtttacaaggatactaccccattgatggctgatgacgtggctgatctgatcgtctatgcaacttccagaaaacaaaatactgtaattgcagacactttaatctttccaacaaaccaagcgtcacctcatcatatcttccgtggataa

SEQ ID NO: 1462 - DNA, 519 bp, Saccharomyces cerevisiae
atggctcactttaaagaataccaagttattggccgtcgtttgccaactgaatctgttccagaaccaaagttgttcagaatgagaatctttgcttcaaatgaagttattgccaagtctcgttactggtatttcttgcaaaagttgcacaaggttaagaaggcttctggtgaaattgtttccatcaaccaaatcaacgaagctcatccaaccaaggtcaagaacttcggtgtctgggttagatacgactccagatctggtactcacaatatgtacaaggaaatcagagacgtctccagagttgctgccgtcgaaaccttataccaagacatggctgccagacacagagctagatttagatctattcacatcttgaaggttgctgaaattgaaaagactgctgacgtcaagagacaatacgttaagcaatttttgaccaaggacttgaaattcccattgcctcacagagtccaaaaatccaccaagactttctcctacaagagaccttccactttctactga

SEQ ID NO: 1463 - DNA, 180 bp, Saccharomyces cerevisiae
atgaagttatctcaagttgttgtttccgccgtcgccttcactggtttagtaagtgctgctaacagttctaacagctcaagctcaaagaatgctgcccaaccaattgccggtttaaacaacggtaaggttgcaggcgccgctggtgttgctctagctggtgctttggcctttttgatttaa

SEQ ID NO: 1464 - DNA, 183 bp, Saccharomyces cerevisiae
atggctaataaagttattcaactacagaaaatcttccaatcttccactaaacctctatggtggagacatccaaggtcagctttatacctgtatccattttatgctatttttgcggtagccgtcgttacaccacttctatacattccaaatgctattagaggtatcaaagccaagaaggcatag

SEQ ID NO: 1465 - DNA, 594 bp, Saccharomyces cerevisiae
atgatgcattttagaaagaaatccagtatcagtaacacgagtgatcatgacggagcgaaccgtgcctcagatgtcaagatttctgaagatgacaaggcaagattgaagatgcgtactgcttccgttgctgatcctattctagacgctgtgcaggaagcccaaccttttgaacaagctgctgataccttccacgacaacatgaacagacaatcttatttttccaacgaagaaggtcatgttctgtgtgatgttttcggtcaacccatcacacaggcagatatatcgaatccaactagggcaagagacgaaagacctttggacactataagaagtttcgagtatgctgtctccggagacccggtctgggcccaacagttggagactccaacttacgggttccgcgtaagacctgatttccctgtgtttggtgctgctgtgacttacgatgcgaacggtatgccacagcaagtgggtggtgcttccagtcaaatgtatggtgaacaagcagtgtatcagccacaacaacacgtacagactgaggaaaagcaaaagaagaagaagaagggattgtttggtagaatgaagaagaaataa

SEQ ID NO: 1466 - DNA, 1680 bp, Saccharomyces cerevisiae
atgttgtttaaatccctttcaaagttagcaaccgctgctgctttttttgctggcgtcgcaactgcggacgatgttccagcgattgaagttgttggtaataagtttttctactccaacaacggtagtcagttctacataagaggtgttgcttatcaggctgataccgctaatgaaactagcggatctactgtcaacgatcctttggccaattatgagagttgttccagagatattccatacctcaaaaaattgaacacaaatgttatccgtgtctacgctatcaataccactctagatcactccgaatgtatgaaggctttgaatgatgctgacatctatgtcatcgctgatttagcagctccagccacctctatcaatagagacgatccaacttggactgttgacttgttcaacagctacaaaaccgttgttgacacttttgctaattacaccaacgttttgggtttcttcgccggtaatgaagttactaacaattacaccaacacagatgcatctgctttcgtgaaggcagctattagagacgtcagacaatacatcagcgacaagaactacagaaaaattccagttggctactcttccaatgatgacgaagataccagagttaagatgactgattatttcgcttgtggtgatgatgatgttaaggctgatttttacggtattaatatgtatgaatggtgtggtaaatctgacttcaaaacttctggttatgctgatagaactgcagaattcaaaaacttatctattcctgttttcttctctgaatacggttgtaacgaagtaacaccaagactatttactgaggttgaagccttgtacggttctaatatgacagatgtctggtctggtggtatcgtatacatgtacttcgaagagactaacaaatacggtttagttagcatcgatggtaatgatgttaaaactttggatgacttcaacaactattcttctgaaatcaacaaaatatcaccaacttccgccaacacaaagtcttacagtgcaacaacaagtgatgttgcttgtccagctactggtaagtactggtccgctgcaacagaattaccaccaactccaaacggaggcttgtgttcatgtatgaatgcagccaatagttgtgttgtttccgatgacgttgattctgatgattacgaaaccttatttaactggatctgtaatgaagtcgactgtagcggtatttcagcaaacggtaccgccggtaagtatggtgcttactctttctgtacaccaaaggaacagctatctttcgttatgaatttgtactacgagaagagtggtggtagcaaatctgactgtagcttcagcggttctgccactctacaaactgccaccacgcaagctagttgctcctccgctttgaaagagattggtagtatgggtaccaactctgcatcaggtagtgttgatttgggttccggaactgaatccagtactgcctcttctaacgcttcggggtcttcttccaagtctaactccggctcttctggttcttccagttcttcttcttcttcttcagcttcatcttcatcttctagcaagaagaatgctgccaccaacgttaaagctaacttagcacaagtggtctttacctccatcatttccttatccattgccgctggtgtcggttttgctttggtttaa

SEQ ID NO: 1467 - DNA, 411 bp, Saccharomyces cerevisiae
atggccagaactaaacaaacagctagaaaatccactggtggtaaagccccaagaaaacaattagcctccaaggctgccagaaaatccgccccatctaccggtggtgttaagaagcctcacagatataagccaggtactgttgccttgagagaaattagaagattccaaaaatctactgaactgttgatcagaaagttacctttccaaagattggtcagagaaatcgctcaagatttcaagaccgacttgagatttcaatcttctgctatcggtgctttgcaagaatccgtcgaagcatacttagtctctttgtttgaagacactaatctggctgctattcacgctaagcgtgttactatccaaaagaaggatatcaaattggccagaagactaagaggtgaaagatcatga

SEQ ID NO: 1468 - DNA, 852 bp, Saccharomyces cerevisiae
atgtctcctccagtttacagcgatatctccagaaatatcaatgacctattgaacaaggatttctatcatgctaccccagctgcctttgatgtgcaaacaacaaccgccaatggcattaagttctcattgaaggctaaacagcctgtcaaagacggtccactgtctactaacgtggaagcaaagttgaatgacaagcaaaccggcttgggtctaactcaaggctggtctaacacaaacaacttgcaaaccaaattagagtttgccaacttgacccctggtctaaagaacgaattgatcacttctttgactccaggcgtcgccaagtccgccgtcttaaacactacgttcacacaacctttcttcaccgcaagaggtgcctttgacttgtgtttgaagtcaccaacatttgttggtgacttaactatggcccacgaaggtattgttggtggcgcagagtttggttacgatatcagcgccggttccatttctcgttatgccatggctttaagttatttcgccaaagactactccttgggcgctacattgaacaacgagcaaataactaccgttgacttcttccaaaacgtcaacgcctttttacaggtcggtgctaaggctacaatgaactgcaaactacctaactccaatgtcaacatcgaattcgccactagatatttgcctgatgcatcttcccaagttaaggctaaggtgtccgattccggtattgtcactttggcttacaagcaattgttaagacctggcgtcactctgggtgtcggttcctctttcgatgctttgaagttgtctgaacctgttcacaagctaggttggtctttgtccttcgacgcttga

SEQ ID NO: 1469 - DNA, 1230 bp, Saccharomyces cerevisiae
atggttaaagaaactaagttttacgatattctaggtgttccagtaactgccactgatgtcgaaattaagaaagcttatagaaaatgcgccttaaaataccatccagataagaatccaagtgaggaagctgcagaaaagttcaaagaagcttcagcagcctatgaaattttatcagatcctgaaaagagagatatatatgaccaatttggtgaagatggtctaagtggtgctggtggcgctggcggattcccaggtggtggattcggttttggtgacgatatcttttcccaattctttggtgctggtggcgcacaaagaccaagaggtccccaaagaggtaaagatatcaagcatgaaatttctgcctcacttgaagaattatataagggtaggacagctaagttagcccttaacaaacagatcctatgtaaagaatgtgaaggtcgtggtggtaagaaaggcgccgtcaagaagtgtaccagctgtaatggtcaaggtattaaatttgtaacaagacaaatgggtccaatgatccaaagattccaaacagagtgtgatgtctgtcacggtactggtgatatcattgatcctaaggatcgttgtaaatcttgtaacggtaagaaagttgaaaacgaaaggaagatcctagaagtccatgtcgaaccaggtatgaaagatggtcaaagaatcgttttcaaaggtgaagctgaccaagccccagatgtcattccaggtgatgttgtcttcatagtttctgagagaccacacaagagcttcaagagagatggtgatgatttagtatatgaggctgaaattgatctattgactgctatcgctggtggtgaatttgcattggaacatgtttctggtgattggttaaaggtcggtattgttccaggtgaagttattgccccaggtatgcgtaaggtcatcgaaggtaaaggtatgccaattccaaaatacggtggctatggtaatttaatcatcaaatttactatcaagttcccagaaaaccatttcacatcagaagaaaacttgaagaagttagaagaaattttgcctccaagaattgtcccagccattccaaagaaagctactgtggacgaatgtgtactcgcagactttgacccagccaaatacaacagaacacgggcctccaggggtggtgcaaactatgattccgatgaagaagaacaaggtggcgaaggtgttcaatgtgcatctcaatga

SEQ ID NO: 1470 - DNA, 597 bp, Saccharomyces cerevisiae
atgtctcaaccagtcgttgttattgatgctaaggatcatttgttgggtcgtttggcctccactattgccaagcaagtattgaacggtcaaaagattgtcgttgtcagagctgaagctttgaacatttctggtgaattcttcagaaacaagttgaagtaccacgactttttgagaaaggctactgctttcaacaagacccgtggtccattccatttcagagctccatctagaattctttacaaggctattcgtggtatggtttcccacaagaccgcccgtggtaaggctgccttggaacgtttaaagatcttcgaaggtattccacctccatacgacaaaaagaagagagttgtcgttcctcaagctttgagagttttgagattgaaaccaggtagaaagtacaccactttgggtaagttgtctacttctgttggttggaaatacgaagatgttgttgctaaattagaagacaagagaaaggtcagatccgccgaatattacgccaagaagagagctttcaccaaaaaggtctcctctgcttctgctgctgcttctgaatccgatgttgctaagcaattggcttctttcggttactaa

SEQ ID NO: 1471 - DNA, 1449 bp, Saccharomyces cerevisiae
atgtctgcctttgtcagggtggttccaagaatatccagaagttcagtactcaccagatcattgagactgcaattgagatgctacgcatcgtacccagagcacaccattattggtatgccggcactgtctcctacgatgacgcaaggtaatcttgctgcttggactaagaaggaaggtgaccaattgtctcccggtgaagttattgccgaaatagaaacagacaaggctcaaatggactttgagttccaagaagatggttacttagccaagattctagttcctgaaggtacaaaggacattcctgtcaacaagcctattgccgtctatgtggaggacaaagctgatgtgccagcttttaaggactttaagctggaggattcaggttctgattcaaagaccagtacgaaggctcagcctgccgaaccacaggcagaaaagaaacaagaagcgccagctgaagagaccaagacttctgcacctgaagctaagaaatctgacgttgctgctcctcaaggtaggatttttgcctctccacttgccaagactatcgccttggaaaagggtatttctttgaaggatgttcacggcactggaccccgcggtagaattaccaaggctgacattgagtcatatctagaaaagtcgtctaagcagtcttctcaaaccagtggtgctgccgccgccactcctgccgccgctacctcaagcactactgctggctctgctccatcgccttcttctacagcatcatatgaggatgttccaatttcaaccatgagaagcatcattggagaacgtttattgcaatctactcaaggcattccatcatacatcgtttcctccaagatatccatctccaaacttttgaaattgagacagtccttgaacgctacagcaaacgacaagtacaaactgtccattaatgacctattagtaaaagccatcactgttgcggctaagagggtgccagatgccaatgcctactggttacctaatgagaacgttatccgtaaattcaagaatgtcgatgtctcagtcgctgttgccacaccaacaggattattgacaccaattgtcaagaattgtgaggccaagggcttgtcgcaaatctctaacgaaatcaaggaactagtcaagcgtgccagaataaacaaattggcaccagaggaattccaaggtgggaccatttgcatatccaatatgggcatgaataatgctgttaacatgtttacttcgattatcaacccaccacagtctacaatcttggccatcgctactgttgaaagggtcgctgtggaagacgccgctgctgagaacggattctcctttgataaccaggttaccataacagggacctttgatcatagaaccattgatggcgccaaaggtgcagaattcatgaaggaattgaaaactgttattgaaaatcctttggaaatgctattgtga

SEQ ID NO: 1472 - DNA, 1860 bp, Saccharomyces cerevisiae
atggttaaagagagtattattgctcttgctgagcatgcggcctccagagcctcaagagttattcctccagtgaagctagcctataaaaatatgcttaaggacccttcctccaagtacaagccatttaacgctccaaagctatctaatagaaagtggccggataaccggatcacgagggctcctcgttggttatcaacagatttgagagatggtaaccaatctctgccggatcccatgtcagtggaacaaaagaaagaatactttcacaagctggtcaatattgggttcaaagaaatcgaggtttccttcccctctgcatctcaaacagatttcgacttcactagatatgctgtagaaaacgccccagacgatgttagtattcaatgtcttgtccaatctagagaacacttgattaagagaacggtggaagcattaacaggtgctaaaaaggctactatacatacttacttggcaacaagtgatatgttccgtgaaattgtttttaatatgtctagagaggaagctatttccaaggcagtagaggccaccaaactagttaggaaactaactaaggatgacccttcccaacaagccactcgttggtcctatgagttttcccccgaatgtttcagtgatactccaggtgaatttgctgtagaaatttgcgaagctgttaagaaggcttgggaacctaccgaggaaaatccaatcattttcaacttacctgctaccgtagaagttgcctctccaaatgtttatgctgatcagattgaatacttcgctacccatattactgagcgtgagaaggtttgcatctctacacattgtcacaatgaccgtggttgcggtgtcgccgccacagagttaggtatgcttgcaggtgccgaccgtgtagaaggatgtctctttggtaatggtgaacgtacaggtaatgtggacttggttactgttgctatgaatatgtatacccaaggtgtttctcctaatttggatttctctgacttgacctctgtcctagatgtggttgagcgttgtaataagatcccagtatcgcaaagagcaccatacggcggtgacttggtcgtttgtgccttttccggttctcaccaagacgccattaagaagggtttcaacttacaaaacaagaagcgtgctcaaggtgaaactcaatggagaatcccatacttgccattggatccaaaggacattggccgtgattacgaagctgtcatcagagtcaactctcagtctggtaaaggtggtgccgcttgggttattttgagatctttgggtttggatctaccaagaaacatgcaaatcgaattttctagcgccgttcaagaccatgctgactccttgggtagagaactaaaatcagatgagatttccaagttattcaaagaggcttacaactacaatgacgaacagtaccaagctattagtttagtcaattataatgttgaaaaattcggcactgaacgtagagtgttcactggtcaagtcaaagtaggcgaccagatcgtcgatattgaaggtacaggtaatggtccaatctcttctttggtcgacgccctatcaaacttgttgaacgtgagatttgccgtagcaaactacacagagcattctctaggttctggttcttctacgcaagctgcttcttacatccatctatcgtataggcgtaatgccgacaacgaaaaggcctacaaatggggtgtaggtgtctccgaagatgtcggtgattcttcagtgagagccatctttgccaccattaacaatattatccattctggtgatgtgtccattccatctttggccgaggtcgaaggtaagaatgctgcggcatctggctctgcataa

SEQ ID NO: 1473 - DNA, 345 bp, Saccharomyces cerevisiae
atgtctgaagtaattgaaggtaacgtcaaaattgacagaatttccccaggtgatggtgccaccttcccaaagacaggtgacttggttaccattcattacaccggtaccttggagaacggccaaaaattcgattcctccgttgacaggggctctccattccaatgtaacatcggtgtcggccaagtcatcaagggttgggatgttggtattccaaagttgtctgttggtgaaaaagctaggttaaccatccctggcccatatgcttatggcccacgtggtttcccaggtttgattccaccaaacagtactttggttttcgacgtcgaattgttgaaggtcaactaa

SEQ ID NO: 1474 - DNA, 117 bp, Saccharomyces cerevisiae
atgcaaccgatcaccactgcttccacacaagccactcagaaggataaatcctctgaaaagaaagacaactatataatcaagggcctcttctgggatcccgcctgtgttatcgcttaa

SEQ ID NO: 1475 - DNA, 321 bp, Saccharomyces cerevisiae
atggttaacgttccaaagaccagaaagacctactgtaagggtaagacctgtcgtaagcacactcaacacaaggttactcaatacaaagctggtaaggcttccttgtttgcccaaggtaagagacgttatgaccgtaaacaatctggtttcggtggtcaaaccaagcctgttttccacaagaaagctaagactaccaagaaggttgttttgagattggaatgtgtcaaatgtaagaccagagcccaattgaccttgaagagatgcaagcacttcgaattgggtggtgaaaagaagcaaaagggtcaagctttgcaattctga

SEQ ID NO: 1476 - DNA, 723 bp, Saccharomyces cerevisiae
atggtcgctttaatctctaagaaaagaaagctagtcgctgacggtgtcttctacgctgaattgaacgaattcttcaccagagaattagctgaagaaggttactccggtgttgaagtccgtgtcactccaaccaagaccgaagttatcatcagagctaccagaactcaagatgttttgggtgaaaacggtagaagaatcaacgaattaactttgttggttcaaaagagattcaagtacgctccaggtactattgtcttatatgctgaaagagttcaagaccgtggtttgtccgctgtcgctcaagctgaatctatgaaattcaaattgttgaacggtttggctatcagaagagctgcttacggtgtcgtcagatacgttatggaatctggtgctaagggttgtgaagttgttgtttccggtaaactaagagctgccagagctaaggctatgaaatttgctgacggtttcttgattcactctggtcaaccagtcaacgacttcattgacactgctactagacacgtcttgatgagacaaggtgttttgggtatcaaggttaagattatgagagacccagctaagagcagaactggtccaaaggctttgccagatgctgtcaccatcattgaaccaaaagaagaagaaccaattcttgctccatctgtcaaggactacagaccagctgaagaaactgaagctcaagctgaaccagttgaagcttag

SEQ ID NO: 1477 - DNA, 600 bp, Saccharomyces cerevisiae
atgtctgcaaacgaattctactcaagtggccaacaaggtcaatataaccagcaaaacaaccaagaaagaactggtgctccaaacaacggtcaatatggtgccgacaatggtaaccccaacggtgaacgtggtttattttccactattgtaggtggcagtgccggtgcgtacgctggatctaaggtgtcgaacaaccattctaagttgagtggtgtgctgggcgccataggtggtgcattccttgccaacaagatatctgatgagcgtaaagagcataagcaacaagagcaatacggcaactcaaacttcggaggtgctcctcaaggtggacacaacaaccatcaccgtcaggacaataacaacaataacggtggatttggcggtccaggcggccctggcggtcaaggtttcggaagacaaggcccacaaggatttggaggtcctggtccacaagagtttggtggtccaggtggccaaggattcggtggtccaaatcctcaagaattcggcgggccaggtggccaaggattcggtggtccaaaccctcaggaattcgggggccaaggtcgtcaaggattcaatggcggttcacgttggtga

SEQ ID NO: 1478 - DNA, 1842 bp, Saccharomyces cerevisiae
atggctgaaggtgttttccaaggtgctatcggtatcgatttaggtacaacatactcttgtgttgctacttatgaatcttccgttgaaattattgccaacgaacaaggtaacagagttactccatctttcgttgccttcaccccacaggaaagattgatcggtgatgctgccaagaaccaagctgctttgaacccaagaaacactgtttttgatgctaagcgtttgattggtagaagattcgacgacgagtctgtccaaaaggacatgaagacctggcctttcaaggttatcgacgtcgatggtaacccagtcattgaagtccaatacttggaagaaaccaagactttctccccacaagaaatttccgctatggtcttgaccaagatgaaggaaattgctgaagctaagattggtaagaaggttgaaaaggctgtcattactgtcccagcttactttaacgatgcccaaagacaagctaccaaggatgccggtgccatttctggtttgaacgttttgcgtatcatcaacgaacctactgccgctgctattgcttacggtctaggtgctggtaagtccgaaaaggaaagacatgttttgattttcgatttgggtggtggtactttcgatgtttccttgttgcacattgctggtggtgtttacactgttaaatctacttccggtaacactcacttgggtggtcaagatttcgacaccaacttgttggaacacttcaaggctgaattcaagaagaagactggtttggacatctccgacgatgccagagctttgagaagattgagaactgctgctgaaagagctaagagaaccttatcttctgtcactcaaactaccgttgaagttgactctttgtttgacggtgaagatttcgaatcctctttgactagagctagatttgaagacttgaacgccgcattgttcaagtctactttggaacctgttgaacaagttttgaaggatgctaagatctctaagtctcaaatcgacgaagttgtcttggttggtggttctaccagaattccaaaggtccaaaagttgttgtctgacttctttgacggtaagcaattggaaaaatctattaacccagatgaagctgttgcttacggtgctgctgttcaaggtgctatcttgactggccaatccacatctgacgaaaccaaggacttgttgttgttagatgttgctccattatctctaggtgttggtatgcaaggtgacattttcggtattgttgtcccaagaaacacaactgttccaaccatcaagagaagaaccttcacaactgtcagtgacaaccaaaccaccgttcaattcccagtctaccaaggtgaacgtgtcaactgtaaagaaaacactttgttgggtgaattcgacttgaagaacatcccaatgatgccagctggtgaaccagtcttggaagctatcttcgaagttgatgctaacggtatcttgaaggttactgccgtcgaaaagtctaccggtaagtcttctaacatcactatctccaacgctgtcggtagattgtcttctgaagaaattgaaaagatggttaaccaagccgaagagttcaaggctgctgatgaagcttttgctaagaagcacgaagctagacaaagactagaatcctacgtcgcttccatcgaacaaaccgtcactgacccagtcttgtcttctaaattgaagagaggttccaagtccaagatcgaagctgctttgtccgatgctttggctgctttgcaaatcgaagacccatccgctgatgagttgagaaaggcagaagttggtttgaagagagttgtcaccaaggccatgtcttctcgttaa

SEQ ID NO: 1479 - DNA, 1302 bp, Saccharomyces cerevisiae
atggttaacgttgtattgggctcccaatggggtgatgagggtaaaggtaaactagttgatttactggttggtaaatatgatattgtagcccgttgcgccggtggtaacaatgccgggcataccattgttgtagacggtgttaagtatgatttccatatgttaccatctggtttagtcaacccaaactgccaaaaccttttgggtaatggtgttgttattcatgttccatcttttttcaaagagttggaaaccttggaagctaaaggtttgaagaacgcaaggagtagattatttgtttcttccagagcacatttagtctttgactttcatcaggtgactgacaagctaagagaattggagttatcaggtcgttctaaagatggtaaaaatatcggtactaccggtaaaggtattggtccaacttattccacaaaggcttctagatctggtttgagagttcatcatttggtgaatgatcaacccggtgcctgggaggaatttgttgctagatataagagattattggaaacgagaagacaaagatacggtgatttcgaatacgactttgaagccaagcttgctgaatacaagaagttaagagagcaactaaagccattcgtcgtcgattctgtcgttttcatgcacaatgctattgaagcaaagaaaaagatattggttgagggtgctaatgctttgatgttggatattgattttggtacttatccatatgtgacttcttccaatactggtattggtggtgtcctcaccggtttaggtattcctccacgtactattgatgaaatttatggtgttgttaaagcctacacaactagagttggtgaaggtcctttcccaacggaacaattgaacgaaaatggagaaaaactgcagaccattggtgctgaatttggtgtcactactggtcgtaagcgtcgttgcggttggttagacttggtagtcttgaaatactcaactttgatcaatggatacacgagtttgaacattaccaagttagacgtcctcgatactttcaaagaaatcccagtgggtatttcatattctattcaaggtaagaagctagatttgttccctgaagacttgaatattcttggtaaagttgaagttgaatacaaagttttgccaggttgggatcaagatattaccaaaattacaaagtatgaagatttgccggaaaacgcaaagaagtacttaaaatatattgaagattttgttggcgttcctgttgaatgggttggtaccggccccgcaagagaaagcatgttgcataaagaaattaaatag

SEQ ID NO: 1480 - DNA, 561 bp, Saccharomyces cerevisiae
atgggtattgatcacacttccaagcaacacaaaagatccggtcatagaaccgctccaaaatccgataacgtctatttgaaattattggtcaaactatacactttcctagctcgtcgtactgatgctccattcaacaaggttgttttgaaggctttgttcttgtctaagatcaacagaccacctgtttcagtctccagaattgctagagctttgaagcaagaaggtgctgccaacaagactgttgtcgttgttggtaccgttactgacgatgccaggatcttcgaattcccaaagaccactgttgctgctttgagattcactgctggtgccagagccaagatcgttaaggctggcggtgaatgtatcactttagatcaattagctgtcagagctcctaagggtcaaaacactttgatcttgagaggtccaagaaactccagagaagcggtcagacacttcggtatgggtccacacaagggtaaggctccaagaatcttgtccaccggtagaaagttcgaaagagctagaggtagaagaagatctaagggtttcaaggtgtaa

SEQ ID NO: 1481 - DNA, 435 bp, Saccharomyces cerevisiae
atggcaggtgtttccgttagagacgttgcagctcaagatttcatcaatgcttacgcttctttcttgcaaagacaaggtaaattagaagtcccaggttacgttgacattgtcaagacctcttctggtaatgaaatgccaccacaagacgctgaaggttggttctacaagcgtgctgcctccgttgctagacacatttacatgagaaagcaagtcggtgttggtaagttgaacaaattgtacggtggtgccaagagcagaggtgtcagaccatacaagcacattgatgcttccggttctatcaacagaaaggtcttgcaagctttggaaaaaatcggtattgtcgaaatctctccaaagggtggtagaagaatctctgaaaacggtcaaagagatttggatcgtattgccgctcaaactttggaagaagacgaataa

SEQ ID NO: 1482 - DNA, 894 bp, Saccharomyces cerevisiae
atgtcaggtcctccacctccttacgaagagcaaagctcacatctttacggccagcctgcgagcagccaggatggaaacgctttcatcccggaagactttaaatattccacggtggttatctcgtgcgaacccatcattcgccagcggtttatgcacaaggtttactctctgctgtcatgccagttactggccagtttgtcgttctgctactgggctagcgtttccacttctttgcagaactttatcatgtcgcatatcgccctcttctacatctgcatggtggtatcgctagtatcgtgcatttggctggcagtaagtcctcgtcccgaagactacgaggccagtgttcccgaaccgttgctcacgggcagcagcgaagagccggcacaagagcaaaggcgtctgccttggtacgtcttgtcctcgtacaagcaaaagctcacgctgctctccattttcactctttccgaggcttactgtctgtcgctggtaaccttagcgtacgataaggatacagtactttcggctctgctgatcaccaccatcgtcgtagtcggcgtttccttgaccgcactatcagagagattcgagaacgtgctgaattccgcaacgtcaatatactattggttaaactggggtctatggattatgatcggaatgggtctcacggccttgcttttcggctggaatacccactcttccaagtttaatctgctttacggctggcttggtgccattttatttaccgcgtatcttttcatcgatacgcaactgatttttaggaaagtgtatcctgatgaagaagttagatgcgccatgatgctttacctggacatcgtcaatttgtttttgtctattttaaggattttggccaactctaacgacgacaattaa

SEQ ID NO: 1483 - DNA, 1146 bp, Saccharomyces cerevisiae
atgaaagagaatgaacttaaaaatgagaagagtgtagatgtattatccttcaaacagctcgaatcccaaaagattgttctacctcaagatcttttcagaagcagctttacctggttttgttatgaaatttacaagtccttagcgtttcgcatctggatgctattatggctaccacttagcgtctggtggaaactttccaacaattgtatttacccacttatagtttcacttctggtcctgtttctgggaccaatatttgtccttgttatttgtggactttctcgtaagcgttccttatcgaaacaactcattcagttttgcaaagaggttactgaaaacacaccaagttctgatcctcatgattgggaagttgttgcagcaaatctaaattcgtacttatatgaaaataaggcttggaatactaagtactttttcttcaatgccatggtctgtcaagaagcgttcagaacaacccttctcgaaccattttctttgaaaaaagacgaagctgccaaggttaagtcatttaaggattccgtcccttacattgaagaagcattgggagtttattttagagaagttgaaaaacaatggaagttgtttaattctgagaaatcatggagccctgttggcctggaagatgctaaacttcccaaagaagcttaccgatttaagcttacttggtttttaaagaggatttccaatatttttatgttgataccattccttaattttttgtgctgcatatatgtgtcacggggaatgtgccttctattacgcaccttttatctcgggtggattcttttcatgttggtacaaggtttccaaaacatgaggatgatcgttttatccgtgaaaatggaacacaagatgcagttcttgtcgactattataaatgagcaagaaagtggtgcgaatggatgggacgaaattgcaaaaaaaatgaataggtacttgtttgagaaaaaagtctggaagaatgaagagtttttctttgacgggattgactgtgaatggttttttagccacttcttctaccgcgttctctctgcaaagaaatctatgcgggctctatcattgaatgtggaactatggccatatattaaagaagcgcaattatcctgcagtgaggagtccttagcgtaa

SEQ ID NO: 1484 - DNA, 1440 bp, Saccharomyces cerevisiae
atgtcagcgatattatcaacaactagcaaaagtttcttatcaaggggctccacaagacaatgtcaaaatatgcaaaaggctctttttgcactattgaatgctcgccactatagtagcgcctccgaacaaacgttgaaggagagatttgctgaaattatcccagcaaaggcagaagaaattaaaaaattcaagaaagaacacggtaaaaccgttattggtgaagttcttttggagcaagcttatggtggtatgagaggtattaaaggccttgtttgggaaggttccgtgttagaccccgaagaaggtattagatttaggggtcgtactattccagaaattcaaagggaactaccaaaggctgagggtagtacagaacctttgccagaagctttattttggttgcttttgactggtgaaatacctactgacgctcaagttaaagccctttctgctgatttagctgccagatcagaaattccagagcacgttatccaacttttagatagcctcccaaaagatctacatccaatggcgcaattttctattgccgtgactgctttagaaagcgagtctaagtttgccaaagcatatgctcaaggtgtatccaagaaagaatattggagctatacatttgaagattcgttagatctgctgggtaaattacctgttattgcttccaaaatttatcgtaatgtgttcaaggatggtaaaattacttcaaccgatcctaatgctgactatggtaaaaatttggcccaacttttgggctacgaaaacaaggattttattgacttaatgagactatatttaactattcattctgatcatgaaggtggtaacgtttctgcccatactacacatttagtgggttctgccttatcttcgccatacttatctttggccgctggtttgaatggtttagctggcccattacatggtcgtgccaatcaagaagttttagaatggctatttaaattgagagaagaagtgaaaggtgactattcaaaagaaacaattgaaaagtacttgtgggatactttgaacgcagggagagttgttcctggttatggccatgcggttttgagaaaaactgatcctcgttatacggctcaacgtgaattcgcattgaaacatttcccagattacgagttatttaagttggtctccaccatttatgaagttgccccaggggttttaactaagcatggtaaaactaagaacccatggccaaatgttgattcacattccggtgttttattgcaatactatggtctaactgaggcttcgttctacactgtattgtttggtgttgccagagctattggtgtgttaccccaattaatcatcgatagggctgttggtgctccaatcgaaaggccaaaatcattctccaccgaaaaatacaaggagttggtaaagaaaatcgaaagtaagaactaa

SEQ ID NO: 1485 - DNA, 6702 bp, Saccharomyces cerevisiae
atgagcgaagaaagcttattcgagtcttctccacagaagatggagtacgaaattacaaactactcagaaagacatacagaacttccaggtcatttcattggcctcaatacagtagataaactagaggagtccccgttaagggactttgttaagagtcacggtggtcacacggtcatatccaagatcctgatagcaaataatggtattgccgccgtgaaagaaattagatccgtcagaaaatgggcatacgagacgttcggcgatgacagaaccgtccaattcgtcgccatggccaccccagaagatctggaggccaacgcagaatatatccgtatggccgatcaatacattgaagtgccaggtggtactaataataacaactacgctaacgtagacttgatcgtagacatcgccgaaagagcagacgtagacgccgtatgggctggctggggtcacgcctccgagaatccactattgcctgaaaaattgtcccagtctaagaggaaagtcatctttattgggcctccaggtaacgccatgaggtctttaggtgataaaatctcctctaccattgtcgctcaaagtgctaaagtcccatgtattccatggtctggtaccggtgttgacaccgttcacgtggacgagaaaaccggtctggtctctgtcgacgatgacatctatcaaaagggttgttgtacctctcctgaagatggtttacaaaaggccaagcgtattggttttcctgtcatgattaaggcatccgaaggtggtggtggtaaaggtatcagacaagttgaacgtgaagaagatttcatcgctttataccaccaggcagccaacgaaattccaggctcccccattttcatcatgaagttggccggtagagcgcgtcacttggaagttcaactgctagcagatcagtacggtacaaatatttccttgttcggtagagactgttccgttcagagacgtcatcaaaaaattatcgaagaagcaccagttacaattgccaaggctgaaacatttcacgagatggaaaaggctgccgtcagactggggaaactagtcggttatgtctctgccggtaccgtggagtatctatattctcatgatgatggaaaattctactttttagaattgaacccaagattacaagtcgagcatccaacaacggaaatggtctccggtgttaacttacctgcagctcaattacaaatcgctatgggtatccctatgcatagaataagtgacattagaactttatatggtatgaatcctcattctgcctcagaaatcgatttcgaattcaaaactcaagatgccaccaagaaacaaagaagacctattccaaagggtcattgtaccgcttgtcgtatcacatcagaagatccaaacgatggattcaagccatcgggtggtactttgcatgaactaaacttccgttcttcctctaatgtttggggttacttctccgtgggtaacaatggtaatattcactccttttcggactctcagttcggccatatttttgcttttggtgaaaatagacaagcttccaggaaacacatggttgttgccctgaaggaattgtccattaggggtgatttcagaactactgtggaatacttgatcaaacttttggaaactgaagatttcgaggataacactattaccaccggttggttggacgatttgattactcataaaatgaccgctgaaaagcctgatccaactcttgccgtcatttgcggtgccgctacaaaggctttcttagcatctgaagaagcccgccacaagtatatcgaatccttacaaaagggacaagttctatctaaagacctactgcaaactatgttccctgtagattttatccatgagggtaaaagatacaagttcaccgtagctaaatccggtaatgaccgttacacattatttatcaatggttctaaatgtgatatcatactgcgtcaactatctgatggtggtcttttgattgccataggcggtaaatcgcataccatctattggaaagaagaagttgctgctacaagattatccgttgactctatgactactttgttggaagttgaaaacgatccaacccagttgcgtactccatcccctggtaaattggttaaattcttggtggaaaatggtgaacacattatcaagggccaaccatatgcagaaattgaagttatgaaaatgcaaatgcctttggtttctcaagaaaatggtatcgtccagttattaaagcaacctggttctaccattgttgcaggtgatatcatggctattatgactcttgacgatccatccaaggtcaagcacgctctaccatttgaaggtatgctgccagattttggttctccagttatcgaaggaaccaaacctgcctataaattcaagtcattagtgtctactttggaaaacattttgaagggttatgacaaccaagttattatgaacgcttccttgcaacaattgatagaggttttgagaaatccaaaactgccttactcagaatggaaactacacatctctgctttacattcaagattgcctgctaagctagatgaacaaatggaagagttagttgcacgttctttgagacgtggtgctgttttcccagctagacaattaagtaaattgattgatatggccgtgaagaatcctgaatacaaccccgacaaattgctgggcgccgtcgtggaaccattggcggatattgctcataagtactctaacgggttagaagcccatgaacattctatatttgtccatttcttggaagaatattacgaagttgaaaagttattcaatggtccaaatgttcgtgaggaaaatatcattctgaaattgcgtgatgaaaaccctaaagatctagataaagttgcgctaactgttttgtctcattcgaaagtttcagcgaagaataacctgatcctagctatcttgaaacattatcaaccattgtgcaagttatcttctaaagtttctgccattttctctactcctctacaacatattgttgaactagaatctaaggctaccgctaaggtcgctctacaagcaagagaaattttgattcaaggcgctttaccttcggtcaaggaaagaactgaacaaattgaacatatcttaaaatcctctgttgtgaaggttgcctatggctcatccaatccaaagcgctctgaaccagatttgaatatcttgaaggacttgatcgattctaattacgttgtgttcgatgttttacttcaattcctaacccatcaagacccagttgtgactgctgcagctgctcaagtctatattcgtcgtgcttatcgtgcttacaccataggagatattagagttcacgaaggtgtcacagttccaattgttgaatggaaattccaactaccttcagctgcgttctccacctttccaactgttaaatctaaaatgggtatgaacagggctgtttctgtttcagatttgtcatatgttgcaaacagtcagtcatctccgttaagagaaggtattttgatggctgtggatcatttagatgatgttgatgaaattttgtcacaaagtttggaagttattcctcgtcaccaatcttcttctaacggacctgctcctgatcgttctggtagctccgcatcgttgagtaatgttgctaatgtttgtgttgcttctacagaaggtttcgaatctgaagaggaaattttggtaaggttgagagaaattttggatttgaataagcaggaattaatcaatgcttctatccgtcgtatcacatttatgttcggttttaaagatgggtcttatccaaagtattatacttttaacggtccaaattataacgaaaatgaaacaattcgtcacattgagccggctttggccttccaactggaattaggaagattgtccaacttcaacattaaaccaattttcactgataatagaaacatccatgtctacgaagctgttagtaagacttctccattggataagagattctttacaagaggtattattagaacgggtcatatccgtgatgacatttctattcaagaatatctgacttctgaagctaacagattgatgagtgatatattggataatttagaagtcaccgacacttcaaattctgatttgaatcatatcttcatcaacttcattgcggtgtttgatatctctccagaagatgtcgaagccgccttcggtggtttcttagaaagatttggtaagagattgttgagattgcgtgtttcttctgccgaaattagaatcatcatcaaagatcctcaaacaggtgccccagtaccattgcgtgccttgatcaataacgtttctggttatgttatcaaaacagaaatgtacaccgaagtcaagaacgcaaaaggtgaatgggtatttaagtctttgggtaaacctggatccatgcatttaagacctattgctactccttaccctgttaaggaatggttgcaaccaaaacgttataaggcacacttgatgggtaccacatatgtctatgacttcccagaattattccgccaagcatcgtcatcccaatggaaaaatttctctgcagatgttaagttaacagatgatttctttatttccaacgagttgattgaagatgaaaacggcgaattaactgaggtggaaagagaacctggtgccaacgctattggtatggttgcctttaagattactgtaaagactcctgaatatccaagaggccgtcaatttgttgttgttgctaacgatatcacattcaagatcggttcctttggtccacaagaagacgaattcttcaataaggttactgaatatgctagaaagcgtggtatcccaagaatttacttggctgcaaactcaggtgccagaattggtatggctgaagagattgttccactatttcaagttgcatggaatgatgctgccaatccggacaagggcttccaatacttatacttaacaagtgaaggtatggaaactttaaagaaatttgacaaagaaaattctgttctcactgaacgtactgttataaacggtgaagaaagatttgtcatcaagacaattattggttctgaagatgggttaggtgtcgaatgtctacgtggatctggtttaattgctggtgcaacgtcaagggcttaccacgatatcttcactatcaccttagtcacttgtagatccgtcggtatcggtgcttatttggttcgtttgggtcaaagagctattcaggtcgaaggccagccaattattttaactggtgctcctgcaatcaacaaaatgctgggtagagaagtttatacttctaacttacaattgggtggtactcaaatcatgtataacaacggtgtttcacatttgactgctgttgacgatttagctggtgtagagaagattgttgaatggatgtcttatgttccagccaagcgtaatatgccagttcctatcttggaaactaaagacacatgggatagaccagttgatttcactccaactaatgatgaaacttacgatgtaagatggatgattgaaggtcgtgagactgaaagtggatttgaatatggtttgtttgataaagggtctttctttgaaactttgtcaggatgggccaaaggtgttgtcgttggtagagcccgtcttggtggtattccactgggtgttattggtgttgaaacaagaactgtcgagaacttgattcctgctgatccagctaatccaaatagtgctgaaacattaattcaagaacctggtcaagtttggcatccaaactccgccttcaagactgctcaagctatcaatgactttaacaacggtgaacaattgccaatgatgattttggccaactggagaggtttctctggtggtcaacgtgatatgttcaacgaagtcttgaagtatggttcgtttattgttgacgcattggtggattacaaacaaccaattattatctatatcccacctaccggtgaactaagaggtggttcatgggttgttgtcgatccaactatcaacgctgaccaaatggaaatgtatgccgacgtcaacgctagagctggtgttttggaaccacaaggtatggttggtatcaagttccgtagagaaaaattgctggacaccatgaacagattggatgacaagtacagagaattgagatctcaattatccaacaagagtttggctccagaagtacatcagcaaatatccaagcaattagctgatcgtgagagagaactattgccaatttacggacaaatcagtcttcaatttgctgatttgcacgataggtcttcacgtatggtggccaagggtgttatttctaaggaactggaatggaccgaggcacgtcgtttcttcttctggagattgagaagaagattgaacgaagaatatttgattaaaaggttgagccatcaggtaggcgaagcatcaagattagaaaagatcgcaagaattagatcgtggtaccctgcttcagtggaccatgaagatgataggcaagtcgcaacatggattgaagaaaactacaaaactttggacgataaactaaagggtttgaaattagagtcattcgctcaagacttagctaaaaagatcagaagcgaccatgacaatgctattgatggattatctgaagttatcaagatgttatctaccgatgataaagaaaaattgttgaagactttgaaataa

SEQ ID NO: 1486 - DNA, 765 bp, Saccharomyces cerevisiae
atgagtggttacgatagagctttgtccattttctccccagatggacacattttccaagtggagtacgccctggaggcggtaaagaggggtacctgtgctgtaggtgtcaagggtaagaattgtgtagtattgggctgcgaaagaaggtctactttgaagctgcaagacactagaattacgccttccaaagtttccaaaattgactcgcatgtggtgttgtcattttctggtttaaatgcagattccagaattcttatcgagaaggctagagtggaggcccaaagtcacagactaacgttggaggatcccgtgacggtggagtatctcacacgttatgtcgctggtgtgcaacaaaggtacacgcagtcaggaggtgttagaccatttggtgtgtcgacgctgattgccggcttcgacccgagagatgatgaacccaagctttaccagaccgagccaagtggtatatactcttcgtggtccgctcagaccattgggagaaactccaagacggtacgtgagtttttggagaagaattacgatcgcaaagaaccaccagccacagtggaagaatgtgtcaaacttactgtaagatctctgttggaggtagttcaaacaggtgcaaaaaatattgaaatcactgttgttaagccggactcagatattgttgcgttgagcagtgaggaaattaaccagtacgtcacccaaatcgaacaagaaaagcaagagcagcaagagcaggacaaaaagaaaaaatctaaccattaa

SEQ ID NO: 1487 - DNA, 321 bp, Saccharomyces cerevisiae
atgaagtacttagctgcttacctattattgaacgctgctggtaacaccccagatgccaccaagattaaggctattttggaatccgtcggtatcgaaatcgaagacgaaaaggtttcctccgttttgtccgctttggaaggtaagtctgttgacgaattaattactgaaggtaacgaaaagttggctgctgttccagctgctggtccagcttctgctggcggtgctgctgctgcctctggtgatgctgctgctgaagaagaaaaggaagaagaagccgctgaagaatctgacgacgacatgggtttcggtttattcgactaa

SEQ ID NO: 1488 - DNA, 429 bp, Saccharomyces cerevisiae
atgtctcaagctgttaatgccaagaagagagtttttaagacccactcttacagaggtgtcgatttggaaaaattgttggaaatgtccactgaagatttcgtcaagttggccccagctagagttagaagaagatttgcccgtggtatgacttccaagccagccggtttcatgaagaagttgagagctgccaagttggctgccccagaaaatgaaaagccagctccagtcagaacccacatgagaaacatgatcattgttccagaaatgatcggttccgtcgtcggtatctacaacggtaaggctttcaaccaagttgaaatcagaccagaaatgttgggtcactatttgggtgaattctccattacttacaccccagtcagacatggtagagccggtgctactacttcccgtttcatcccattgaaataa

SEQ ID NO: 1489 - DNA, 1263 bp, Saccharomyces cerevisiae
atgtctaagggaaaagtttgtttggcttattctggtggtttagatacctccgtcattttggcttggctactagaccaaggctacgaagttgtagctttcatggctaatgtagggcaagaagaagatttcgatgccgccaaggaaaaggccttgaagatcggtgcctgcaagttcgtttgtgtggattgtcgtgaagattttgtcaaggatattctattcccagctgtacaggtcaacgctgtgtacgaagacgtttatctgttgggtacctctttggcaagacctgttattgccaaagcccaaattgacgtcgctaaacaggagggctgtttcgcggtctctcatggttgtaccggtaaaggtaatgatcaaatcagattcgaattgtcattttacgctctgaagccagacgttaagtgtattacaccatggagaatgcctgaatttttcgaaagatttgctggcagaaaggatttgttagactatgctgcacaaaagggtattcccgtcgcccaaaccaaggccaagccatggtctactgacgaaaaccaagcccacatttcttacgaggcaggtatcttggaagacccagataccaccccaccaaaggacatgtggaaattgatcgtcgatccaatggatgctccggaccaaccacaagatttgaccattgactttgaacgtggtcttccagtcaagttgacctacaccgacaacaagacttccaaggaagtttccgttaccaagcctttggatgttttcttggccgcatccaacttagcaagggccaacggtgttggtagaatcgatattgtagaagatcgttacattaacttgaaatccagaggttgttacgaacaggctccattgactgttttgagaaaagctcatgttgatttggaaggtttgactttagacaaagaagtccgtcaattgagagactcattcgtcacaccaaactactccagattgatatataacggttcctacttcaccccagagtgtgagtacatcagatctatgatccaaccatcccaaaatagcgttaacggtactgtcagggttagactgtataagggtaacgtcatcattctgggcagatctacaaagactgaaaagttgtacgatccgacagaatcctctatggatgagttgaccggtttcttacctaccgataccaccggtttcattgccatccaggccattagaattaaaaaatacggtgaatccaaaaaaaccaaaggtgaagagttgactttgtaa

SEQ ID NO: 1490 - DNA, 1047 bp, Saccharomyces cerevisiae
atgtctatcccagaaactcaaaaaggtgttatcttctacgaatcccacggtaagttggaatacaaagatattccagttccaaagccaaaggccaacgaattgttgatcaacgttaaatactctggtgtctgtcacactgacttgcacgcttggcacggtgactggccattgccagttaagctaccattagtcggtggtcacgaaggtgccggtgtcgttgtcggcatgggtgaaaacgttaagggctggaagatcggtgactacgccggtatcaaatggttgaacggttcttgtatggcctgtgaatactgtgaattgggtaacgaatccaactgtcctcacgctgacttgtctggttacacccacgacggttctttccaacaatacgctaccgctgacgctgttcaagccgctcacattcctcaaggtaccgacttggcccaagtcgcccccatcttgtgtgctggtatcaccgtctacaaggctttgaagtctgctaacttgatggccggtcactgggttgctatctccggtgctgctggtggtctaggttctttggctgttcaatacgccaaggctatgggttacagagtcttgggtattgacggtggtgaaggtaaggaagaattattcagatccatcggtggtgaagtcttcattgacttcactaaggaaaaggacattgtcggtgctgttctaaaggccactgacggtggtgctcacggtgtcatcaacgtttccgtttccgaagccgctattgaagcttctaccagatacgttagagctaacggtaccaccgttttggtcggtatgccagctggtgccaagtgttgttctgatgtcttcaaccaagtcgtcaagtccatctctattgttggttcttacgtcggtaacagagctgacaccagagaagctttggacttcttcgccagaggtttggtcaagtctccaatcaaggttgtcggcttgtctaccttgccagaaatttacgaaaagatggaaaagggtcaaatcgttggtagatacgttgttgacacttctaaataa

SEQ ID NO: 1491 - DNA, 342 bp, Saccharomyces cerevisiae
atgtctgaaattcaaaacaaagctgaaactgccgcccaagatgtccaacaaaagttggaagaaaccaaagaatctttgcaaaacaagggccaagaagtaaaggaacaagctgaagcttctatcgacaacctaaaaaatgaagctactccagaagctgaacaggtgaagaaggaagaacaaaacattgctgatggtgtcgaacaaaagaagaccgaagctgccaacaaagttgaagaaactaagaagcaagcttccgccgccgtcagtgagaagaaggaaaccaagaaggaaggcggtttcttgaagaaattgaaccgtaaaattgcttccattttcaactaa

SEQ ID NO: 1492 - DNA, 561 bp, Saccharomyces cerevisiae
atgggtatcgatcacacttccaagcaacacaagagatctggtcacagaactgctccaaagtctgacaatgtctacttgaaattgttagtcaaattatacactttcttagctcgtcgtactgatgctccattcaacaaggttgtcttgaaggctttgttcttgtctaagatcaacagaccacctgtttctgtctctagaattgctagagctttgaagcaagaaggtgctgctaacaagactgttgtcgttgttggtactgttactgacgatgccagaatctttgaattcccaaagaccactgttgctgctttgagattcactgctggtgccagagccaagattgttaaggctggtggtgaatgtatcactttggatcaattagctgtcagagctccaaagggtcaaaacactttgatcttgagaggtccaagaaactccagagaagctgtcagacacttcggtatgggtccacacaagggtaaggctccaagaatcttgtccaccggtagaaagttcgaaagagctagaggtagaagaagatctaagggtttcaaggtgtaa

SEQ ID NO: 1493 - DNA, 429 bp, Saccharomyces cerevisiae
atggctccatctgctaaggctactgccgctaagaaagctgtcgttaagggtactaatggtaagaaggctttgaaggtcagaacttctgctaccttcagactaccaaagaccttgaagttggctagagctccaaaatatgcttccaaggctgttccacattacaacagattggactcatacaaggtcattgagcaaccaatcacttctgaaaccgctatgaagaaggttgaagatggtaacattttggttttccaagtttccatgaaagctaacaaataccaaatcaagaaggccgtcaaggaattatacgaagttgacgtattgaaggttaacactttggttagaccaaacggtaccaagaaggcttacgttagattgactgctgactacgatgctttggacattgctaacagaatcggttacatttaa

SEQ ID NO: 1494 - DNA, 321 bp, Saccharomyces cerevisiae
atgtccacccttttgaagtctgctaaatctatcgttccattgatggaccgtgtccttgtccaaagaatcaaggcacaagcaaagacagcatccgggttgtatttacctgaaaagaacgtggagaagttaaaccaagctgaagttgttgccgtaggcccgggctttactgatgctaatggtaataaggttgttcctcaagttaaagttggtgaccaagttttgattccacagtttggtggttctaccattaaattgggtaacgacgatgaagttattcttttcagggacgctgaaatcctggctaagattgccaaggactaa

SEQ ID NO: 1495 - DNA, 186 bp, Saccharomyces cerevisiae
atggacggtatgtttgctatgccaggcgcagctgcaggtgcggcctccccacaacaaccaaaatcaagattccaagctttcaaggaatctccactatacacaattgcactaaacggtgccttcttcgttgcaggtgttgcgtttattcaatctccactcatggacatgttggccccacaattataa

SEQ ID NO: 1496 - DNA, 1164 bp, Saccharomyces cerevisiae
atgtctcacagaaagtacgaagcaccacgtcacggtcatttaggtttcttgccaagaaagagagctgcctccatcagagctagagttaaggcttttccaaaggatgacagatccaagccagttgctctaacttccttcttgggttacaaggctggtatgaccaccattgtcagagatttggacagaccaggttctaagttccacaagcgtgaagttgtcgaagctgtcaccgttgttgacactccaccagttgtcgttgttggtgttgtcggttacgtcgaaaccccaagaggtttgagatctttgaccaccgtctgggctgaacatttgtctgacgaagtcaagagaagattctacaagaactggtacaagtctaagaagaaggctttcaccaaatactctgccaagtacgctcaagatggtgctggtattgaaagagaattggctagaatcaagaagtacgcttccgtcgtcagagttttggtccacactcaaatcagaaagactccattggctcaaaagaaggctcatttggctgaaatccaattgaacggtggttccatctctgaaaaggttgactgggctcgtgaacatttcgaaaagactgttgctgtcgacagcgtttttgaacaaaacgaaatgattgacgctattgctgtcaccaagggtcacggtttcgaaggtgttacccacagatggggtactaagaaattgccaagaaagactcacagaggtctaagaaaggttgcttgtattggtgcttggcatccagcccacgttatgtggagtgttgccagagctggtcaaagaggttaccattccagaacctccattaaccacaagatttacagagtcggtaagggtgatgatgaagctaacggtgctaccagcttcgacagaaccaagaagactattaccccaatgggtggtttcgtccactacggtgaaattaagaacgacttcatcatggttaaaggttgtatcccaggtaacagaaagagaattgttactttgagaaagtctttgtacaccaacacttctagaaaggctttggaagaagtcagcttgaagtggattgacactgcttctaagttcggtaagggtagattccaaaccccagctgaaaagcatgctttcatgggtactttgaagaaggacttgtaa

SEQ ID NO: 1497 - DNA, 573 bp, Saccharomyces cerevisiae
atgtctgctccacaagccaagattttgtctcaagctccaactgaattggaattacaagttgctcaagctttcgttgaattggaaaattcttctccagaattgaaagctgagttgagacctttgcaattcaagtccatcagagaaatcgacgttgctggtggtaagaaggctttggccatttttgttccagtcccatctttggctggtttccacaaggttcaaactaagttgacccgtgaattggaaaagaaattccaagaccgtcatgtcatcttcttggctgaaagaagaatcttgccaaagccatctagaacatctagacaagtccaaaagagaccaagatccagaaccttgactgctgttcatgacaagatcttggaagacttagtcttcccaactgaaatcgttggtaagagagttagatatttggttggtggtaacaagatccaaaaggttttgttagactcaaaggatgtccaacaaatcgactacaaattggaatctttccaagctgtttacaacaaattgactggtaagcaaattgttttcgaaattccaagtgaaactcattag

SEQ ID NO: 1498 - DNA, 381 bp, Saccharomyces cerevisiae
atgtcttggcaagcatacactgataacttaataggaaccggtaaagtcgacaaagctgtcatctactcgagagcaggtgacgctgtttgggctacttctggtggcctatctttgcaaccaaacgaaattggtgaaattgttcaaggcttcgacaatccagctggtttgcaaagcaatggtttgcatattcaaggccaaaagttcatgttgttgagagctgacgatagaagtatctacggtagacatgatgctgagggtgttgtttgtgtaagaactaagcaaaccgttattattgctcattatccaccaaccgtacaagccggtgaggccaccaagattgtcgagcaattggctgactacttgattggtgttcaatactaa

SEQ ID NO: 1499 - DNA, 2529 bp, Saccharomyces cerevisiae
atggttgctttcactgttgaccaaatgcgttctttaatggacaaagttaccaatgtgcgtaacatgtccgttattgctcacgtcgatcatggtaagtccactttgaccgattccttggtccaaagagccggtattatttccgctgctaaggctggtgaagctcgtttcaccgataccagaaaggatgaacaagaaagaggtatcactatcaagtctaccgctatttctctatactctgaaatgtctgacgaagatgtcaaggaaatcaagcaaaagaccgacggtaactccttcttgatcaacttgatcgactctccaggtcacgttgacttctcctctgaagttactgccgctttacgtgtcactgacggtgctttggttgtcgtcgacaccattgaaggtgtctgtgtccaaaccgaaactgttttgagacaagctttgggtgaaagaatcaagcctgttgttgttatcaacaaggtcgacagagctttgttggaattgcaagtttctaaggaagatttataccaaacctttgccagaactgttgaatccgttaacgtcatcgtttccacctacgccgatgaagttttgggtgatgtccaagtttacccagccagaggtaccgttgccttcggttccggtttgcacggttgggctttcactatccgtcaattcgccaccagatatgctaagaaattcggtgtcgacaaggccaagatgatggacagattatggggtgactctttcttcaacccaaagaccaagaagtggaccaacaaggacactgatgctgaaggtaagccattggaaagagctttcaacatgttcatcttggacccaatcttcagattattcactgctatcatgaacttcaagaaagacgaaattccagttttgctagaaaagttggaaattgtcttgaagggtgacgaaaaggacttggaaggtaaggccttgttgaaggttgttatgagaaagttcttgccagctgccgatgccttattggaaatgattgtcttgcacttgccatctccagtcactgctcaagcctacagagctgaacaattatacgaaggtccagctgacgatgccaactgtattgctatcaagaactgtgatccaaaggctgatttgatgttgtacgtctccaagatggtgccaacctctgataagggtagattctacgccttcggtagagtttttgccggtactgttaagtccggtcaaaaggtcagaatccaaggtccaaactacgttccaggtaagaaggacgatttgttcatcaaggccattcaaagagttgttttgatgatgggtagatttgtcgaaccaatcgatgactgtccagccggtaacattatcggtttagtcggtatcgatcaattcttgttgaagactggtactttgaccaccagtgaaactgctcacaacatgaaggtcatgaaattctctgtctctccagttgtgcaagtcgctgtcgaagtcaagaacgctaacgacttaccaaaattggtcgaaggtttgaagagattgtccaagtctgatccatgtgtcttgacctatatgtctgaatccggtgaacatatcgttgctggtaccggtgaattgcatttggaaatttgtttgcaagatttggaacacgaccacgctggtgttccattgaagatctccccaccagttgtcgcttacagagaaactgttgaaagtgaatcttctcaaactgctttgtccaagtctccaaacaagcataacagaatctacttgaaggctgaaccaattgacgaagaagtctctttggctattgaaaacggtatcatcaacccaagagatgatttcaaggccagagctagaatcatggctgacgactacggttgggatgtcaccgatgccagaaagatctggtgtttcggtccagacggtaacggtccaaacttggttattgaccaaactaaggctgtccaatacttgcacgaaatcaaggattccgttgttgctgctttccaatgggctaccaaggaaggtccaattttcggtgaagaaatgagatctgtcagagttaacattttggatgttactttacatgccgatgctatccacagaggtggtggtcaaatcatcccaaccatgagaagagctacttacgccggtttcttgttggctgatccaaagatccaagaaccagttttcttggtcgaaattcaatgtccagaacaagccgtcggtggtatctactccgtcttaaacaagaagagaggtcaagtcgtttctgaagaacaaagaccaggtactccattgtttaccgtcaaggcctacttgccagttaacgaatctttcggtttcactggtgaattgagacaagctaccggtggtcaagctttcccacaaatggttttcgaccattggtccactttaggttctgacccattggacccaacctctaaggctggtgaaattgttcttgctgctcgtaagagacacggtatgaaggaagaagttccaggctggcaagaatattacgacaaattgtaa

SEQ ID NO: 1500 - DNA, 1110 bp, Saccharomyces cerevisiae
atgttgagaaatactttttttagaaacacctcgaggaggtttttggctactgtaaagcaaccttcaatcggaagatataccggcaaacctaacccttctaccggcaaatacacggtctcgttcattgaaggtgatggtatcggacctgaaatttccaagtctgtaaagaaaatctttagtgcagcaaacgtccccatagaatgggaatcttgtgatgttagccctatctttgtcaacggattaacgaccattcctgaccctgccgtacaatctatcacaaaaaacctggttgcactaaaaggtccactagctacacctattggtaaaggtcacagatctttgaatttgacattgagaaaaacatttgggttatttgccaacgttcgtcccgcaaagtctattgaaggttttaagaccacttacgaaaacgttgatttagttcttatcagagagaataccgaaggtgaatattctggtatcgaacacatagtttgccctggcgttgttcaatctattaaactgatcacaagagatgcctctgagcgagtcattagatacgcttttgaatatgcaagagccatcggcagaccaagagttattgtggtacataaatctactatccagagattagctgatggtttattcgttaatgttgccaaagaactatccaaagagtatcctgaccttactttagaaactgaacttattgataacagtgtgttaaaggtggtcaccaacccatctgcttacacagacgctgtttctgtttgtccaaatctatacggtgatatcttgtccgacttgaactctggtttgagcgccggttctttaggtttaactccatctgccaatattggtcataaaatctcgatctttgaagctgtccatggctctgcccctgatattgccggtcaagataaagcgaatccaactgccctacttttatcttcagtaatgatgttaaaccacatgggtctaacgaatcatgctgaccaaattcaaaatgcagtattgtctactatcgcatcaggtccagaaaacagaacaggtgacttggctggtactgctactacttcatcattcactgaagcagtcatcaagagattataa

SEQ ID NO: 1501 - DNA, 192 bp, Saccharomyces cerevisiae
atggctaaagttcacggttctctagctcgtgctggtaaagttaagtctcaaactccaaaggttgaaaaaactgaaaagccaaagaaaccaaagggtcgtgcttacaagagattattgtacaccagaagattcgttaacgttaccttggttaacggtaagagaagaatgaacccaggtccatctgtccaatag

SEQ ID NO: 1502 - DNA, 1314 bp, Saccharomyces cerevisiae
atgccaaaaaaggtttggaaatcatctacgccttccacttatgaacatatctccagcttaagaccaaaatttgtgtctcgtgtggacaatgttctgcaccaaaggaagtccttgacgttcagcaacgttgttgttccagataaaaaaaataacactctaacctcaagtgttatatactctcaaggtagtgatatctacgaaattgacttcgctgtaccactacaagaagccgcttcagaaccggtgaaagactatggtgacgcctttgaaggtattgaaaacacctcgttgagcccaaaattcgtgtaccagggtgaaactgtctccaaaatggcctacttagataagactggagaaactacattattgtcgatgtctaagaacgggtcgttggcttggttcaaagagggtataaaggtccctattcacattgtacaggaattgatgggtccagcaaccagctatgccagcatccattctttaaccagacctggtgatctacctgaaaaggatttctcattagccatctctgacttcggcatttccaatgataccgaaaccattgtgaagtctcagagtaatggtgatgaagaagacagtattttgaaaatcattgacaatgccggtaagcctggtgagattctacgtactgttcatgtgcctggtaccactgtgactcacaccgtaagatttttcgacaatcatatctttgcgtcttgttcagatgacaatattctgaggttctgggacactagaacttccgacaagcctatatgggtgttgggagaaccaaagaacggaaaattgacctcgtttgattgctctcaggtttccaacaacttgtttgttaccggtttcagtacgggtattatcaagttatgggatgccagagcggctgaagctgccaccactgatttgacttatagacaaaacggtgaagatccaattcagaatgaaatcgctaacttctatcatgccggcggtgattctgttgtcgacgtccaattttctgccacttcaagctctgaattctttactgtgggcggcactggtaatatttaccactggaacactgactattccttgtcaaagtacaatcctgacgataccattgctcctcctcaagatgccactgaagaatcacaaacaaaatctctgagattcttgcacaagggtggaagcagaagatctccaaaacagattggaagaagaaacaccgccgcttggcatccagttattgaaaacttggttggtactgtcgatgacgatagtttagtcagcatctacaagccctataccgaggaaagcgaatag

SEQ ID NO: 1503 - DNA, 324 bp, Saccharomyces cerevisiae
atggctgaatcccatagactatacgttaaaggtaagcacttatcctaccaaagatctaagagagttaacaacccaaatgtctctttgattaagattgaaggtgttgccactccacaagaagctcaattctatttgggtaagcgtatcgcctacgtttacagagcttccaaggaagtcagaggttccaagattagagttatgtggggcaaagtcaccagaactcacggtaactctggtgtcgttagagctacctttagaaacaacttgccagccaagactttcggtgcctctgtcagaattttcttgtacccatctaacatttaa

SEQ ID NO: 1504 - DNA, 633 bp, Saccharomyces cerevisiae
atgcttcaatccgttgtctttttcgctcttttaaccttcgcaagttctgtgtcagcgatttattcaaacaatactgtttctacaactaccactttagcgcccagctactccttggtgccccaagagactaccatatcgtacgccgacgacaccactaccttttttgtcacctcaacggtctactccacgagctggttcacctcaacttcagccaccattaccaatgcggcctcctcctccttgtccacctcttcggcctctggatctgtaaccccagaatccacccatgaaattacctccacctcgactatcacgtccactttgctgctaacccttcatgactccactactttgtctccatcatctactgcagcaagtgtcagtgacgaagattcaaacaacaaagatgcaaaggtcaagtcctttgaacaggcttcaacttccaatggttgcgtcccaatcacaaagtttgtcactgtcaccaatgagcccgttacccagtacgttacagtcaccccaaatacgactacacaatacgttactgtcaccggtgcaccttctgttaccactacctctccaggtaacgtacaatggtacaacaccacttcgattactaattcgaccagttggtga

SEQ ID NO: 1505 - DNA, 2523 bp, Saccharomyces cerevisiae
atggcagagaaggaggaagcgatttttcgctctgctgaaatggctttagtccaattctatattcctcaagaaatttcaagagactctgcttacactttaggtcaattgggtcttgttcaattccgtgacttgaactctaaggtgcgtgcgtttcaaagaactttcgtgaacgaaattagaagactggataatgtagaaagacagtatcgttacttttattctcttttgaagaaacacgatattaagctctacgaaggagacacggacaaatatttggacggctcaggtgaattgtacgttccaccaagcggttcagtgatagatgattatgtccggaacgcttcatatttggaagaaagattgattcaaatggaggatgcaaccgatcaaattgaagtccagaaaaatgacttggaacagtatcgctttattttgcagtcaggtgatgaatttttcttgaagggtgataataccgacagcacttcctatatggatgaagacatgatcgacgctaatggggaaaacattgctgctgctatcggtgcttctgtaaactatgtcactggtgtcattgctagagacaaagttgccaccttagaacaaattctttggagagtattaagaggtaaccttttcttcaaaactgttgaaattgaacaacctgtttatgatgtcaaaaccagggagtataaacataaaaatgcttttatcgtattttctcacggtgatctgattattaaaagaatcagaaagattgcggaatcattggatgccaatctttacgatgttgactcttccaacgagggtagatcacaacaattggccaaggtcaacaagaatttgagtgatttgtacacagttttgaaaaccacttctaccactttagaaagtgaattatatgccattgccaaagaattggactcttggttccaagatgttacccgtgaaaaggcgatttttgaaattttgaacaagtctaactatgataccaatagaaagattttgattgctgaaggttggataccaagagacgaattggctactttgcaagctcgtcttggtgaaatgatcgcaagattgggtattgatgtcccatccattatccaagtcctggatacaaaccacactccacctaccttccacagaactaacaagtttactgctggtttccaaagtatctgtgactgttacggtattgctcagtacagagaaatcaatgctggtttacccacaattgtcactttccctttcatgtttgccatcatgtttggtgatatgggtcacgggttcttaatgaccttagccgcattgtctcttgtattgaatgaaaagaaaatcaacaaaatgaaaagaggcgaaattttcgatatggccttcactggtagatacattattttgttgatgggtgtcttttccatgtacacaggtttcctttacaacgatatcttctctaaaactatgactattttcaagtctggttggaaatggcctgatcattggaaaaaaggtgagagtattactgctacatcggtgggtacataccctatcggtttagattgggcttggcatggaactgaaaatgctttgttattttctaattcttacaaaatgaaactatcaattttaatggggttcatccacatgacctattcttatttcttttcgttggctaaccacctatactttaactctatgattgatatcatcggtaactttattcctggtttgctatttatgcaaggtatctttggttatctttccgtttgtattgtttacaaatgggctgttgattgggttaaggacggaaagcctgctccaggtttgttaaatatgttgatcaacatgtttttatcaccaggaactattgacgatgaattataccctcatcaagcaaaggtccaagtgtttttgttgttgatggccttggtttgtattccttggttgctattggtgaagccattacatttcaaattcactcataaaaagaaatctcacgaaccactgccatcgactgaagcagatgctagttctgaagatttggaagcacaacaattaatttccgcgatggacgccgatgacgctgaagaagaagaagttggttctggatctcatggtgaagactttggtgatattatgattcatcaagttattcatacaattgaattctgtttgaattgtgtttcgcacactgcatcctatttacgtttatgggccttatcattggcacatgctcaattgtctagtgttttatggacaatgacaattcaaattgcctttggatttagaggatttgtgggtgtgtttatgacggttgcactttttgccatgtggttcgcactaacatgtgcagttcttgttttgatggaaggtacatctgccatgcttcattccttacgtttgcactgggttgaatctatgtccaagtttttcgtgggtgaaggtttaccatacgaaccattcgcatttgagtataaagacatggaagtcgctgttgctagtgcaagctcttccgcttcaagctaa

SEQ ID NO: 1506 - DNA, 420 bp, Saccharomyces cerevisiae
atgtggaaggccgtgatgaatgcttggaatggaaccgagagtcaaagtaagaatgtttcaaatattcaatcttacagttttgaagacatgaaaagaatcgttggaaagcatgatcctaatgtggttttggtagatgttagagaaccatctgagtactcgattgttcatattcctgcttccatcaatgtgccatatagatcgcaccctgacgcatttgccttagatcctttagaatttgagaaacagattggcatcccaaaacctgacagtgccaaggagctaatattttattgtgcttctggcaaacgcgggggagaagctcaaaaagtcgcctcctcacatggatattcaaacacctcactatatcctggctctatgaatgattgggtttctcatgggggtgataaacttgacttatag

SEQ ID NO: 1507 - DNA, 318 bp, Saccharomyces cerevisiae
atgttgatgccaaaggaagacagaaacaagatccaccaatacttattccaagaaggtgttgttgtcgccaagaaggatttcaaccaagccaagcacgaagaaattgacaccaagaacttgtatgtcattaaggctttacaatccttgacttctaagggttacgtcaagactcaattctcatggcaatactactactacaccttgactgaagaaggtgttgaatacttgagagaatacttgaacttgccagaacacattgttccaggtacctacattcaagaaagaaacccaactcaaagaccacaaagaagatattaa

SEQ ID NO: 1508 - DNA, 1236 bp, Saccharomyces cerevisiae
atgtcctccgctgcaacaaaagctactttctgtatccaaaatggtccttcctttgaaggtatatcttttggtgcaaacaaatctgttgctggtgaaacagttttcactacttctctggttggttacccagagtccatgactgatccttcctaccgtggtcagatattagtcttcacgcaacccttgattggtaactacggtgtcccatccggcgaagcccgcgatgaatacaatttactgaagtattttgaatctccgcatatacatgtggtcggcatcgttgtcgctgaatatgcttatcaatattcgcattggaccgctgttgaatctctggcacaatggtgtcagagagaaggtgttgctgctattactggcgtagacacccgtgaactagtgcaatacttgagggaacaaggttcttctttgggccgtattacgttggctgatcatgaccctgtcccctacgtgaatcccatgaaaactaacttggttgctcaagtcaccacaaaaaagcctttccacgtctctgccttacctgggaaggctaaggcaaatgtggctcttattgactgtggtgttaaagaaaacattatcagatgcctagtcaaaagaggtgccaatgtaactgttttcccctatgattacagaattcaagatgttgcttctgaattcgacggtattttcttatccaatggaccaggcaacccagaactatgccaagctacaatttccaacgtcagggaattactaaataaccctgtttatgactgtatccctatttttgggatttgtctaggccatcaactcttggctctggcctccggtgcctctactcacaaattgaaatatggtaatagggctcacaacatccctgccatggatttgactaccggccagtgccacattacatctcaaaatcatggctatgcagttgatcctgagaccctaccaaaggaccaatggaaaccttattttgttaatttaaacgacaaatcaaacgaaggcatgatacaccttcaaagacccatattttctacccaatttcacccagaggcaaaaggtggtcccttagacacagctattctttttgacaaattcttcgataatatagaaaaataccaattacaatctcaggcaaaaagttcaatctcactaaaagtaacatacagtaccgataaatcgagattgcagagtataaatgttactaagttggccaaggaaagagtgttgttctaa

SEQ ID NO: 1509 - DNA, 702 bp, Saccharomyces cerevisiae
atgtcctccgctattactgctttgacaccaaaccaagtgaacgatgaattgaacaagatgcaagctttcatcagaaaggaagctgaagaaaaagcgaaggaaatccaattgaaggctgaccaagagtacgaaatcgagaagaccaacatcgtaagaaatgaaaccaacaacattgacggcaacttcaagagcaagttgaagaaggccatgctttcgcaacagattactaagtcaacgatagcaaacaaaatgaggttgaaggttctttctgctcgtgaacagtcgctagacgggatattcgaggaaaccaaggaaaagttgtcaggaattgccaacaaccgggacgagtacaagcccattttgcaatcattgatcgtggaggcacttttgaagttgttggaacctaaggcgattgtcaaggctcttgaaagagacgtcgatttaatcgagtcgatgaaggacgacattatgcgtgagtatggggaaaaggcccagcgcgcaccattggaagagattgttatctccaatgattacttgaacaaagaccttgtttccggcggtgttgtggtctccaatgcatcagacaagattgaaattaacaacactttggaggaaagattgaaattgttaagtgaagaggcattgcccgccatcagattggaattgtatggtccttccaagacaagaaagttctttgattga

SEQ ID NO: 1510 - DNA, 432 bp, Saccharomyces cerevisiae
atgtctgacgttgaagaagtcgttgaagttcaagaagaaactgttgttgaacaaactgccgaagttactatcgaagatgctttgaaggttgttttgagaaccgctttggttcacgatggtctagctagaggtttgagagaatctaccaaggctttaaccagaggtgaagctttattggttgttttggtcagctctgttactgaagctaacattatcaagttggttgaaggtttggctaacgacccagaaaacaaggttccattgatcaaggttgctgatgctaagcaattaggtgaatgggctggtttgggtaagatcgaccgtgaaggtaacgccagaaaggttgtcggtgcctccgttgttgttgtcaagaactggggtgctgaaactgatgaattgtccatgatcatggaacacttctcccaacaataa

SEQ ID NO: 1511 - DNA, 1365 bp, Saccharomyces cerevisiae
atgtcagagccagaatttcaacaagcttacgaagaagttgtctcctctttggaagactctactcttttcgaacaacacccagaatacagaaaggttttgccaattgtttctgttccagaaagaatcatacaattcagagtcacctgggaaaatgacaagggtgaacaagaagttgctcaaggttacagagtgcaatataactccgccaagggtccatacaagggtggtctacgtttccatccttccgtgaacttgtctatcttgaaattcttgggtttcgaacaaatcttcaagaactccttgaccggcctagacatgggtggtggtaaaggtggtctatgtgtggacttgaagggaagatctaataacgaaatcagaagaatctgttatgctttcatgagagaattgagcagacacattggtcaagacactgacgtgccagctggtgatatcggtgttggtggtcgtgaaattggttacctgttcggtgcttacagatcatacaagaactcctgggaaggtgtcttaaccggtaagggtttgaactggggtggttctttgatcagaccagaagccactggttacggtttagtttactatactcaagctatgatcgactatgccacaaacggtaaggaatctttcgaaggtaagcgcgtcaccatctctggtagtggtaacgttgctcaatacgctgccttgaaggttattgagctaggtggtactgtcgtttccctatctgactccaagggttgtatcatctctgaaactggtatcacctccgaacaagtcgctgatatttccagtgctaaggtcaacttcaagtccttggaacaaatcgtcaacgaatactctactttctccgaaaacaaagtgcaatacattgctggtgctcgtccatggacccacgtccaaaaggtcgacattgctttgccatgtgccacccaaaatgaagtcagcggtgaagaagccaaggccttggttgctcaaggtgtcaagtttattgccgaaggttccaacatgggttccactccagaagctattgccgtctttgaaactgctcgttccaccgccactggaccaagcgaagctgtttggtacggtccaccaaaggctgctaacttgggtggtgttgctgtttctggtttagaaatggcacaaaactctcaaagaatcacatggactagcgaaagagttgaccaagagttgaagagaattatgatcaactgtttcaatgaatgtatcgactatgccaagaagtacactaaggacggtaaggtcttgccatctttggtcaaaggtgctaatatcgcaagtttcatcaaggtctctgatgctatgtttgaccaaggtgatgtattttaa

SEQ ID NO: 1512 - DNA, 1197 bp, Saccharomyces cerevisiae
atgtctcagaacgtttacattgtatcgactgccagaaccccaattggttcattccagggttctctatcctccaagacagcagtggaattgggtgctgttgctttaaaaggcgccttggctaaggttccagaattggatgcatccaaggattttgacgaaattatttttggtaacgttctttctgccaatttgggccaagctccggccagacaagttgctttggctgccggtttgagtaatcatatcgttgcaagcacagttaacaaggtctgtgcatccgctatgaaggcaatcattttgggtgctcaatccatcaaatgtggtaatgctgatgttgtcgtagctggtggttgtgaatctatgactaacgcaccatactacatgccagcagcccgtgcgggtgccaaatttggccaaactgttcttgttgatggtgtcgaaagagatgggttgaacgatgcgtacgatggtctagccatgggtgtacacgcagaaaagtgtgcccgtgattgggatattactagagaacaacaagacaattttgccatcgaatcctaccaaaaatctcaaaaatctcaaaaggaaggtaaattcgacaatgaaattgtacctgttaccattaagggatttagaggtaagcctgatactcaagtcacgaaggacgaggaacctgctagattacacgttgaaaaattgagatctgcaaggactgttttccaaaaagaaaacggtactgttactgccgctaacgcttctccaatcaacgatggtgctgcagccgtcatcttggtttccgaaaaagttttgaaggaaaagaatttgaagcctttggctattatcaaaggttggggtgaggccgctcatcaaccagctgattttacatgggctccatctcttgcagttccaaaggctttgaaacatgctggcatcgaagacatcaattctgttgattactttgaattcaatgaagccttttcggttgtcggtttggtgaacactaagattttgaagctagacccatctaaggttaatgtatatggtggtgctgttgctctaggtcacccattgggttgttctggtgctagagtggttgttacactgctatccatcttacagcaagaaggaggtaagatcggtgttgccgccatttgtaatggtggtggtggtgcttcctctattgtcattgaaaagatatga

SEQ ID NO: 1513 - DNA, 474 bp, Saccharomyces cerevisiae
atgccaattgaccaagaaaaattagctaagctacaaaagttgtctgctaacaacaaagttggtggtactagaagaaagcttaacaagaaggcaggctcttctgccggtgccaacaaggatgacaccaagttgcaaagtcaattagctaagttgcacgctgtcaccattgacaacgtcgccgaagccaactttttcaaggacgacggtaaggtcatgcacttcaacaaggtcggtgtccaagttgctgctcaacacaacacttctgtattctacggtctaccacaggaaaagaacttgcaagatttgttcccaggtattatctctcaattgggccctgaagccatccaagccttgtctcaattggctgcccaaatggaaaagcacgaagccaaggctccagctgatgctgaaaagaaggatgaagctattccagagttagttgaaggtcaaacttttgatgctgacgtcgaataa

SEQ ID NO: 1514 - DNA, 483 bp, Saccharomyces cerevisiae
atgggtaaatcacatggttacagatctcgtacacgttacatgttccaacgtgacttcagaaagcatggtgccgttcacatgtccacctacttgaagatctacaaggttggtgacattgtcgacatcaaagccaatggttctatccaaaagggtatgccacacaagttctaccaaggtaagaccggtgtcgtctacaacgttaccaagtcttctgttggtgttatcatcaacaagatggtcggtaacagatacttggaaaagagattgaacttgagagttgaacacatcaagcactctaaatgtagacaagaatttttggaaagagttaaggccaatgctgctaagcgtgctgaagccaaggcccaaggtgttgctgtccaattgaagagacaaccagctcaaccaagagaatcccgtattgtctctactgaaggtaacgttcctcaaactttagctccagttccatacgaaaccttcatttaa

SEQ ID NO: 1515 - DNA, 711 bp, Saccharomyces cerevisiae
atgaagttgaacatttcttacccagttaacgggtctcaaaagaccttcgaaattgatgatgaacaccgtattcgtgttttcttcgacaagagaatcggtcaagaagtcgatggtgaagccgttggtgacgaattcaagggttacgtcttcaagatctctggtggtaacgacaaacaaggtttcccaatgaagcaaggtgttttgttgccaactagaatcaagttgttgttgaccaagaacgtttcttgttacagaccaagacgtgatggtgaaagaaagagaaagtccgtcagaggtgccattgttggtccagatttggctgtcttggctttggtcattgtcaagaagggtgagcaagaattggaaggtctaactgacactactgttccaaagagattgggtccaaagagagctaacaacatcagaaagttcttcggtttgtccaaggaagatgacgttcgtgatttcgtcatcagaagagaagtcaccaagggtgaaaagacttacaccaaggctccaaagatccaaagattggttactcctcaaagattgcaaagaaagagacaccaaagagctttgaaggtcagaaacgctcaagctcaaagagaagctgctgccgaatacgctcaattgttggctaagagattgtctgaaagaaaggctgagaaggctgaaatcagaaagagaagagcttcttctttgaaggcttaa

SEQ ID NO: 1516 - DNA, 894 bp, Saccharomyces cerevisiae
atggctttccaaaaagacgctaagtcctctgcttactcctctcgtttccaaactcctttcagaagaagaagagaaggtaagactgattactaccaaagaaagagattggtcacccaacacaaggccaagtacaacactccaaagtacagattggttgttagattcactaacaaggatatcatctgtcaaatcatctcttctaccatcactggtgatgtcgtcttagctgctgcctactcccacgaattgccaagatacggtattacccacggtttgaccaactgggctgctgcttacgctactggtttgttgatcgccagaagaaccttgcaaaagttgggtttggacgaaacttacaagggtgttgaagaagttgaaggtgaatacgaattgaccgaagctgttgaagatggtccacgtccattcaaggtcttcttggatattggtttgcaaagaaccaccactggtgccagagttttcggtgctctaaagggtgcttctgacggtggtttgtacgttcctcactccgaaaacagattcccaggttgggacttcgaaaccgaagaaattgacccagaattattgagatcttacatctttggtggccacgtttcccaatacatggaagaattagctgacgatgatgaagaaagattctctgaattattcaagggttacctagctgacgacattgatgctgactctttggaagacatctacacttctgctcacgaagctatcagagctgacccagctttcaagccaactgaaaagaaattcaccaaggaacaatacgctgctgaatccaagaagtacagacaaaccaaattgtccaaggaagaaagagctgctcgtgttgctgccaagatcgctgctttggctggtcaacaataa

SEQ ID NO: 1517 - DNA, 324 bp, Saccharomyces cerevisiae
atggctgaatcccatagattgtacgtcaaaggtaagcacttatcctaccaaagatccaagagagtcaacaacccaaatgtctctttgatcaagatcgaaggtgtcgctactccacaagatgctcaattttacttgggtaagcgtattgcctacgtctacagagcctccaaggaagtcaggggttctaagattagagttatgtggggtaaggttaccagaactcacggtaactctggtgtcgttagagccaccttcagaaacaatttgccagccaagaccttcggtgcttctgttagaatcttcttgtacccatccaacatctaa

SEQ ID NO: 1518 - DNA, 1218 bp, Saccharomyces cerevisiae
atgttcagcttgaaagcattattgccattggccttgttgttggtcagcgccaaccaagttgctgcaaaagtccacaaggctaaaatttataaacacgagttgtccgatgagatgaaagaagtcactttcgagcaacatttagctcatttaggccaaaagtacttgactcaatttgagaaagctaaccccgaagttgttttttctagggagcatcctttcttcactgaaggtggtcacgatgttccattgacaaattacttgaacgcacaatattacactgacattactttgggtactccacctcaaaacttcaaggttattttggatactggttcttcaaacctttgggttccaagtaacgaatgtggttccttggcttgtttcctacattctaaatacgatcatgaagcttcatcaagctacaaagctaatggtactgaatttgccattcaatatggtactggttctttggaaggttacatttctcaagacactttgtccatcggggatttgaccattccaaaacaagacttcgctgaggctaccagcgagccgggcttaacatttgcatttggcaagttcgatggtattttgggtttgggttacgataccatttctgttgataaggtggtccctccattttacaacgccattcaacaagatttgttggacgaaaagagatttgccttttatttgggagacacttcaaaggatactgaaaatggcggtgaagccacctttggtggtattgacgagtctaagttcaagggcgatatcacttggttacctgttcgtcgtaaggcttactgggaagtcaagtttgaaggtatcggtttaggcgacgagtacgccgaattggagagccatggtgccgccatcgatactggtacttctttgattaccttgccatcaggattagctgaaatgattaatgctgaaattggggccaagaagggttggaccggtcaatatactctagactgtaacaccagagacaatctacctgatctaattttcaacttcaatggctacaacttcactattgggccatacgattacacgcttgaagtttcaggctcctgtatctctgcaattacaccaatggatttcccagaacctgttggcccactggccatcgttggtgatgccttcttgcgtaaatactattctatttacgatttgggcaacaatgcggttggtttggccaaagcaatttga

SEQ ID NO: 1519 - DNA, 654 bp, Saccharomyces cerevisiae
atgtccaagatcacttcttctcaagtcagagaacacgtcaaggaattgttgaagtattccaacgaaaccaagaagagaaacttcttggaaaccgtcgaactacaagtcggtttgaagaactatgaccctcaaagagacaagcgtttctctggttctttgaagttgccaaattgtccaagaccaaacatgtccatctgtatcttcggtgatgctttcgatgttgacagagctaagtcttgcggtgttgacgctatgtccgtcgatgacttgaagaagttgaacaagaacaagaagttaatcaagaagttgtctaagaagtacaacgctttcattgcttctgaagttttgatcaagcaagttccaagactattgggtcctcaattgtccaaggctggtaagttcccaaccccagtttctcacaacgatgacttgtacggtaaggtcactgatgtcagatctaccatcaagttccaattgaagaaggtcttgtgtttggctgttgccgttggtaacgttgaaatggaagaagacgttttggttaaccaaatcttgatgtctgttaacttctttgtttctttgttgaagaagaactggcaaaatgttggttccttggttgttaagtcctccatgggtccagctttcagattgtactaa

SEQ ID NO: 1520 - DNA, 1113 bp, Saccharomyces cerevisiae
atggctgaagcaagcatcgaaaagactcaaattttacaaaaatatctagaactggaccaaagaggtagaataattgccgaatacgtttggatcgatggtactggtaacttacgttccaaaggtagaactttgaagaagagaatcacatccattgaccaattgccagaatggaacttcgacggttcttctaccaaccaagcgccaggccacgactctgacatctatttgaaacccgttgcttactacccagatcccttcaggagaggtgacaacattgttgtcttggccgcatgttacaacaatgacggtactccaaacaagttcaaccacagacacgaagctgccaagctatttgctgctcataaggatgaagaaatctggtttggtctagaacaagaatacactctatttgacatgtatgacgatgtttacggatggccaaagggtgggtacccagctccacaaggtccttactactgtggtgttggtgccggtaaggtttatgccagagacatgatcgaagctcactacagagcttgtttgtatgccggattagaaatttctggtattaacgctgaagtcatgccatctcaatgggaattccaagtcggtccatgtaccggtattgacatgggtgaccaattatggatggccagatactttttgcacagagtggcagaagagtttggtatcaagatctcattccatccaaagccattgaagggtgactggaacggtgccggttgtcacactaacgtttccaccaaggaaatgagacaaccaggtggtatgaaatacatcgaacaagccatcgagaagttatccaagagacacgctgaacacattaagttgtacggtagcgataacgacatgagattaactggtagacatgaaaccgcttccatgactgccttttcttctggtgtcgccaacagaggtagctcaattagaatcccaagatccgtcgccaaggaaggttacggttactttgaagaccgtagaccagcttccaacatcgacccatacttggttacaggtatcatgtgtgaaactgtttgcggtgctattgacaatgctgacatgacgaaggaatttgaaagagaatcttcataa

SEQ ID NO: 1521 - DNA, 279 bp, Saccharomyces cerevisiae
atggctaaaagaactaagaaggttggtatcactggtaagtacggtgtccgttatggttcctctttgagaagacaagtcaagaagttggaaatccaacaacacgctagatacgattgttctttctgtggtaagaagaccgtcaagagaggtgctgctggtatttggacttgttcctgttgtaagaagaccgtcgctggtggtgcttacactgtctccactgctgctgccgccaccgttagatctaccatcagaagattgagagaaatggttgaagcttga

SEQ ID NO: 1522 - DNA, 1377 bp, Saccharomyces cerevisiae
atgggtaaagagaagtctcacattaacgttgtcgttatcggtcatgtcgattctggtaagtctaccactaccggtcatttgatttacaagtgtggtggtattgacaagagaaccatcgaaaagttcgaaaaggaagccgctgaattaggtaagggttctttcaagtacgcttgggttttggacaagttaaaggctgaaagagaaagaggtatcactatcgatattgctttgtggaagttcgaaactccaaagtaccaagttaccgttattgatgctccaggtcacagagatttcatcaagaacatgattactggtacttctcaagctgactgtgctatcttgattattgctggtggtgtcggtgaattcgaagccggtatctctaaggatggtcaaaccagagaacacgctttgttggctttcaccttgggtgttagacaattgattgttgctgtcaacaagatggactccgtcaaatgggacgaatccagattccaagaaattgtcaaggaaacctccaactttatcaagaaggttggttacaacccaaagactgttccattcgtcccaatctctggttggaacggtgacaacatgattgaagctaccaccaacgctccatggtacaagggttgggaaaaggaaaccaaggccggtgtcgtcaagggtaagactttgttggaagccattgacgccattgaacaaccatctagaccaactgacaagccattgagattgccattgcaagatgtttacaagattggtggtattggtactgtgccagtcggtagagttgaaaccggtgtcatcaagccaggtatggttgttacttttgccccagctggtgttaccactgaagtcaagtccgttgaaatgcatcacgaacaattggaacaaggtgttccaggtgacaacgttggtttcaacgtcaagaacgtttccgttaaggaaatcagaagaggtaacgtctgtggtgacgctaagaacgatccaccaaagggttgcgcttctttcaacgctaccgtcattgttttgaaccatccaggtcaaatctctgctggttactctccagttttggattgtcacactgctcacattgcttgtagattcgacgaattgttggaaaagaacgacagaagatctggtaagaagttggaagaccatccaaagttcttgaagtccggtgacgctgctttggtcaagttcgttccatctaagccaatgtgtgttgaagctttcagtgaatacccaccattaggtagattcgctgtcagagacatgagacaaactgtcgctgtcggtgttatcaagtctgttgacaagactgaaaaggccgctaaggttaccaaggctgctcaaaaggctgctaagaaataa

SEQ ID NO: 1523 - DNA, 525 bp, Saccharomyces cerevisiae
atgtctgccaaagctcaaaaccctatgcgtgatttgaagatcgaaaagttggtcttaaacatttctgttggtgaatctggtgacagattgaccagagcctccaaggttttagagcaattatctggtcaaactccagttcaatccaaggccagatacactgtcagaactttcggtatcagaagaaacgaaaaaattgctgttcacgttaccgtcagaggtccaaaggctgaagaaattttggaaagaggtttgaaggtcaaggaataccaattgagagacagaaacttctctgctaccggtaacttcggtttcggtattgacgaacacattgacttgggtatcaagtatgacccatccatcggtattttcggtatggatttctatgtcgtcatgaacagaccaggtgctagagtcactagaagaaagagatgtaagggtaccgttggtaactcccacaagacaactaaggaagacaccgtctcttggttcaagcaaaagtacgatgctgatgttttggacaaataa

SEQ ID NO: 1524 - DNA, 864 bp, Saccharomyces cerevisiae
atgcaagctattgccgatagtttcagtgtaccaaacagattggttaaggaacttcaatatgacaacgaacaaaacttagagagcgatttcgtaacgggcgcctcccagtttcaacgtttggcaccatcgcttacggttccaccaattgcgtctccacagcagtttttaagagcacacacagatgattcacgaaacccagactgtaaaatcaagatcgcacatggtactacaaccttagcatttagatttcaaggcggtattattgtggcagtagattctcgtgccactgccggcaattgggttgcttctcaaactgtgaagaaagttattgagatcaacccatttttattgggtacaatggctggtggtgcggcagattgtcaattttgggaaacttggctaggttctcagtgtaggctgcacgagctgagggaaaaggaacgtatatctgtcgcagccgcatccaagattttaagcaatttagtataccaatataaaggggccggtttatcaatgggtactatgatctgtggttacactaggaaggagggcccaaccatttattacgtcgactcagacggtacaagattaaaaggtgacatattctgcgttggttcaggtcaaacatttgcatatggtgttctagactctaactataaatgggatttatccgttgaagatgctttatatctaggtaagagatctattttagctgctgcccatagagatgcttactctggtggttctgtaaatttatatcatgttaccgaggatggttggatatatcacggtaatcatgacgtaggtgaactattttggaaggtcaaggaagaggaaggatctttcaacaacgttattggctaa

SEQ ID NO: 1525 - DNA, 438 bp, Saccharomyces cerevisiae
atgggtaaaggtaagccaagaggtttgaactccgctagaaagttgcgtgtccacagaagaaacaaccgttgggccgaaaacaactataagaagagattattgggtactgccttcaagtcttctccattcggtggttcttctcacgccaagggtattgtcttggaaaagttgggtatcgaatccaagcaacctaactctgctatcagaaagtgtgttagagttcaattaatcaagaacggtaagaaggttactgctttcgttccaaacgatggttgtttgaactttgtcgatgaaaatgacgaagtcttgctagccggtttcggtagaaagggtaaggctaagggtgatattccaggtgttagattcaaggtcgttaaggtctctggtgtctccttgttggctttgtggaaggaaaagaaggaaaagccaagatcttaa

SEQ ID NO: 1526 - DNA, 522 bp, Saccharomyces cerevisiae
atgctagccctagctgataacattctacgtataataaatttcctatttttggttatttccatcggtttaatcagttcgttgttaaacacccaacataggcacagctccagagtaaactactgtatgtttgcttgtgcatatggtatattcaccgattcattgtacggtgtctttgccaacttcattgaaccattggcatggccactagttttgttcacactggactttttgaactttgtgttcactttcactgccggtacagtgttggccgttggtatcagagctcactcatgtaacaacagctcatacgttgacagtaacaagattactcaaggttccggtaccagatgtagacaagctcaagccgctgttgcattcctctacttctcttgtgccatctttttggctaagaccctgatgtctgttttcaacatgatctccaatggtgcctttggttctggttctttctccaagagaagaagaactggccaagtcggtgttccaaccatttcccaagtctaa

SEQ ID NO: 1527 - DNA, 630 bp, Saccharomyces cerevisiae
atgtcacaacaagttggtaacagtatcagaagaaagctggtaatcgttggtgatggtgcctgtggtaagacatgtttattaatcgtcttttccaagggccaatttccagaagtctacgtaccaactgtctttgaaaactatgtagcagatgttgaagttgatgggcgtcgtgtagagctagcgctatgggataccgctggtcaagaagattatgatagactaagaccattgtcatacccagactccaatgtcgtattaatttgtttctctatcgatcttccagattctttagagaatgtacaagaaaaatggattgccgaagtattacatttctgtcaaggtgtgccaattattcttgttggttgtaaagtggatttgagaaacgacccacaaaccattgaacaattaagacaagaaggtcaacaacccgttacatcacaggagggacaatctgtagcagaccagattggcgcaaccggatactacgaatgttcggccaagactggttatggtgtcagagaagtgtttgaggccgccactagagcttcattgatgggtaaatctaaaacgaatggtaaagctaagaagaacactactgaaaagaagaagaagaagtgtgtcttgttatag

SEQ ID NO: 1528 - DNA, 3099 bp, Saccharomyces cerevisiae
atggcagacacaccctctgtggcagtacaggccccaccgggctatggtaagacggagttatttcatctccccttgatagcactggcgtctaagggcgacgtgaaatatgtgtcgtttctgtttgtaccgtacacagtgttgcttgctaattgcatgatcaggttgggccgatgcggttgcttgaatgtggcccctgtaagaaactttattgaagaaggttgcgatggcgttactgatttatacgtggggatctacgatgatcttgctagcactaatttcacagacaggatagctgcgtgggagaatattgttgagtgcacctttaggaccaacaacgtaaaattgggttacctcattgtagatgagtttcacaactttgaaacggaggtctaccggcagtcgcaatttgggggcataactaaccttgattttgacgcttttgagaaagcaatctttttgagcggcacagcacctgaggctgtagctgatgctgcgttgcagcgtattgggcttacgggactggccaagaagtcgatggacatcaacgagctcaaacggtcggaagatctcagcagaggtctatccagctatccaacacggatgtttaatctaatcaaggagaaatccgaggtgcctttagggcatgttcataaaatttggaagaaagtggaatcacagcccgaagaagcactgaagcttcttttagccctctttgaaattgaaccagagtcgaaggccattgtagttgcaagcacaaccaacgaagtggaagaattggcctgctcttggagaaagtattttagggtggtatggatacacgggaagctgggtgctgcagaaaaggtgtctcgcacaaaggagtttgtcactgacggtagcatgcgagttctcatcggaacgaaattagtgactgaaggaattgacattaagcaattgatgatggtgatcatgcttgataatagacttaatattattgagctcattcaaggcgtagggagactaagagatgggggcctctgttatctattatctagaaaaaacagttgggcggcaaggaatcgtaagggtgaattaccaccgattaaggaaggctgtataaccgaacaggtacgcgagttctatggacttgaatcaaagaaaggaaaaaagggccagcatgttggatgctgtggctccaggacagacctgtctgctgacacagtggaactgatagaaagaatggacagattggctgaaaaacaggcgacagcttccatgtcgatcgttgcgttaccgtctagcttccaggagagcaatagcagtgacaggtgcagaaagtattgcagcagtgatgaggacagcaacacgtgcattcatggtagtgctaatgccagtaccaatgcgactaccaactccagcactaatgctactaccactgccagcaccaacgtcaggactagtgctactaccactgccagcatcaacgtcaggactagtgcgactaccactgaaagtaccaactccagcactaatgctactaccactgccagcaccaacgtcaggactagtgctactaccactgccagcatcaacgtcaggactagtgcgactaccactgaaagtaccaactccaacactagtgctactaccaccgaaagtaccgactccaacactagtgctactaccactgaaagtaccaactccagcactaatgctactaccactgccagcatcaacgtcaggactagtgcgactaccactgaaagtaccaactccaacactaatgctactaccactgaaagtaccaactccagcactaatgctactaccactgaaggtaccaactccaacactagtgctactaccactgctagcaccaactccagcactaatgctactaccactgaaagtaccaacgctagtgccaaggaggacgccaataaagatggcaatgctgaggataatagattccatccagtcaccgacattaacaaagagtcgtataagcggaaagggagtcaaatggttttgctagagagaaagaaactgaaagcacaatttcccaatacttccgagaatatgaatgtcttacagtttcttggatttcggtctgacgaaattaaacatcttttcctctatggtattgacgtatacttctgcccagagggagtattcacacaatacggattatgcaagggctgtcaaaagatgttcgagctctgtgtctgttgggctggccagaaagtatcgtatcggaggatggcttgggaagcactagctgtggagagaatgctgcgaaatgacgaggaatacaaagaatacttggaagacatcgagccatatcatggggaccctgtaggatatttgaaatattttagcgtaaaaaggggagagatctactctcagatacagagaaattatgcttggtacctggccattactagaagaagagaaacaattagtgtattggattcgacaagaggcaagcaagggagccaagttttccgcatgtctggaaggcagatcaaagagttgtattataaagtatggagcaacttgcgtgaatcgaagacagaggtgctgcagtactttttgaactgggacgaaaaaaagtgccgggaagaatgggaggcaaaagacgatacggtctttgtggaagcgctcgagaaagttggagtttttcagcgtttgcgttccatgacgagcgctggactgcagggtccgcagtacgtcaagctgcagtttagcaggcatcatcgacagttgaggagcagatatgaattaagtctaggaatgcacttgcgagatcagcttgcgctgggagttaccccatctaaagtgccgcattggacggcattcctgtcgatgctgatagggctgttctgcaataaaacatttcggcagaaactggaatatcttttggagcagatttcggaggtgtggttgttaccacattggcttgatttggcaaacgttgaagttctcgctgcagataacacgagggtaccgctgtacatgctgatggtagcggttcacaaagagctggatagcgatgatgttccagacggtagatttgatatattattatgtagagattcgagcagagaagttggagagtga

SEQ ID NO: 1529 - DNA, 93 bp, Saccharomyces cerevisiae
atgtcaatctcgtttccaaaaatgcaacacctcatcgttatgacgacaattggagacaaaaaggttaacaataacataatactctttttatag

SEQ ID NO: 1530 - DNA, 1869 bp, Saccharomyces cerevisiae
atggtacgtcgatggattcctagtggcaggcatcttcgcaataatgacaacactggtgatgatgacgacagcgagttcacaaactcgatggattctgggatgtccataccatcactcagggactccatgaccacgaggtcatctcataacgatcccatcaagcctgctctgatgaacgattccaacaaagtcaaaaatttggagaaggagttgactaatgccaaaatcaagattcaagtactctatgaatacattcgcagaatccctaataaagacggcaatgcaccatcgctgggcaatgacactgattttagaaattcgattatcgagggtctaaatcttgaaataaacaaattgaaacaggatttaaaggcgaaggaagtcgagtaccaagatacgctacaattcgttcaagagaatttagaaaattcggaaagtatcgtgaatacgatcaatcacctattgtcctttatattgacgcattttaatgagcaagatgaaaatgcccatcttcttgataaagaagagagggagaccctggaggaaactttagagctgagctcggattatgttcttgaaaaaatggatactttgtccaagttcatcatccaattcttgcaggactttttgcattccaaaagtcgagcggaatcaaagcaggataaggaagaatttctttcactggcccagtcctcaccagcaggatcacagttagaaagtagggactcaccatcaagtaaagaggagaatactgatggtggataccagaatgacgaaattcatgacagtaacaaccacattgatacagaaaatgtaatggcaaacagtacttccttaccaatttcagccgtcgagtctcgttttgagaaaaccttagacactcaattagagattgtcatagaaaatttgcacaaagaatatgatcaatttataaattccattagattgaaattcgagaaatcgcaaaaattagaaaaaataatagcgtccaaactaaatgagcagtctcatctactagattccttagaattggaagaaaattctagttccgttatagaaaaacaagatcatttgatttcccaactgaaggaaaagatcgaatcgcaatctgtcttgataaacaatttggaaaaattgaaggaagacatcattaaaatgaaacaaaatgaaaaagttttaaccaaagaactggaaactcagaccaaaatcaataaactaaaggaaaataattgggacagctacatcaatgacttggaaaaacaaatcaatgaccttcaaatcgataaatcagaggaattccacgtaatacaaaatcagttagacaaattagacttggagaattaccaattaaaaaatcagttaaatactttggacaaccaaaagttaatactatcccaatatgaaagcaattttatcaaatttaatcagaaccttttactacaccttgacagtattttcaatattctgcagaaaatcttacaagaaagttctattgcccaatttgacaggaaaatgaaatccataaaatctgtaccaaatgcgttgaaaaacttgaatttgattcagcccaaactagaatcgctctacacttttatagagactgcattagagtccataataaactcatatatctcttcactgatttccatggaaaccccagagcagccacatcaacagggcaatgaattaacggcaactccaaataaagaactgaccttacgaatagaggagttacaaagaagatggatatccgaaagagaaagacggaagctcgatgctaacgcttcagaagctcgaatcaaggctttagaacaggaaaatgagtcattgagatcgaaacttttcaacctatcaatcaacaatccctaa

SEQ ID NO: 1531 - DNA, 1989 bp, Saccharomyces cerevisiae
atgactaaagaaacgattcgggtagttatttgcggtgatgaaggggttggtaaatccagtctgattgtatcattaacaaaagctgaattcataccgaccatacaggacgtgctgccacccatcagtatcccaagagatttctcatcatcacctacatattctcctaagaatacagtacttatagacacttcagattcggacctcatagctttagaccatgagttgaagtccgccgacgtaatttggcttgtgtattgcgatcacgaatcgtatgaccatgtttctctcttttggttgcctcatttcagatccctggggttgaatattcctgtcattctctgcaaaaataaatgtgattccatatcgaatgttaatgccaatgcaatggtcgtgtcagagaacagtgatgatgatatcgataccaaagtggaggatgaagaatttatcccaatattaatggagtttaaagaaatcgacacttgcattaagacaagtgccaagacacagtttgatcttaaccaagcgttttatctttgccaaagggctataacacacccaatatcacctttatttgatgccatggtaggtgaactaaagccattggctgtcatggctttaaaaagaatttttcttttaagcgatttaaaccaggactcatatttagatgacaacgaaatcttgggcttacaaaaaaagtgcttcaataagagtatcgatgtaaacgaactgaattttattaaagatttgcttttggatatttccaagcacgatcaagagtacattaaccgcaagctatacgtaccgggaaaaggcatcaccaaagatggtttccttgtactgaacaaaatatacgctgaaagggggagacacgaaactacatgggctatcctaagaactttccattacacagattccttgtgtattaatgacaaaattctccatccgaggttggttgtccctgacacttccagtgtggaattgagccccaagggctacagatttcttgtagatatttttttgaagtttgatatcgacaatgatggtggtttgaataatcaagaattacatcgtctatttaagtgcacaccagggctgcctaaactatggacctcaacgaatttccccttctccactgtcgtaaacaacaagggttgcatcaccttacaaggctggctagcacaatggagtatgacgactttcttgaactatagcacaactaccgcttacttggtgtattttggctttcaggaagatgcaagactagccctacaagtaaccaagccaaggaaaatgagacgccgttccgggaaactttacagatccaatatcaatgacagaaaagtgttcaattgctttgtcattggaaagccatgttgcggcaaaagctctttgctagaggccttcttgggcagatctttctcggaggagtattctccgacaatcaaaccaagaattgcagtcaatagtttagaactcaaaggtgggaaacagtactatttgattttgcaagaacttggagaacaggaatacgccatactagagaataaggataagttaaaagaatgtgacgtaatctgtctaacatacgattccagcgacccagaatcattctcctacttagtttcgcttctagacaaattcacacatttacaagatctaccgttggtatttgtagcttctaaggcagatttggataagcagcaacaaaggtgtcaaatccaaccagatgaactggcagacgagctatttgtgaaccacccactgcacatatcatccagatggctaagttcccttaatgaattgtttattaaaatcacagaagctgctcttgatcctggcaaaaacactccgggattgccagaagaaacagcagcaaaagatgtcgactacagacaaacggctctcatttttgggtccactgttggattcgtagcactatgttcctttacgttaatgaaattattcaaatcatcaaaattctcaaaataa

SEQ ID NO: 1532 - DNA, 381 bp, Saccharomyces cerevisiae
atgacaggttactttttaccaccacaaacaagttcttacacgttcaggtttgctaaggtcgatgactctgcaattctatcagtcggtggcgacgttgcattcggatgctgtgcacaagagcaacctccaattacatccacaaactttacgattaatggtatcaagccatggcaaggaagattgcccgataacattgcagggactgtgtatatgtatgctggattctactgtccaatgaagattgtctactcaaacgctgtttcttggcatacactgccagttagcgtggaattgcctgatgttactactgttagcgatgattttgcagggcacgtttactcttttgacgatgacctaacagcccaattgtactatccctga

SEQ ID NO: 1533 - DNA, 285 bp, Saccharomyces cerevisiae
atgaatccttttgcatcgctagaaggacaagataatatttcttctgttttttttttacatatgcaacaatttgaaagtcaggtcaaagacagattccggttccccatattcagattggagagaaaaacttttggcaactcatgttaccaagtcgagacgcttaaagttaagtgtcggccaagacacgcaaaatcttgtaatcttttaacgctgctcttcaaatcacggacgcaatcagtacttgtacctaattttggttttctaatattgaatagcgaaccatag

SEQ ID NO: 1534 - DNA, 387 bp, Saccharomyces cerevisiae
atgaacagtgctaccagtgagacaacaaccaatactggagctgctgagacaactaccagtactggagctgctgagacgaaaacagtagtcacctcttcaatttcaagattcaatcatgctgaaacacagacggcttccgcgaccgatgtgattggtcacagcagtagtgttgtttctgtatccgaaactggcaacaccaagagtctaataacttccgggttaagtactatgtcgcaacagcctcgtagcacaccagcaagtagcataataggatctagtactgcctctttagaaatctcaacctacgttggtattgccaatggtctgttgaccaataatggcataagtgtttttatttccaccgtattgctggcaatcgtatggtaa

SEQ ID NO: 1535 - DNA, 1782 bp, Saccharomyces cerevisiae
atgtattcaattgttaaagagattattgtagatccttacaaaagactaaaatggggttttattccagtaaagcggcaggtggaagacctgccagatgacttaaattcaacagaaattgtcactatctccaacagtatccagagtcatgaaacagctgaaaatttcatcacgactacaagtgaaaaagatcaactacattttgagactagtagctatagtgaacataaagacaatgtgaacgttactagaagttatgaatatagagatgaagccgataggccatggtggagatttttcgatgaacaagagtatcggatcaatgaaaaggaaagatctcacaataaatggtatagttggttcaaacagggtacctctttcaaagaaaaaaaattattaattaaattggatgtccttttagccttttattcttgtattgcttattgggtgaaatatctggatacggttaatataaacaacgcttacgtttcgggaatgaaggaagatttaggctttcaaggtaatgatttggtgcatactcaagtaatgtacacagttggtaatattatatttcaattgccatttttgatttacctgaacaagctcccattaaactatgttttaccaagcctcgacttatgttggtcgcttttaaccgttggtgctgcatatgtcaattctgtaccacacttgaaagcaattaggtttttcattggggcttttgaagcgccaagttatttggcataccaatatttgtttggttccttttacaaacatgatgaaatggtgcgtcgttctgctttttactatttgggccagtatatcggtattctatccgctggtgggatccagtcagccgtatattcatcgttaaatggtgtaaatggtttagagggatggagatggaactttattattgacgctattgtgtctgtcgtagtgggccttattggattttactccctgccaggtgacccatacaactgttattctattttcttaactgatgatgaaattaggttggcgaggaaaagattaaaagaaaaccaaacaggtaaaagtgattttgaaacaaaagtattcgatattaaactgtggaaaacaattttcagtgattggaaaatatacattttaactttatggaatattttctgttggaatgacagtaatgtttcatctggggcatacctactatggttgaaatctttgaaaagatactctattcctaagctcaatcagttatccatgattactccgggtttaggtatggtttatttgatgcttactggtattattgcagataaattacactctcgttggtttgcgattatttttactcaggttttcaatatcattggtaactccatattagccgcttgggacgtcgcagaaggagccaaatggtttgcatttatgctgcaatgttttggttgggctatggctcctgttttatactcttggcaaaacgatatttgtcgccgagatgctcaaactagagctattactttagttacaatgaatattatggctcaatcatctaccgcatggataagtgttttggtttggaaaacagaagaagctcccaggtatttaaaggggtttactttcactgcatgttctgctttttgtctctccatttggacttttgttgtactctacttctataaacgtgatgaaaggaacaatgccaagaagaacggtattgtgctttataactctaaacatggtgtggaaaagccaacgtcaaaagacgttgaaaccttatcagtatctgatgaaaaataa

SEQ ID NO: 1536 - DNA, 897 bp, Saccharomyces cerevisiae
atgtcgcctcaataccatttttattttgtatcattccggaacttagtattgaatgaaaaatgcctccgaagtaaaaagcaggtgatgaaaagtttcaattggtataagacagatcgctattttgatccgcataacatccttcaacaccatagcagagctatagagaagacaagatataaactgggcatgcaaacatcttcagaaagtaccgacgccaagtcggattttctcgacgaacccagtgcatatttaattgagaaaaatgtggctcttcccaaggacatattcggttcgtacttaagttattggatatatgaagttactcgtcataaagcggcagtaattttgctcgtacttattgtgacttcaattttattattagtgtttttttataatacggaattttgcgttgcctttgagatactattgttttccttttgctttccaggaacatgcatggttgtaattgcatttagtgaaccgatcggtgatcgggaatttaaagttaagcttctgatggaaattatcacacgtaaaccggcggtaaaggggaaagaatggaggacaattacatacaagatgaaccagtatttatttgatcatgggctatgggatactccctactacttttaccgtgatgaagattgccaccgttattttctaagtcttattaagggaagaactttcaagaagcaaaaggaatcgtcagccagcaatgttaaagacgcacaatcaaatgacgaaaccgctggcacaccaaacgaagccgctgagtcttctagttttagtgccggaccgaactttataaagctcctcaccaaggcagccgaaatcgaacaacaatttcaaaaggaatattggcgacaagagtatcctggtgtcgatgagtttttttag

SEQ ID NO: 1537 - DNA, 1206 bp, Saccharomyces cerevisiae
atggttaaaatgagaagaataacacctacacgcctcctattcacatgcagatatatttcaaacaatgcttctccaccagtgcagcccttgaatgtgcttttctttggtagcgacactttcagtaatttctcattgcaagcactcaatgagttgcgtcaaaataatggaagctgtggtatagtggacaatattcaagtagtaactaggtcgccgaagtggtgcggtagacagaagtctattttgaaatacccgccgatcttcgatatggcagagaagcttcaattgccacgcccaattacatgcgacaccaagcaggaaatgttggcgctaagcaaactgacacccagtcgccaaggaaatccggagaacgacggctccggtgctccgttcaacgcgatcattgcggtttcttttgggaagctcattccgggtgacttgatccgcgcggtgccattggcgctaaacgtccatccttcgctacttcccagacataaaggcagtgcacctatccagcgagctctgctcgagggtgacacttacaccggtgtaactatacagacactgcatccggatcggtttgaccatggtgcaattgtagcgcagacggagccactggcgatcgcaacaatgctgtcaaaagggagagtcaatgattcgacggcagattttaattctgagggcctgcctcggaggactgccatactgatggaccagttgggcgcccttggcgcccaacttttgggccaaacgcttcgtgagaggttatatctaccacagaaccgtgtgcaagcgccaacagcttacaaacccagttacgcccaccgtataacaacagaagataaacgcattcattgggcgcgcgattctgccgccgaactacttaacaaactcgaaacgctcggtcctctgcacgcgttcaaagaagcgacagcggcaagaaaggacgctcaaaattcagtattaaaacgaatattgtttcatgagtgtaaagtgatgagagacgcacgtctagataatggcagtaaaccgggcatgttcaaatatgatgatattaaagactgtattttggtcacctgtcgcggcaacttactactatgtgtgagccgcctccagttcgaaggtttcgccgtagaacgtgctggccagttcatggcgcgcctgcggaaaagatgcggcgccctgagtgaaaagttagttttcctgtaa

SEQ ID NO: 1538 - DNA, 288 bp, Saccharomyces cerevisiae
atgcttttcttctcctttttcaagactttagttgaccaagaagtggtcgtagagttaaaaaacgacattgaaataaaaggtacactacaatcagttgaccaatttttgaatctgaaactagacaacatatcatgcacagatgaaaaaaaatatccacacttgggttccgtaaggaatatttttataagaggttcaacagtcaggtacgtttacttgaataagaacatggtagatacgaatttgctacaagacgctaccagaagggaggtaatgactgaaagaaaataa

SEQ ID NO: 1539 - DNA, 369 bp, Saccharomyces cerevisiae
atgggtgaaatgctagagaggcaaaaaaaaaggttgccaagtaaagcgaagtatttgaagtatactgcaagcatcaccgaaacaggaaatcacgaagctgactcatctgtgattttccgtccccaccatagtgatgtaacatgcagtaacgcacggcgggccgaaagtcggactttaccccagatttgtagttgtatcctattggatcacgggcgacggacaagacccgaagtgcggaccggcatggtcagcttgcacggaagctttaagggtttcccttgtttcggcattagaagaggcatttcgcacgttttaccgggtcagaaacttcgaggaagctgtgacaattggaaaaaaaggcaaaactaa

SEQ ID NO: 1540 - DNA, 582 bp, Saccharomyces cerevisiae
atgttattggacgcgcagcgattttttaataggtctttctctattaatgtaatatgcgaattgaaacataatgtaaacacaagaagaaaattcgaaataaaggactggccaacaataatgttagtgagcagaaacgacaagcccaaaatcagtagtgaggaagtcacacattttatagacgactataaaaagaggaggaaaactcagatgacacgattcttcggaatcactatttttacacttataacatgtagaattgccatgaagaaaatgataactgcaaaagtgccattgaacacttttcaagcaaactacgccagccggacgcagacaataacacacacacaaaagagtcttgcaggttctcttttagcggcaacgggcatgacactaggtatatttggtatgggcatcacagggacatgttggagctgggatgtttcatcatttcaggaactaaagcaacgtctggaaaggcgtgccaacaacgaatttgtagtgacaaacatgcctctggataaaagaagccagcaagtagtggacagcttagttaagacacacaattcatctctttgtaaatag

SEQ ID NO: 1541 - DNA, 3336 bp, Saccharomyces cerevisiae
atggctcgttcttccttgcccaaccgccgcaccgcccagttcgaagcgaacaagaggaggaccattgcacatgctccatctccaagtctttcaaatgggatgcacactctaacgccgcccacctgtaacaatggtgctgccacttcagactccaatatacatgtatatgtaaggtgcagatcgcgtaataagcgagaaatagaggaaaaaagtagtgtagttatatctacactaggcccacaagggaaagaaatcattctgtccaacggttctcaccaatcgtattcgtcctcgaagaaaacttaccaatttgatcaggtgttcggcgcagaatctgaccaggaaacagtgtttaatgccactgcaaaaaactacattaaggaaatgttgcacgggtacaattgtacaatatttgcatacggtcaaacgggaacaggtaaaacctacactatgtctggcgatataaatattctcggtgatgtgcaatctaccgataatctattattaggagagcatgcaggtatcataccacgggttctggtcgatttgtttaaagaattgagctccttaaataaagagtactccgtaaaaatatcctttttagagttgtacaatgaaaatttgaaagatctgctctctgatagtgaggacgatgatcctgcagtcaacgatcccaagaggcagattcgtatttttgacaataacaacaataattcatccatcatggtcaaggggatgcaggaaatctttattaactctgcacacgaaggcttgaatttgctaatgcagggttcgttaaaaaggaaagtggccgctactaaatgcaacgatctttcatcaaggtctcacaccgtctttacaatcacaacaaacatagttgagcaagatagcaaagaccatggacaaaacaaaaattttgttaaaattggcaaattgaatttggtggatttggcaggcagtgaaaacatcaacagatcgggtgcggagaataaaagggctcaagaagctggcctaataaacaaatcgctgctaacactaggccgtgttatcaacgcactcgttgatcattctaaccatataccttacagagaatctaagctaacaagattgctacaagactctttaggtggtatgacgaaaacatgcattatcgcaactatatcacctgcgaaaatatccatggaagagactgcaagtacgctagaatatgcaacgagagccaaatcaattaagaatactccacaagtaaatcagtctttatcgaaggatacatgtctcaaagactacattcaagagattgaaaaattaagaaatgatttgaaaaattcaagaaacaaacaaggtatatttataactcaagatcagttggacctttacgagagcaattctatcttgattgatgagcaaaatctaaaaatacataacctgcgagaacaaattaaaaaattcaaagaaaactacctgaaccaattagatatcaataatcttttacagtctgaaaaggaaaaactaattgccataatacagaattttaatgtcgatttttctaacttttactcggaaatccaaaaaattcaccatactaatctcgaactaatgaatgaagtcatacaacagagagatttttcactagaaaattctcaaaaacagtataatacgaaccagaacatgcaattaaaaatctctcaacaagttttacagactttgaacactttacagggctctttaaataattataactctaaatgttccgaagttatcaaaggcgtcaccgaagaactaaccaggaacgtaaatacccataaggcgaaacacgattctactctcaaatcgttattaaacattactactaacttattgatgaatcagatgaacgaactggtgcgtagtatttcgacttcattggaaatatttcagagtgattctacttctcactatcgtaaagatttgaatgaaatctaccaatcacatcaacaatttctaaaaaatttacaaaacgatattaaaagctgtcttgattcgataggcagttcaattctaacttccataaacgaaatatcgcaaaattgcaccactaacttgaatagtatgaatgttttaatagaaaaccagcagtcaggatcatcgaaattaattaaagagcaagatttagaaataaaaaaactgaaaaacgatctgatcaatgagcgcaggatttctaaccaattcaaccaacagttggctgaaatgaagcgatattttcaggatcacgtttccaggacgcgtagtgaattccacgacgaacttaacaaatgtatcgataacctaaaagataaacaatctaagttggatcaagatatctggcagaagacggcctctattttcaacgaaacagatatcgtagttaataaaattcattccgactcaatagcatccctcgctcataatgctgaaaacactttgaaaacggtttctcagaacaatgaaagctttactaacgatttaatcagtctatcacgcggaatgaacatggacatatcctccaaactgagaagtttgcccatcaatgaatttttaaacaagatatcacaaaccatttgtgaaacctgtggcgatgataacacaatcgcatcaaatccagtattgacctctattaaaaaatttcaaaatataatttgttcagacattgccctaacaaatgagaagatcatgtcattaatagatgaaatacaatcacaaattgaaaccatatctaatgaaaacaatatcaatttgattgcaataaatgaaaattttaattctttgtgcaattttatattaactgattacgatgagaatattatgcaaatctcaaaaacacaagatgaggtgctttctgaacattgcgagaagctacaatcactgaaaatactgggtatggacattttcactgctcacagcatagaaaaaccccttcatgagcatacaagacctgaagcgtcagtaatcaaggctttacccttattggattatccaaaacaatttcagatttatagggatgctgaaaataagagcaaagacgacacatctaattctcgtacttgtataccaaacttgtcaactaatgaaaattttcctctttcacaattcagtccaaaaaccccagtgccagtgcctgatcaacctctaccaaaagttcttataccgaaaagcataaactcggccaagtccaatagatcaaagaccttaccaaatacagagggtactggacgagaatcgcagaacaatttgaagagaagatttaccaccgagccaatattgaagggagaagaaactgaaaataatgacatactgcaaaataaaaaacttcatcaataa

SEQ ID NO: 1542 - DNA, 2265 bp, Saccharomyces cerevisiae
atgactacacaactaaggtatgaaaataacgatgacgatgaaagagtagaatataatctctttaccaatagatccaccatgatggcaaattttgaagaatggatcaaaatggctacagataataaaatcaattcccgaaatagttggaatttcgcattgatcgactatttttatgacttggacgttttgaaagatggcgagaataacatcaattttcagaaagcatctgcaaccttggatgggtgtattaagatttactcttcgagagttgattcagtgacaacggaaacaggtaagttattgagcgggttggcacaaagaaagacgaatggggcatctaacggagatgacagtaacgggggaaatggtgaagggcttggaggtgacagtgacgaagcaaatatagagattgatcccttaactggtatgcctatatctaatgatcctgatgtgaataacactaggcggagagtgtacaacagagttttagaaacaacattggtggagttcgaaacgatcaagatgaaagagctagaccaggaattaataattgatccattattcaaaaaggccttggttgatttcgatgaaggtggcgccaagagtttattgttgaacacattaaacatagacaacactgcaagagtcattttcgatgcatcaattaaggatacacaaaacgtagggcaaggtaaacttcaaaggaaagaagaagaattaattgaaagagatagtttagtagatgacgaaaatgaacctagccagtcattgataagtactcgtaatgactcaaccgtaaatgattccgttattagtgcaccttccatggaagatgagattttatctcttggtatggattttataaaatttgatcaaattgcggtgtgtgaaatttcaggatcgattgagcaactaaggaacgttgtcgaagatattaatcaagcgaaagactttatcgaaaatgttaacaacagatttgataacttcttaactgaagaagaattgcaagcagctgtcccagataatgcagaagatgatagcgatggctttgatatgggcatgcaacaggagctgtgctatccagatgaaaatcatgacaatacatcacatgatgaacaagatgatgataatgtcaacagtaccacaggaagtatattcgaaaaagatttgatggcatactttgacgaaaatctaaatagaaactggagagggagagaacattggaaagtacgaaattttaagaaagcaaacttagtgaataaagaatccgacctgttggaagaaacgcgaactactataggagatactactgacaaaaacacaacggacgacaaatcgatggatacgaagaagaagcataaacaaaaaaaggttctggaaattgatttcttcaaaacggatgatagttttgaagacaaagtctttgcctcaaaaggaaggacaaagattgacatgccgattaagaacagaaagaacgacacacattatttactgccggatgacttccatttttccactgatagaataacaagattgttcattaaaccggggcagaaaatgagtctgttcagtcataggaagcataccagaggcgacgttagttcggggctttttgaaaaaagcacagtttctgccaaccattcaaataacgacattcctactattgcagatgagcacttttgggcggataattacgaaaggaaagaacaagaggaaaaagaaaaggagcagtctaaagaggttggtgatgtggtgggtggagcgctcgataatccgtttgaagatgacatggacggtgttgacttcaaccaagctttcgaaggaacagatgataacgaggaggccagtgtgaaacttgatttacaggatgacgaagatcataagttccccattcgagaaaataaagttacttattcaagagtttcgaaaaaagttgacgtaagaagattaaagaaaaacgtatggagatcgatcaacaatttgatacaagaacatgacagtaggaaaaatagagaacaaagctctaatgacagtgaaacccacacagaagatgaatcaacaaaggagctcaagttttctgatatcattcagggtataagtaaaatgtattcggatgatacactaaaggacatttcaacaagcttttgttttatatgccttctacacttagccaatgagcatgggttgcagataactcataccgaaaactataatgacttgatagtgaattatgaggatctagcgacaacacaggcagcgtcatag

SEQ ID NO: 1543 - DNA, 390 bp, Saccharomyces cerevisiae
atgatatatcccttattcaggatatgtatcctaggtgcatttctgttgggtagctatgcatgtcttgaaaatagtacgcaaaagggtattgaaggggtaactctctctcataatagtgtacaaattaataatactttggcaaaatctgcgccattttgtgagtcagacgctctttcaatgaattattcaactgaaaatatgttaagtaataatgcatgcgattatacgaaaaattcttcgtatccatatattattaccattattactaaggcctttgataatgcccttgaaaattcacttaatttacaagcaaacaggaagctttatcacagagtggggacgtgtatacagaatattttttatcaactgttgttaactgtgaattactga

SEQ ID NO: 1544 - DNA, 1587 bp, Saccharomyces cerevisiae
atgactaaatctcattcagaagaagtgattgtacctgagttcaattctagcgcaaaggaattaccaagaccattggccgaaaagtgcccgagcataattaagaaatttataagcgcttatgatgctaaaccggattttgttgctagatcgcctggtagagtcaatctaattggtgaacatattgattattgtgacttctcggttttacctttagctattgattttgatatgctttgcgccgtcaaagttttgaacgagaaaaatccatccattaccttaataaatgctgatcccaaatttgctcaaaggaagttcgatttgccgttggacggttcttatgtcacaattgatccttctgtgtcggactggtctaattactttaaatgtggtctccatgttgctcactcttttctaaagaaacttgcaccggaaaggtttgccagtgctcctctggccgggctgcaagtcttctgtgagggtgatgtaccaactggcagtggattgtcttcttcggccgcattcatttgtgccgttgctttagctgttgttaaagcgaatatgggccctggttatcatatgtccaagcaaaatttaatgcgtattacggtcgttgcagaacattatgttggtgttaacaatggcggtatggatcaggctgcctctgtttgcggtgaggaagatcatgctctatacgttgagttcaaaccgcagttgaaggctactccgtttaaatttccgcaattaaaaaaccatgaaattagctttgttattgcgaacacccttgttgtatctaacaagtttgaaaccgccccaaccaactataatttaagagtggtagaagtcactacagctgcaaatgttttagctgccacgtacggtgttgttttactttctggaaaagaaggatcgagcacgaataaaggtaatctaagagatttcatgaacgtttattatgccagatatcacaacatttccacaccctggaacggcgatattgaatccggcatcgaacggttaacaaagatgctagtactagttgaagagtctctcgccaataagaaacagggctttagtgttgacgatgtcgcacaatccttgaattgttctcgcgaagaattcacaagagactacttaacaacatctccagtgagatttcaagtcttaaagctatatcagagggctaagcatgtgtattctgaatctttaagagtcttgaaggctgtgaaattaatgactacagcgagctttactgccgacgaagactttttcaagcaatttggtgccttgatgaacgagtctcaagcttcttgcgataaactttacgaatgttcttgtccagagattgacaaaatttgttccattgctttgtcaaatggatcatatggttcccgtttgaccggagctggctggggtggttgtactgttcacttggttccagggggcccaaatggcaacatagaaaaggtaaaagaagcccttgccaatgagttctacaaggtcaagtaccctaagatcactgatgctgagctagaaaatgctatcatcgtctctaaaccagcattgggcagctgtctatatgaattataa

SEQ ID NO: 1545 - DNA, 1065 bp, Saccharomyces cerevisiae
atggactatggctacttttttcccgcacaacgtattgaagaaacaaatggtgtggatttttggatagacagtaatgctgaatttacacagtctaaaagacctgactcttcaacatccactctttcgagggttttaacggacaccacgaatgtatccaataatagtggatcactcaaaagaaaaaccatcaagaacaaaatattcccacaaaggaaaatattcaacgatagcgaaaattttgactttggtaaagccaacactgattgtaagcatgtgtttaaaagtatttctaagcaactgatttttcttccaaggtgtttccaacatcacagtatccgaggctggatgaaagacagatactccgaatttggttataaaataaaaagaaatcaaaattgtcccccctcagcatgtgtacaggcactatacaatactagtagatccaataccgaagagtcaaaccccaacagtctggattctctgataatgtataaatacatgcgatactctgaaaagaaaaaggaattgatgtgcagattttgccaggggaataattggattctagctgaaaactacctaaaacatttattctttgcgcacggcattttgtctgaatttaagcctcacactttataccatttcgagtctaagctgttaaaaatccagggaaaacttaatttcaaaattcaagtattaaaagagccagagtttagcaaaaaaattttgaactctcttactgtatccatcattccctctcctttggcctactacactcaaacgttgaacgggggatttaggagaatccatgtgaaatgcccccactgcgaaaattggatccgtttgggttggtgtgaatacgatgaaatcattagggattcctttcaggatttcgagtctctaagaaacctcaatgctgattataatgggatgtcgtatattcaaacacgcaatagagaagacattgaaggtatatacgagaattattttacacactacatccaatgcgacttagccacgttccgaacgaaatgtttatatgtccaagttataacaaaaagcaattga

SEQ ID NO: 1546 - DNA, 1404 bp, Saccharomyces cerevisiae
atgtttaaatctgttgtttattcaattttagccgcttctttggccaatgcaggtaccattcccttaggcaaactagccgatgtcgacaagattggtacccaaaaagatatcttcccatttttgggtggtgccggaccatactactctttccctggcgactatggtatttctcgtgatttgcctgaaggttgtgaaatgaagcaactgcaaatggttggtagacatggtgaaagataccctactgtcagtctggctaagactatcaagagtacatggtataagttgagcaattacactcgtcaattcaacggctcattgtcattcttgaacgatgattacgagtttttcatccgtgatgacgatgatttggaaatggaaaccacttttgccaactcggacgatgttttgaacccatacactggtgaaatgaacgccaagagacatgctcgtgacttcttggctcaatacggttacatggtcgaaaaccaaaccagtttcgccgtttttacctctaattctaagagatgtcatgacactgctcaatatttcattgatggtttaggtgaccaattcaacatcaccttgcagactgtcagtgaagctgaatccgctggtgccaacactttgagtgcttgtaactcatgtcctgcttgggactacgatgccaatgatgacattgtaaatgaatacgacacaacctacttggatgacattgccaagagattgaacaaggaaaacaagggtttgaacttgacctcaactgacgctagtactttattctcgtggtgtgcatttgaagtgaacgctaaaggttacagtgatgtctgtgatattttcaccaaggatgaattagtccattactcctactaccaagacttgcacacttattaccatgagggtccaggttacgacattatcaagtctgtcggttccaacttgttcaatgcctcagtcaaattattaaagcaaagtgagattcaagaccaaaaggtttggttgagttttacccacgataccgatatcctaaactttttgaccaccgctggtataattgacgacaaaaacaacttaactgccgaatacgttccattcatgggcaacactttccacagatcctggtacgttcctcaaggtgctcgtgtctacaccgaaaaattccaatgttctaacgacacctacgtcagatacgtcattaacgatgctgttgttccaattgaaacctgttccactggtccagggttctcttgtgaaatcaatgacttctacgactatgctgaaaagagagtagccggtactgacttcctaaaggtctgtaacgtcagcagcgtcagtaactctactgaattgaccttctactgggactggaacactactcattacaacgccagtctattgagacaatag

SEQ ID NO: 1547 - DNA, 2076 bp, Saccharomyces cerevisiae
atgagccagatcgttgattttgttgaggacaaagattcaagaaacgatgccagtattcagatcatcgatggaccctcaaatgttgaaattatcgctctctcggaatcaatggatcaagatgagtgcaaaagggcacatgtaagctctgcagagatgattccatcatcaccgcaaagaaaatctgtttcgaatgatgttgagaatgttgacctaaacaaatctatcgaactttctgcgccgttcttccaagatatcagtataagcaagctagatgacttttctacaacagtaaattccatcatagattcgtctctcagaaatgagaataatgcaaaaggaaacgcgaaaaaacttttggatgatctaataagtgatgaatggtcagctgatcttgagtcgagtggaaagaagcacaacaaatcacaatacaatttgagggacatcgcagagaaatggggagtacagtctttaaaaaatccagagcctattgctgttgactgcgaatataagacacaaggaatcggaaaaaccaatagtgacattagtgatagtccgaaatcacagataggagcagctgatatactgttcgattttccactgtctccagtaaaacatgagaacccaactgaagaaaagcacaattcgattgctaatgaaaattcttcaccagataatagcctgaaaccagcaggaaaacaaaatcatggtgaagatgggacatccatggcaaaaagggtatacaataaaggtgaagacgagcaagaacaccttccgaaaggaaagaagagaaccatagcgttatcaagaacactaatcaacagcaccaaactacctgatacagtagaactaaatctttctaaatttctcgattcctcagatagtattactactgatgtactttcaacccctgcaaaggggtctaacatagtaaggacaggtagtcaaccaatctttagcaacgctaattgttttcaggaagcaaaacgctcgaaaacattaacggctgaggatcccaaatgtactaaaaatactgccagagaggtatcacaactagagaattatattgcctatgggcaatactatactagagaagactcaaaaaacaaaatacgacacttgttaaaagaaaacaaaaatgcttttaagcgagttaaccagatatatcgagataatataaaagcacgctctcaaatgattatagagttttcgcctagccttctccagttatttaaaaaaggagacagtgatctgcaacaacaattggcaccagcagttgtgcaatcaagctataacgattctatgccgcttttaagatttcttcgaaaatgtgacagtatttacgactttagtaacgatttctattacccctgtgatcccaaaatagttgaagaaaacgttttgattctatattatgatgcgcaagaattttttgaacaatacacttcacaaaagaaagaattatataggaagatacgatttttctcaaagaatggaaaacatgtgattcttatactaagcgatataaataaactcaaaagagctattttccaattagaaaatgaaaagtacaaagctagggtagaacaacgattgtcaggaacagaagaagctttaagaccgagaagtaaaaaatcaagccaagttggaaaattagggataaaaaaatttgatttagagcaacgattgcgcttcattgatagagaatggcatgtcaaaatacatactgtaaattcacatatggagtttattaattctctgccgaacctagtgtcattaattggaaaacagcgcatggatcccgcaattcggtatatgaaatatgctcatttgaatgtaaaatccgctcaggatagtacagaaacgctaaagaaaacctttcatcagatagggagaatgcctgaaatgaaggcgaataatgtcgtgagcctataccccagttttcaatcattacttgaagatattgaaaagggaagactgcaatcagacaacgaaggtaaatacttgatgactgaggcagtagaaaaaagattgtacaaactgtttacttgtactgatccaaatgatactattgaatga

SEQ ID NO: 1548 - DNA, 2373 bp, Saccharomyces cerevisiae
atgcaagaagggggctttatccgtagaaggcgtacgagaagtacgaaaaaaagtgttaattataatgaactaagcgatgacgatacagctgtgaaaaactcaaaaactctgcagctgaaagggaacagcgaaaacgtaaatgacagccaagatgaagaataccgtgatgatgctacgctcgtgaaatcacccgacgacgatgacaaagattttatcatagacctaacaggttcagataaagagcggaccgccaccgatgagaatactcatgcgatcaagaatgataatgacgagataatagaaatcaaggaggaacgtgatgtttcggatgacgacgaaccgttaacaaagaaaaggaagacaactgctaggaagaagaagaaaaaaacgagcaccaagaaaaagtcaccgaaggtaaccccatatgaaagaaacactttgcgattatatgagcatcatcctgaactaaggaatgttttcacggatttgaaaaatgcacctccctatgtcccccaaagatccaagcagccggatggtatgaccatcaaactgctacctttccagttagaaggtcttcattggctaatatctcaagaggagagcatttatgcgggcggtgttttggcagacgaaatgggtatgggtaagaccatccaaactattgccctattaatgaacgatttgactaagtctccgtctttagttgttgcccctaccgtggcgctgatgcagtggaaaaacgaaatagaacaacatacaaagggacaactgaaaatatacatttatcacggtgcttccagaaccacggatatcaaagatttgcaaggctacgatgttgtactaaccacttacgcagtgctggaatcggtattcagaaagcaaaactacgggtttagaaggaaaaatggacttttcaagcagccttccgtattgcataatattgacttttatagagttattctggatgaggcacacaatatcaaggatagacaaagcaatactgctagggctgtaaacaacttaaaaacgcaaaagcgatggtgcctgtcgggtactccgctgcaaaatagaattggtgagatgtattctttgatcagattcttaaatatcaatcctttcacaaagtacttttgtaccaagtgtgattgcgcttcgaaggactggaaatttacggatcgcatgcattgtgaccattgtagtcacgtcattatgcaacacacgaatttcttcaaccatttcatgttgaagaacattcagaaatttggtgtggaaggtcctggtttagagtcttttaataacattcagacattattgaaaaacatcatgctgcgaagaactaaagtggaaagagcggatgacttgggtctaccgcccagaattgttaccgtgaggagagacttcttcaatgaagaggaaaaagatctttacagaagtttatacacagattctaaaaggaagtataattcctttgttgaggagggtgttgttctaaacaattatgcaaacattttcaccctaatcacaagaatgaggcaactggcagatcatcctgatttagttttgaaaagattaaacaattttcctggcgatgatatcggcgtcgtgatctgccaattatgtaacgatgaagctgaggagcccattgaatctaaatgtcaccataagttctgtcgtttatgcatcaaagaatatgtggaatctttcatggaaaacaacaataaacttacttgtcctgtttgtcatatcgggctaagtatcgatttgtctcaacctgctttggaagtggaccttgattccttcaaaaagcaaagtattgttagccgtctaaacatgagtggcaagtggcaatcatcaacgaaaatcgaagcacttgtggaagaactatacaaactgagaagcaacaagagaacgattaaatccattgtgttttcccagtttaccagtatgctggatctggtagagtggagattgaaaagagctggatttcaaacagtgaagcttcagggtagtatgtcaccgacgcaaagagatgaaaccatcaagtatttcatgaacaacattcaatgcgaggttttcttggtcagtttaaaggcgggcggtgttgctttgaatctttgtgaagcttcgcaagtattcattttagacccatggtggaaccctagtgttgaatggcaaagtggtgatagagttcatagaattggtcagtatcgacctgtgaagatcacaaggttttgcattgaggatagtatagaagcaagaatcattgaattacaggaaaaaaaggcaaatatgattcatgctacaataaaccaagatgaagctgccattagcagactaacgccagctgatttacagttcttattcaataactaa

SEQ ID NO: 1549 - DNA, 1791 bp, Saccharomyces cerevisiae
atgacaaaggaacgtatgaccatcgactacgaaaatgacggtgattttgagtacgataagaataaatacaagacaataaccactcgaataaagagtatcgaacctagtgagggatggttggaaccttctgggtcagtgggtcacataaacacgatacccgaagcgggcgatgttcacgtggatgaacatgaggatagagggtcttctattgatgatgactcaaggacttacctgctatatttcacagaaactcgacgtaaactagaaaacaggcacgtccagttgattgctatttccggtgtcattggtacggcgctattcgtggcgatcggaaaagctttataccgtggagggcccgcctctttattattggcatttgctctttggtgtgttccaatactttgcattactgtgtctacagcggaaatggtctgctttttccctgtaagttccccctttttgagattagcaacgaagtgcgttgacgattcattggctgtcatggctagctggaatttctggtttcttgaatgcgtacagatccctttcgagattgtttctgttaatacaattatacattattggagagatgattattcagctggtattccgctcgccgttcaagtagttttgtatctgcttatttccatttgtgcagtcaaatattacggtgaaatggaattttggttggcttctttcaaaattatccttgcactcggcctatttacattcacgttcattaccatgttgggtggaaatcctgaacatgatcgttacgggtttcgtaattatggtgaaagtccattcaagaaatactttcccgatggcaatgatgtggggaagtcttcgggctacttccaggggtttctcgcttgcttgattcaggcatcgtttaccatagctggtggcgagtatatttctatgttagcgggagaggtcaaacgaccaagaaaagtattacccaaggcgtttaagcaggtgtttgtgagattaacatttttgtttttagggagttgtctgtgtgttgggattgtttgttcgccaaatgatcctgacttgacagcagcaattaatgaagcaaggcctggcgccgggtcttcaccttatgtcattgcaatgaataatctgaaaattagaatattacctgacattgttaatatagctttgattacagccgccttttctgctggtaacgcttacacttattgctcatccagaacattttatggtatggcattagatggctacgcgccaaaaatcttcactagatgcaataggcatggtgtgcccatttactctgtggccatatctttggtatgggctttagtgagccttttgcaactgaattctaatagtgcggtcgtattgaattggttaattaacttgattactgcctctcaattgattaattttgtcgtcctttgtatcgtctatttatttttcagaagggcttaccacgtccaacaagattcgttacccaagttgccattccgttcgtggggtcaaccatacactgctattatcggccttgtttcatgttccgcaatgattttaatacagggctacaccgttttctttcccaaattatggaacacacaagattttttgttttcgtatttaatggtgtttatcaacatcggtatatatgtgggctacaaatttatttggaaacgtggtaaagatcacttcaaaaacccacatgaaattgacttttctaaagagctaacagaaattgaaaaccatgagattgaaagctccttcgaaaaatttcaatattatagcaaagcataa

SEQ ID NO: 1550 - DNA, 1575 bp, Saccharomyces cerevisiae
atggagaaagatcaaatccagcctagggtgttggagtcagtagacacaaactcattatccttgctttcgtccaataccagctcaaatatgaatagcaacaccaacaataaactcagtataattgccagtgatatttctacaggatccgtactttccaggcccttgactcctccagtcgtccaggatatagagaataactccatgttacaatggcaatttgaaaagaaggaatttatcttcgatagtaacagcactccttcgaagcaggcaaaaccattgcagagaaattctccataccaaggcaatagtcaaagtgaaaatcagaaccaacagttattgaatgtaagaaagcgtcgctcacaattgataggtgccaagcctaaaattccatccaaattgtaccaatctgtttccaaattagatctaattgatgacaagagctttacgtctttgccaattgcgcctccatgcaatatcgaaactaatgaagatgacagtggaaacaacgaatacaacaacaataaaaaacggcccaggttgaatcctgtaaatgaactgcgagtgcataacaacaaacgtaataggtacgtcagttatgggccgagtttagatacaaaaaactacgagctaacagaaaatacttctcaggatataccaccgctagtcctggttgaagactacataccgtatacccaaagtaaatcaacaaaaaaaatggtatctatttcagatttgaaatcaaaactaagtaaaagaagagataatcatatcccgctgagagtaaaaaattcatattctgaaattaataaggaaaccaatagaaatagctttgaaccgaattcactaacactgataccccatatattaaggaatactgaagaaaatagggacgaaagtaacaaccccttagattttatcaaagaggaaattgaaataagtgatatttccataccaaattccattgaaaatatggtggttaacttggttaatattccatcttccaataaaagttacgatgatctttatctatcggaattaaatgttcattcccaactgaggaaatgtgtcatctgcgaaaaggccctatatgaaattagctcgagacttttaaattcaggatactataaagaaattgtatgtgagcaatgcacagttagatatgaagaagccgctaaaatctttgagaactgcgagttcgaatcatctatggatgaatcaaatctaagcagcggtacttttagtgatctagagaattcagcagaaccgtttcatttatcgacagatgttccaaaaaaaataaataggcacatagaagataacaagatcgaccttaaaaaggaaatatcaaaaaaaaaggacagcttctctaaggaactaatagaacgattgcagttgcaattgctagaaaatgataagtcaatcaaacatcattttaataaagatgcaatgggctctaaatcaatgaattggtttttggaagcaagaagaaaattgaagtggaagtggagaataaatggtttacttccgcatttcttacgcaatcaaaatagtgatcgtttaaattttcaaccttga

SEQ ID NO: 1551 - DNA, 1830 bp, Saccharomyces cerevisiae
atgtccagcttagccgatacagtagagggtagcgaggccaaacgcggcagattttccaacaatgcattaacctccgatactggtattttacagaaaaatagtacattaagaaactggtttttaaaaccgacagcagacctaaaaaatagttgcgaagatagagttgaagatgacgtcaatgatgtctacttaaatgacaaaaactcacaaaaatctgttgaagaaagaaaactaggaagaaaagttagatcttttttcaaacaaacaaactcaaataaggacgagtctgtgttggaagatgaagatgatgcgttagtttggaagaaaactagcaataagtgtgcaaaaaaggaaaattcccatgacatccaaaaaggaagtttcacaaaaaaaatcagaaacagtattttcaagagtgcaaatgacgtgaaagaattcaggaatgaaaataacttactattgcccgttgaactttcttctgatgatgagaatgagtctcatttcactgatgctaactcacatgttatgcaatcaaaaagtcccgagaaaataccttccaaggatcaatgcttgactaaaggcgctaagaataaaggtctgaaaaaggaatatgaaaaaagttttgaagagtatagcgacgacagtgacgatgaattttctcctgctactccaccggagaatgttcttgaaggtccttacaaatttgtgtttcagacaccaaacacatttacatctcagcctaatataacagtagaaaatgattttcacaaaggtgggagacatgtgattgactatctgaacaaaaaattggctactatgaacattgatattgatttgacttcaggggggaaacaaaacgtatcttgggaggaagagctcgaccaattgagcgaccacgttatagaaagtattactaaccacatttcaaagggtagaatgcacgcacaagagaagcaagatgagttggaaaagttaaaattggagaatttgaacttgtcaacattaaagcaagaaaatctccaacataagcaggaaattaactcattgaaagacaaccttgaatccattagtaaaaaaaacaatgatcttatattggaaatgaacaaattgaaaaaaaaaagtacgaataataaaacaaatgagtacatatctacggatgaaaacgaaaatgaggagattaccaaatccaatatgggtcctggcattttagaactgaacgtcaacgaaacttcaaaaaaattacagcaatccacattcaaaccctcgaaatatcttccaagagaaacgagaaacaatgaaaatagattaaaacacttggaaaagagaatatttggcttagaaaaatctcttgaaaaaaaaaaaaaacaggtaagggctgacagcgttagattagacttgaatagatatactatcgaccagtttttgacattactgaaaagcctcagcgaggttttgcaattccacaatgtttatggcaatgatttgaaggaaaacgacgataatattataaagattgaaacctgctgtagtgcgctaaacatgaaaaattgtttcgaagactcctcatttcgtttacaagaaaacagcttcaagaggcaattgggccctctgttcgcaaacatcaacttctccttaatcgaccaactgacaatgaacttcaggttctacgagagatctgccaatttccagaaggaaacaataggtgggttaagaatgatgctacaagataaggataactatatcaaaacactgatgcaacatttgaagaaaaaagagagtacaaagttgataaaagacagcaagaatggcgcctccaccttaacatcttaa

SEQ ID NO: 1552 - DNA, 876 bp, Saccharomyces cerevisiae
atgagttttagacatttcaagaggagacttgacacaagctcagcagatgaaagctcttcggcggatgaagagcatccagaccaaaacgtatctctaacagaaaaatcagcctcattaagccatagtgatttgggcggcgaaattttaaatggtacaggaaagaaccgcacccccaatgatggccaagaatcaaatgaaagtgatgggagtcccgaaagtgatgagagtcccgaaagtgaagaaagtagcgacaacagtgattcgagcgatagtgacgatatgagacctttaccgaggccattatttatgaagaaaaaggccaataatttgcagaaagctaccaagatagatcaaccctggaatgcccaagatgacgcacgagttctgcaaacaaagaaggaaaatatgataaaaaacatcgacaaagctaatcaagtggcaaagaactacgaaacgatgaagctgagacttaacaccaattacagcaccaacgaagaattgatcaagcagtgcttgctcttagatgataacgatgaagtcgattcagaaaaggagagacagaaatggtttgaaaggcagaacgaacgaaagcaaaagcatagaagaatacaacttgcgaaacaaagagaatcagaagaatatgaggcaaaacgatttgaagcgatgcaaaaaggcaaagatgggaataccaaatacgacgttatcttggacaaggagaaagagaaacttgatcacaaaaaacaaagatcggctgaaaaagtagaaaaatctcacaataacaaccgttacaagattacaagaactaaaaatgttgaatttggtgacctaggcaagaatagtagagattacgaagaaactgaatattcggttatataa

SEQ ID NO: 1553 - DNA, 1719 bp, Saccharomyces cerevisiae
atgggaagcgaaccgtttcagaaaaagaatttgggtctgcaaattaattcgcaagaaagtggaacaacccgctcaacatttcattcgctagaagatctaggagatgatgtaattaatgaaagctgggatcaggtgaaccaaaagagagccaatatagatcatgatgtctttcatgagcaccctgactcttccccatcattgtcagcacagaaagcaaaaacaaaagaagaggaagttgctgtaaagtcatcgaactcccagtcaagagacccttctcctgatactcaagcacatattccatatacttatttttccaaggatcaaagactaatcatttttggaattatcatttttataggatttttgggcccaatgtctggaaacatatatataccggctttaccattgctgcaaagggaatatgatgtaagtgcaacaacaataaacgctacagtttctgtatttatggctgttttttccgttggtccattgttttggggcgcactggcggattttggtggaaggaaattcttatatatggtgtcgttatcactaatgttaattgttaatatacttttggccgctgtaccagtcaatattgctgccctttttgttttaagaattttccaagctttcgcttccagctctgtgatttctctgggagctggcactgtaacagacgttgttcctccaaaacacaggggaaaggccatagcgtatttcatgatgggtccaaacatgggtcctattatagcacccattgttgctgggcttattttaatgaaaggaaattactggagatggctttttggtttcacttctatcatgacaggaatagcattgatcttggttactgctttacttccagaaacgctacgttgtatagttggtaatggagaccctaaatggggtgacaaaaaagatgaacgtgaaaataacgaatctccattcttcgaaggtaataaaatatcacatcggcgtctgttcccagacattggtatccgtaaaccagtcaataatgatgctttcttccaagaaaattttccaaagccgcctaaagcaggtttgacactatattggaaaatgattaaatgtcctccaataataatcacgtccgtcagtactgcactcctgttctccagttactatgcgttcagcgtcacgttttcgtattaccttgaacatgactaccgttttactatgttagaaattggtgctgcttatgtctgcccaggtgtagctatgttactaggatctcaatctggtgggcacctctcagattatcttcgttcacgctggatcaaaagtcatcctaaaaagaaattcccggcagagtttcgtttattactgaacctaattggaattttactaacaatatgtggcacaataggatacggatgggcaatcttctttcattatcattttgtggttcttttagttttttccgctctcactgcctttggtatgacctggtgcagcaacacatcaatgacatatttaactgagttattccccaaaagagctgctggaactgttgctgttagtagtttctttcgaaatgtgggcgctgccattagttccgctatcattttacagctctgtaacgcaatgggaattggatggtgttttacagggctcggtctctgcagttcaatttcattgattggtatattatatcttctcatttttcaaagaaaatatactgccaaagaattttaa

SEQ ID NO: 1554 - DNA, 1572 bp, Saccharomyces cerevisiae
atgtaccaaaataatgtattgaatgctattttggcttctgaaaaatcaaactttcaatacgatagtggaacaatattaagaaaccacaaaagaccaataataacatttaataacaacatagagcacacagtatccgaacctaataattttacaggctatgaggaaaaggaagatttggatataatggatatttgtccttattacccaaaagcaagaatgctggcggatgccattcaacatgccaaaacgagcgcaagtgaaaacaaaatggaactatcaatgaaaactatcccatgtctcaagaaggaaaacgtccatgttgagaaagggcacgattggtctcaactcagtacgagcagaatttgtaaaattttagaagacatagcagataaaaaaaataaaactagaaggcaatctgccccattacaaaagacgaagtatttcccaacaaatgagaatcaaaataccgatatagaaaatcagaattggtcccaaatccccaatgaagacatatgtgcacttatagagaagattgctagcagacgcaataaaaatcgcaaacggaaaaatctttcatgttctaaagtccaagaaattcagggaaatattgatttacccaaaaaagacgtacaagagggagatatttcagattcgtctctatttgcagcagtaagaggaaccaaaaaagtttccggatatgattacaattcagaagataagatacctaatgcgatacgtcttccttactgtaagcaaatattacgattattctcacttttacaaatgaagagaaatgacttaatagtcacctctgaaaattgtaatagcggagttttcttcagcaattttaattatcaacttcaagttaaatcgaattgtattgcaaatatttcttctacactcagttttctaccccatcatgaaataaccgtatacacatcctttattctctatccaaacgttgtcgataatatttgggaatgcacacgatacgctattcaacttttgaagtccgaagcagcacagtttacgctactgcgtgatatatatagtggcttcacaattatactttcaaatcatcgatatcatcctaagggttttagcgctgattactgttacagtgcaaatgaattgacattatttctttttgttattcgaacagggcaaaaaaaagtactttatcgatctattcctcacaacacagcagcaattgaaaaagacagttcttttgatacagaaaatagaaagagaaggtccgaggaagaggttgttcttaaatgtaggaagtgttctaataattcattggcattaaaagaaatcagcacctatcgtttggatagcgcagaaggttttgagaagtctcagcctctaaaagatgaagcaaagctcagtgatatgaattatgtacaaggtagtatcagctataacaggactattcttaccggcttatggaaattatttcacagattgtgctgcaaagatcgttataggaaaaccaatctgtcagaaacattgttctatgacgattcaacggaaagatgggttagaatgggagagttaatgcactattga

SEQ ID NO: 1555 - DNA, 1695 bp, Saccharomyces cerevisiae
atgagctacatagttgacctacaagtgcgaggatcatctctgagggttatcaaatgtatgtttagagaggatgagcaaatttcttctctacattctggttctgactcgaaacaaaacagcaacaaaaagctgggagaatttttgaatctgttaaaagcagtggtcaagaggaagttggaaagtttcccaaaagaccgtttaaagacttcgattataactggccaagaattaatgagagaggggcaaggaagtattgaaattaaggatccaccaacggaggcgcaacaacatttgattagaagcctagcaaaagttttattacaccagttttcaagcataaatggcaaagttaacacagtaaatgaaggacaagataatttgtttctatccttattcgttaaaaaaatttctatagagcaacagtccacatcacacgtctctattaaattgaactttcatgagaaaataaatttgggtcagcacatagattctattttagattcagaggagaccaacgagtcggacacttatcacatgggatctgttgacgagttcattatatatcccttttgctgtctggaagagcaagatgagctgaaaaatggcagcatactgtccacagagttcgacaagattgacttagaactagacgaggatgatggttttgagggagaaactttaaacaattgtatcaattcggtgggaaattttgacattccactaagtaagcaaacactaaacttagtaaatatatcatatcttccaggcacaactttcgagggccaatgggaatcgttgtattttggtaacaatattaaagaaaggttatatagctacgcaactatatctctcaagatagcaagattcaaacaaactggagactccaatcaagaagacattacaacgctaatcacaaataataaattactccttgtccatggtcctccgggaacaggtaaaacaacgttatgcaaagcactttgccaaaaattatctgtgaggcgggaattttcagacggttccgataccattgatactaattataaggggataataatagaattgtcttgtgcacgcatcttttctaaatggtttggagaatcgtcaaaaaatatatcaatagtattcaaagacattgaggagcttttaaaggtcaatgagggacgagggatctttatatgccttttgatagatgaggttgaagcaatagcaagttcaagaacaaatttgtcaagtagaaatgagtcaacagatggaatccgagttgtgaacactttacttacgcaacttgacaggctgaaaaaataccataactttttagcattagccacgtctaatttattagattcattagatgatgcttttgttgatcgagcagatggagttttttatgttggaaatccaacagctgagggcatcctccacattctaaaggtttgcatagaggagatgataacttcaggtataattctttttcacgcaagatcaactggagtcaagttcttcaataaatatcaggacattttgcggaaaattgctatcaaatgctcgaccgttgatatcagtggtagaacaataaggaaattgcccttgatgtgtctgtctgaatacttccggacatttcctgtagacgacgatgagtttgttctggcattagctatgtcagcgcggaagctgagcgcagcgcggaagtga

SEQ ID NO: 1556 - DNA, 2775 bp, Saccharomyces cerevisiae
atgtcaagtgcttcaagacttcaaaacgtcaatattgtttctaacaactattctcgttacggaacttccgtttacgataagttgtatcatagtaacggcagtggtagcaataatgctggtaagaattctaccacagttggtaaactgtcatctatctcacaaaagtccaggagcaaacagcgtcatggctcaaattgctccagatcaatgagtcaatcacccttatcgacgttcaaatctccactcagcaatcaaaatcaatccagcgctcctgatgatttggcttccataggtcagagacgcagtgacgacgtcacatctttagataatgaaactatcataacgatgaattcaaggaaatcaaggattaaaaaaaagtataaatccttaatctccacctcttcaaaaaaatttatgaataaattgtacgatcatggtgcttcatccgactcattttctatattttctctgaagacttcccattctggtaaacatgaaaattccagatttgaaaagctgaggaagagaaaataccatgcttggggcaaatttgccgatatcaacgatttaccagttgaaataattgccaaaatactttctgaattcgagttaggtcgtgatcaaaagacactcgtaagatgtctatacgtatcgaagaagttttataaggcgacaaagatcgtcctttataggctaccttacttcacttccacttacagagtggcgcagtttgtcacctcactaagattacatccggataacggggcatacgtgaaagtattggacctatcacacttgaagccgggaattataggccaagactcgaaggattctcaaggcctagacgatgatggccactcaaggcgtcacagacgccgtcgccgcagatctactaacacaagtttgaatctacctccagctactccaacatctaccatttctaacgaggatgatgccaatagcggattaatcaaagacgacgcttcaaatggcagtgaagttgaagacttggcattagctggttggagagactggagatacagaaatgaacccctttatagctctcctctgttgaacagctttaaactgaaaaaagtggtttctcgttcttcttctatcacttctacatcttctggaaattccaccggtgttcactctacaaggagacaacgttccaatagttccgttgcttccataacgacgagtatcatgtcatccatctataacacctcccatgtctcattgtcttcaaccacgtctaataccagcaatggtaacatctcttctggtagtaatctgtcaagagtttccactgctggatcattgaaaaaagcttctgcgaagtccacaaggtcatctcctcagaaagcaaaacctatatctgacattacgtcatcttcctggtttagaatgaggttaagttcaagaaatagaaaggcaaggacagctaatacgattaatttaaagaactcgaaggataagtctgacgatgactttaaagttttaaagcacgattcggggcatccatccaattatcgttcttcgacattaaaatttagcattgaacaaccatttagtacgcatcatccgtatgccaacaaatttcttttaaagtacgctccttataaagatctgcccctaggttatattttacatatgctgaacctgtgtcctaaccttgttgaactaaacctttccaatttagttatttgtaccgatttcaaattaatcaaccaaagatccgaaagaagaaggatgacatcttcactgttgcccgctgtccaggagtctagtgtttctgcaggccctgagaaagatttagaaattgtctatatgaccgattctggcaaaggttatgaatattatgaggggttaagcaagaaacactcacgttcttcaagcctaggtaccaatccatctagttggattggaggtcaggcgaattggacagattacccacctccaatcgatgcacaaacgaaaacaagagaggaacacagacgcaacaataccttgaacaataagaacgtcgtattaaagaagctaaacccttttgaaatttttgaaatgatctgcaatagaaatgaagaaaaaggtggctactgctccttaactaaggtgaaaatgaatgacattgtgtggtgcaggcaatatatggtaaagtattttgtaatgaggacgtttcgccagcatttggattataaatccatggaaaacaactcttatgaaagacacttattcagtttccgggactctggcttggatagaaatttttcctgggcttgtaatgccaaattgcatgaatttgtcgcattgatggttatggatcatctttcaaatttagatgatttaggattagaagagctttttaatatcaagtccgaaaagctatatataaaaaactattgttgccgagacccggatattctcgaaatatcaaacttatttgatattagatatggggccggatctgaggctgatgctacttctgattccaatctcgaagcagaatctttacaattcaggttgacaatattaaaaacagaaaagccaacttcattttggctcacaaaagtttccaaagattatgtttctttagtggttaaattatgtgtggatgatgacattgatatggacaaaatgaaagttggaaaaccaactttgagaatagacagtattacacacaatttgattagtaggttaaaggagttgaggagagttgatctaaggagaaatgttggcgaaaataactactatgctgaaagcatcatataa

SEQ ID NO: 1557 - DNA, 462 bp, Saccharomyces cerevisiae
atgacctttttacaatttatcaataataatagacaagaaggacaaggttatatttcagaaaaattattcaaaactaagaagaatgagatgataagaaaaacagttaccaatttagtagctgtaagattaaaaaacttatcccacgaatttgatgtaatagagaattatctgcgctatatagctagcaccagtgaacatctatttactgctattaagcgccactttaacaaatgtgccagaaaacttttgaaagaagcaatcgactccaaatcaaactcagaaactgctacggtggttctgcaagaaggattttctggcatttgcttattgaaagcgtcttcaattatattaaaactaaaattgaagtttccaaaaaagaaagatagaactgatattagcaaattgtgtgacaagaaagaacggatgacacagtggttagaaatttcaattttgatgaactga

SEQ ID NO: 1558 - DNA, 1392 bp, Saccharomyces cerevisiae
atgaaccgtattactaggaaaagttgtttattcgcgattatatttgcatcattatttgtgacacatgcattgggtgccgctattgatccgccaaggcgaccacataatgtgaagccttttcataacggtaatctcgaacttcaaagaagagcaaatgaaccgttttttgaaatagatgtcaagagtctgaacacaaactcaccgatatcagagttgtgtaaaaaagatttgcacgtcattgaatcgtctcatgatctttttcatttacaaaaccaatgtgaattcatcttggggtcattaaaagtcacaaactatgattctaacattttggatttgaacagcttgagggccattggtggtgacctgattattcaggattcacctgaactgatcagaatccaagccgggaacttgaataaaatcgaagggctcttccaattacagggactaacctctttggtttctgttgaaattccaactttgaaattttgtcagtcactggagtggaaagttgttcccatcttgaactacgtctccatggattctcagaatattgagattataaaggatattgtcatatcggatacttcattagcaaacatcgagaatttcaacaaggttcaggaaattgatactttcaatatcaataataacagatttttagaaactattcattcgaacgttaaaaccattaggggacaattcagtgtacatgcgaacgctaaggagctagaacttgaaatgccacacttgagagaagtggaaaacataacgattagggacacatcattggtctaccttccacaattaacaaaagtgaaaagctctttagagttcatcgaaaattacttttacgaattgaacctgaacaatttgcagaagattggtggaacattaggaattatcaacaatgtaaatttaataaaagttaatttggagaacttaacagacattcaaggtggcttgatgatcgccgataacgaatccctcgaggatattactttcctgccaaacttgaagcagattggaggtgctattttctttgaaggttcgttcaaagatatcatgttcgatagcttgaaactggtgaaaggtagcgcttttattaagagttcatcaaacgtgttggattgcaataaatggacaaacccatcaaatggaagatcaatcatcaggggtgggaaattcacttgtatttctggtaagaaggaaaatacgctgaatgttaaacaggatggtacaatcatagaaaaagggtacaaagatttaacgcaagaaggtgaagactccaagaaaagagtgatttcaaaatacgcgaactcagcaaatccaagcatgcaattggacccccttctttttggtacatgccttgttgctatgttattgttttaa

SEQ ID NO: 1559 - DNA, 1083 bp, Saccharomyces cerevisiae
atgtcgatagtctacaataaaacaccattattacgtcaattcttccccggaaaggcttctgcacaatttttcttgaaatatgaatgccttcaaccaagtggctccttcaaaagtagaggaatcggtaatctcatcatgaaaagtgccattcgaattcaaaaggacggtaaaagatctcctcaggttttcgctagttctggcggtaatgccggttttgctgctgcaacagcatgtcaaagactgtctctaccatgtacagtcgtggttcctacagcgacaaagaagagaatggtagataaaatcaggaacaccggtgcccaggttatcgtgagtggtgcctactggaaagaagcagatacttttttaaaaacaaatgtcatgaataaaatagactctcaggtcattgagcccatttatgttcatcccttcgataatccggatatttgggaaggacattcatctatgatagatgaaatagtacaagatttgaaatcgcaacatatttccgtgaataaggttaaaggcatagtatgcagcgttggtggaggtggtttatacaatggtattattcaaggtttggaaaggtatggtttagctgataggatccctattgtgggggtggaaacgaatggatgtcatgttttcaatacttctttgaaaataggccaaccagttcaattcaagaagataacaagtattgctacttctctaggaacggccgtgatctctaatcaaactttcgaatacgctcgcaaatacaacaccagatccgttgtaatagaggacaaagatgttattgaaacctgtcttaaatatacacatcaattcaatatggtgattgaaccggcatgtggcgccgcattgcatttgggttacaacactaagatcctagaaaatgcactgggctcaaaattagctgcggatgacattgtgataattattgcttgtggcggctcctctaatactataaaggacttggaagaagcgttggatagcatgagaaaaaaagacactcctgtaatagaagtcgctgacaatttcatatttccagaaaaaaatattgtgaatttaaaaagtgcttga

SEQ ID NO: 1560 - DNA, 528 bp, Saccharomyces cerevisiae
atgtttacttcgaagcctgctttcaaaattaagaacaaagcatccaaatcatacagaaacacagcggtttcaaaaaagctgaaagaaaaacgtctagctgagcatgtgaggccaagctgcttcaatattattcgaccactcaagaaagatatccagattcctgttccttcctctcgatttttaaataaaatccaaattcacaggatagcgtctggaagtcaaaatactcagtttcgacagttcaataagacatctataaaatcttcaaagaaatatttaaactcatttatggcttttagagcatattactcacagtttggctccggtgtaaaacaaaatgtcttgtcttctctgctcgctgaagaatggcacgcggacaaaatgcagcacggaatatgggactacttcgcgcaacagtataattttataaaccctggttttggttttgtagagtggttgacgaataattatgctgaagtacgtggtgacggatattgggaagatgtgtttgtacatttggccttatag

SEQ ID NO: 1561 - DNA, 237 bp, Saccharomyces cerevisiae
atgtcacagaacaacacaatcagctcaatgaatcctgaaagagcttacaacaatgtaacgctgaaaaatttaacagcatttcagttattatctcaaagagaaaacatatgcgagttattgaacttggtagaaagtacggaaagacacaatagtattatcaatcctgaaaggcaaaggatgagtttggaagaaatgaaaaaaatgctcgatgctttgaaaaatgaaaggaaaaagtag

SEQ ID NO: 1562 - DNA, 1476 bp, Saccharomyces cerevisiae
atgaagccacagtgcatactcatctctttgctggtcaacctcgcatacgcagaggagtatttggtgaggttcaaaaatcccacagcattccaacaattcacttcgaattccaacaggtcatggagacagttcatcgacaacaaaattgagaagaaattctccatcggatccttccgcggcgtgaccatgaacctgtccaagaacttagtgaacaagctgaagaaaagcccactggtggctgatattgtgcccaacttcaggttcgaagcttttgaaggcgacagtgtaaatagcgccgagtcgagttatacgtttaacgctaccgccaaatactcgtacgaagacgtcgaggaagagcaaaatataacgtatcaaccagacgcaccccgtcacttggcccggatttcccgccactaccaactcccattcgacgttggggacaaggaccgctacaaaagctggttcaattactactatgaacacgactatcaaggtcaagacgtcaacgcctatatcatggatacgggtatcttcgcggaccatccggaattcgaagacagagtcatccaggggattgacttgaccaaagaagggtttggcgaccagaatggccacggaacgcacgtggcgggactcgtaggttccaaaacgtatggagcggcaaagagggtcaatcttgtggaggtcaaagtcttgggcaaagacgggtctggcgaggccagtaacgttcttagtggtctggagttcatcgtggaacattgcacaaaggtcagtcgcccacagggtaaaaaatgcgtggccaatctaagtctagggagtttcaggagccccataatcaacatggcagtggagggggccattgaagaaggtattgtatttgttgccgcggcggggaacttcaatttagacgcctactgggcctcacctgcgtctgcagaaaacgttatcaccgtaggggcctttgatgaccacattgacacgattgccaagttcagcaattgggggccctgtgtaaacatctttgccccaggcgtggaaattgagtcgctatctcatctgaactacaacgacactttaattttgtcaggtacatctatgtcgacgcccattgtcaccggagttgcagcgatcctactctcgaagggaattgagcctgaaatgatagcacaggagattgagtatttgtccacgcgtaatgttttccatagaagaacgttgtttttcaagccttctacgccaaaccagattctttacaacggcgtcgataaactggacgatccatatgacgacgaaacgttccctcgattgaacatagaggcaattgctaaggaactggaggagtacaatgccactttacaaactcctatgtctgagaatcttcaatctggttcaaaactgtggggttggaataacgatgtcacactacctcttggtgagattcgattgaagaggcgtgattttatgaaaaatttgtag

SEQ ID NO: 1563 - DNA, 309 bp, Saccharomyces cerevisiae
atggtggcagttcataaggtcaggtacaacgtcataatgatactgggccctgaacagacaccaaacgaaaagacaacgttggacaactgcggtcttgcccgtagaaacttggtgttgctcaaagcagtccacacaaactgcgacagttggaacatgaacagatatcctctaacccttctgaaaatggcgaacatggccatttcgtggaacacggcactcaagaaaaaagtaaataatgtagcttggctcttgctcaaatgcaatgcgcccatggagctgtggtacacgtgtcttagtaaaaatttgtga

SEQ ID NO: 1564 - DNA, 2163 bp, Saccharomyces cerevisiae
atgactcagcaagaataccgttccccctcacaacgcttatccaaggggaggagcatgtcgctacccaaaatatttgctcgtaatttgagatctctgcaaaacaatgcacctcctggcaaaaacatcaatgtcaattgtttgaacgtcaattcttgttcgttgtccgcaagcccaagctcacaaattaatatggcttgtaatggaaacaagcaagatcttcccataccgtttcccctgcatgtagaatgcaacgatagctggtcaagctccaaacttaacaagttcaaatcaatgtttaatcataacagatcaaagagcagtggtactacagatgcgtcaacttcagaaaaaggtacgcataagcgtgaaccccggtcgacgatacatacagagctgttacaaagttccattatcggtgagccaaatgtccatagtactacaagtagcacacttatacccaatgaggcgatatgctccacacctaatgagatctcaggtagctcttctccggacgcggagttatttacctttgacatgcccacagacccgtcatccttccacactcctagctccccaagttatatagcaaaggacagtagaaacctgagtaatggatctttgaatgatattaacgaaaatgaagagctccaaaatttccatagaaaaatcagcgaaaatggcagtgcctcccccctggctaacttgtcattatccaattcaccaattgattccccaaggaaaaatagcgaaaccagaaaggatcaaatacctatgaacataacaccacgtttaaggagggccgcttccgaaccgttcaatacggcaaaggatgggttaatgcgggaagattacattgccttgaaacaacctccaagcttgggagatattgtagaaccgaggagatctcgtcgtttaagaaccaagtcattcggtaacaagttccaagacattactgtcgaacctcaatccttcgaaaaaattagactacttggccaaggtgacgtaggtaaagtgtatttagtgagggaacgcgataccaaccagatattcgccctgaaagttttgaataaacatgagatgatcaagaggaagaaaattaaacgagtactcactgaacaggaaattctcgcgacaagtgatcatccatttattgtgacactgtatcattcctttcaaaccaaagactatttgtatctctgtatggaatactgcatgggaggggaattctttagagccttacaaacaagaaaaagtaaatgcattgcagaagaagatgcgaagttttacgccagtgaagtagtagcagctttggaatatttacacctactgggcttcatatacagagatttgaaacccgaaaacatattactgcatcaatctggtcatgtcatgctttctgactttgatttatccatccaagcaacgggatcaaaaaaacccaccatgaaagactctacgtatttagatacaaaaatttgttcagatggattcagaactaattcctttgttggtactgaagagtatttagctccagaagtaatcagagggaatggccacactgcagcagtagactggtggactttaggaatattgatttacgagatgctatttggctgtactccatttaaaggagataattcaaatgaaacattctctaacattttaaccaaggacgtcaaatttccacatgataaggaagtttcgaagaattgtaaagacctgataaagaaactactaaacaaaaacgaggcaaaaaggcttggttccaaatcaggagctgcagacataaagagacatcccttcttcaaaaaagttcagtggtcgttcttaagaaaccaagacccccctctaatacctgcattaaatgataacggctgcgaacttccttttatattgtcttgcaataaacacccgaaaaggaactcagtgagtgaacaggaaaccaaaatgttctgtgagaaagttgcaaacgatgatgaaattgatgaggctgatccattccatgattttaattctatgagtttaacgaagaaagatcacaatatcttaacctactctgaaaattatacctacggaaaaattctatacaaagcaacttgtacaaggccaaggcataacagctcacatagaagtttctttaaagacatcatacctgaactataa

SEQ ID NO: 1565 - DNA, 3057 bp, Saccharomyces cerevisiae
atggcgggacaacccacaataagcaggtttttcaagaaggcggtaaaatcagagctgacgcataagcaagaacaagaagttgcggttggaaatggcgctggtagcgaatccatctgccttgacactgatgaagaggacaatttatcttctgttgcaagcacaacagtaactaatgatagctttccactcaaaggcagtgtttcttccaagaattcgaaaaattcagaaaagactagtggtacttcgacaacatttaatgatattgactttgctaagaaattggataggattatgaaaagacgaagtgatgaaaatgttgaggctgaagatgatgaggaagagggtgaggaagatttcgtaaaaaaaaaagccagaaagtcccctacagcgaaacttactcccttggacaaacaggtgaaggacctgaaaatgcatcatagagataaagtgcttgttattagagtaggctacaagtacaaatgttttgcagaggatgcagtaacggttagcagaatacttcacatcaaacttgtgcctggaaaattgactatcgatgagtctaatcctcaagattgcaatcataggcagtttgcgtactgttctttcccggatgtcagattaaacgttcacctagagagacttgtgcatcataatttaaaggttgccgtggtagagcaagcagaaacaagcgctattaagaagcatgatccaggtgccagcaaatcaagcgtttttgaaagaaagatttcaaatgtctttaccaaagctacatttggtgttaattccacctttgtccttagggggaaacgtattctcggtgatacaaacagtatatgggctttgtcccgtgacgtacatcagggaaaggtggctaaatattccttaatttctgtcaatttaaataacggggaagtcgtgtatgatgaatttgaagagcctaatcttgctgatgagaaactacagatacgaatcaaatatttacagcccatagaagtactggtaaatacagatgatcttccattacatgtagcgaaatttttcaaagatatttcatgtcctttaatacacaagcaggagtatgatttggaagatcatgtagttcaggcaataaaagtaatgaatgagaaaattcaactctcgccgtctctcatacgcttagtttctaagttatattcgcatatggttgagtacaataatgagcaggtgatgttgattccttctatctattcgcccttcgcatcaaaaatacatatgttacttgatcctaactccctgcaaagtttggacatttttacccatgatggtggtaaaggttctttgttttggttattggaccatacaaggacatcgtttggattaagaatgttgagagaatggattctcaaacctttggttgatgtacaccaaattgaagagcggcttgatgccattgagtgcattacatccgaaatcaacaacagtatattttttgaatcgttgaatcaaatgttgaatcatacccctgacttattaagaactttaaatcgcataatgtatggtacaacttctagaaaagaagtctatttctatttaaagcaaataacttctttcgttgatcacttcaagatgcatcaatcttacctgtcagaacatttcaagtcatcagatggaaggataggcaaacaatctcctttactttttagactatttagtgaattgaatgaactactttctaccactcagttgcctcattttttgaccatgatcaacgtttctgcggtaatggaaaaaaattcagataagcaagtaatggatttttttaatttaaataactatgattgttcagagggtataataaaaattcaaagggaaagcgaatcagtacggtcacagttaaaggaagaattggcagaaatacgaaaatatctcaaacgtccatatctaaattttagagatgaagttgattacttaatcgaagtgaaaaactcgcaaattaaggacttgccagatgattggataaaagttaacaatacgaagatggtcagtagatttaccactcccagaacccagaaactgactcaaaagctagaatattacaaggacttattaattcgggaatctgaactacagtataaagaattcttgaacaaaattacggcagaatatacagagctccgtaaaattacactcaatttggcgcagtatgactgtattttgtcgttagcagccacatcatgcaacgtaaattatgttagaccaacttttgtgaatggtcaacaagccataatcgcaaaaaatgcaagaaatccaattatcgagtcgctggatgttcattatgtaccaaatgatatcatgatgtccccagaaaacggtaaaatcaatattataacggggccgaatatgggtgggaaatcatcttatattagacaagtggcactgcttactataatggcacagatcggctcatttgtccccgcagaagagatcagattaagcatatttgaaaacgtactcactcgaatcggtgcgcacgatgatattataaacggtgattctacttttaaagtggaaatgcttgatatcctacacatcttgaaaaattgcaataaacggtctttactattattagacgaagtgggaagaggtactggcacgcacgatggtatagcaatttcttatgctttaataaagtatttttctgagttaagtgactgccccttgatattatttactacccattttcccatgctgggagaaatcaaatctccgttaataaggaattatcatatggattacgtggaagaacaaaaaactggcgaggactggatgagtgtaatttttctatataagttaaaaaagggattgacttataatagttatgggatgaatgtggcgaaattggcacgcctggacaaagatattataaatcgggcattcagtatttcagaagaattgcggaaggaatccattaacgaagacgcgttgaaattattcagctctttgaaaagaatattaaaaagtgataatataacagcaacggataaactcgcgaaattactatcattggatatccactga

SEQ ID NO: 1566 - DNA, 1089 bp, Saccharomyces cerevisiae
atgctggttccacctgctaactttgggattgctgaagaaggaatatatagatgttctaaagtggagacattaaatttatcctttctggaaactctcaatttaaagacagctatatttattggaggtcaagaaccatccaagtttttcaaagattttttcacaagatcatccataaaatggattgttttaaggatgtctgatttctcggctgcggcagttccggtaaaaagctcttctgtatctaacgcaaatttatattcgaataataacagtactctatcattacaggaagaaaagaaaaaatccactgcaaatgggtcacaaaattctactacaggggatcctgtaattcaggaggaattggcttaccacttgactgacaatgatgacttaatgctgattaagagcacgtgtttaaaaagaactttcaaaacattattgaatgtggataattataatgttttattggtagataagaccgcgttggtcattggtatacttcgaaaaattcagaaatggaatattgcatcaatcataaatgagtacagattattttctggtaagaatagaaattattttgcggaaacatttctagaaataattaacattgagatagaacaggagaaggataataagacaattgtggacaacaaagcaaaaaaattgccccttgagaataataggacgcattcgatagagtataaggccaattctggcaaacttattagagtaaatgaagatgacctttgcagagagccagaagtgcctcagcggcttttgacattaataaatcaaatcgaaaccaaagtgaaaaataataaagtattacaagtaagtggagttctaggagacgatttgaagaaaacctcttctgacctaggaatttttggccataggtatagattagcatttaataaaaaagaaaatggagattatggctattataaagcaaggggaaaagataacgtcaaaataaggataccctgtgattctgaattaccagattggttcaggtttcaacgagatttgtgggaaaaagaaaacgttccggaagagcatcacttttatagggaacatatttttacatag

SEQ ID NO: 1567 - DNA, 381 bp, Saccharomyces cerevisiae
atggatgatatttgtagtatggcggaaaacataaacagaactctgtttaacattctaggtactgagattgatgaaatcaatctcaatactaataatctttataattttataatggaaagtaatttgactaaagtagagcaacatacattacacaaaaatatttctaacaataggttagaaatataccaccacattaaaaaagagaagagcccaaagggaaaatcatcaatatcaccccaagcacgggcatttttagaacaggtttttagaagaaagcaaagccttaattccaaggaaaaagaagaagttgcaaagaaatgtggcattactccacttcaagtaagagtttggttcataaataaacgtatgagatctaaataa

SEQ ID NO: 1568 - DNA, 549 bp, Saccharomyces cerevisiae
atgatattacttcatgccatatatactctttgggtaattatactacttccgctactcaatgcagagaaatttgtcccaaaagtaacggaggctcctatagaaacatcatttaatctagtgagttttgatgattccaacacttctatcagattagatggttggggggttgtatggataagtttcgacgctggagaaaattgggaaacggtcaaagaaattgaagagcgcattttcagatttactgttgatcctttccatggacaggaaagaggtttcgcttttatatgtgaatcacccaaattctacattaccgacgaccgtggggagtcatggagggctttaactataccctcatcagaagaatatttagatggcgactgttttataactactcatcctagaaacaaagaacttcttattgcgaattgctatagctatatgatagacgcagacgttttatatgacccaagtgaaatttacttgagcaatgatgggaatccttttttaaaattaaaccttccttggaaaagaaaaaagacgacgatataa

SEQ ID NO: 1569 - DNA, 2499 bp, Saccharomyces cerevisiae
atggattcgattacagtaaaaaaacctcggttaagattggtttgcctgcaatgcaaaaagatcaaacggaaatgtgataaactgcggcctgcttgctcgcgatgccaacaaaattcattacagtgtgaatatgaagagagaacagatttatctgccaatgttgcagcaaacgactctgatggattcaattcctctcataagctcaatttcgaacagcaacctgtacttgaaaggactgggcttagatattccttacaagtgcctgaaggtgtcgttaatgctacgctgtcgatatggaacgccgaagatatgctagttatagtaggattagttacatttctggattatccttttgctgcgcatagtctggcgcaacatgaccagtatatcagggcactttgtgcttcgttgtacggcatggcgcttgttgactttagcaattatgctaatggtattccttgtgaagacacatcaagaagtatactaggaccattgtcattcatagaaaaggccatttttagacggatagaacatagtaagcaatttcgagttcagtctgccgccttagggttattatacaatgcattttcaatggaagaagaaaacttctcgactcttctaccgtcactcatcgctgaagtggaagacgtgttgatgcaaaaaaaagactgtgaaatacttttgaggtgtttctatcaaaatatttatcccttctatccttttatggacatttcactctttgagagcgatctcactagtttgcttttacaagacgacaataatcgttggaaaattagtactgaagttaaaaatgtgcgcaaaaaaatagaaactttgtcattacttacaatagtaatggccatggccttgatgcattcaaaattggatgcaaatcttctttcaatggtaaaagaaaatgcctccgaaagtgccaggaaactttctcttttatgtcataaactattatgcctcctggatgtatttcgctatccaaatgagaacacttttacttgccttttatatttctacgtttcagagcatttagatcccgagagtcccgattgtgtactgagccccactaacttgcttactctgcaccatcttttaaatttgtccatgaccttaggtcttcaatatgagccttcgaagtacaaacgtttcaaagatccagaagtgataaggcagagacggatattatggttaggagttcagtcattactttttcaaatttctcttgctgaaggtgatgctggtaaatcaaatagtgaatatatggaggcatatttaacagacttcgaagaatatattgaagcttcctcagagtatgaaaaaagttctgcgagtgaatcgaacgtgcaaatgaatgatattgtttggaataagtacaaatttcacgtcattttgagtaaactaatgtctgattgcacttcagttatacaacatccgcagcttttccacattttaggaaatattaaaagatctgaagattttatggctgagaactttcctacaagttcgatttaccaaccccttcatgaaaaggaaccaaatgcgatcaaagttggcaaaagtacggttctcgatgtcatggatattcaaaaaactgaaatatttcttacaaatattgtgggaagtatgtgttttttaaacatttttgatgtcctatcgttacattttgaaaaaaaatgtgttatgcactgggaagaatatgaaaagaactatcatttccttactttgaaaagtttcaatgcatacttaaagctagcagggttgatatctgattatctcgagaataagtttcaagggaacattttagagagtcgcggttatatcatagataaacaaatatgttttatgcttgtaaggatctggatgttccaatgtcgtattttgttaaggttttcatacaagcaagaaagtcagaaaaaattggcctcttccagtatatccactaacgataatgaaaaagaagatgaaatgattgtcattttagaaagacttattaaacacattcgtaaccaaatggcacatttagtggatctagcaaagggaaaacttcaagatagttactttggtgcttaccaaactgttcccatgtttagatacgttgtgtatttgatcgatgttggcggcttagtatctgtgacaaatgggttttgggataagatttccagtgatggtgaaataccgccaaaagtacaacaagccgtgagattgaaatggggattggactgcaataattcgagaagaatcaaacaaaagttaataagcagccagagtttgcagagtttcaatcaagttctgttgtgccagatggaggatgcagttctctccagttccttcgcaataaaagccaataccgctatgtcccaaaacacggctgaagaatttttcaatatcagcgaagaagaggctttaaatcaactattggaaaacaacaattttgatgccttctgggatttattaggtgaaaatctgagcgatatgccttctttgtga

SEQ ID NO: 1570 - DNA, 987 bp, Saccharomyces cerevisiae
atgagccaacagaatatactacattatgatatggatgttacttccgtatcatgggtcaaggataacacataccagattactattcatgtcaaagccgtaaaagatatccctttgaaatatttatggtctttaaagattattggtgtcaacggtccctcaagcaccgtacaactttacggcaaaaatgagaagacatacctaatcagtgatccaacagattttacatccacttttcaggtttatgcttacccttcttctgacggttgcacagtttggatgccaaatttccaaatccagttcgaatatctacaaggtgatgctgctcagtactggcaaacttggcaatgggggacaaccaccttcgatttatcgacaggttgtaacaattatgacaatcaaggccactcacaaacggatttccctggattttattggacctaccagtgcaagggaaacaatgatggcacttgtacaaaagcctcgtcttcatccattactacttcatccattactacttcatccactactacttcatccactactacttcatccactactacttcatcctctactacttcatcctctactacttcatcctctactacttcatcctctactacttcatcctctactacttcatcctctactacttcatcctctactacttcatcctctactacttcatcctctactacttcatcctctactacttcatcctctactacttcatcctctacgaaaacttccactactacgtcatctactgtgaaaagctcttccactacatccattgattttactacttccgttgactcacatacttcatcaagcgtagccgatatttatcgttcaagaacatctactgatgtcaccacattagcagcttcaactagtcctttcagcagtttcacttcaagtgactctagtagttcaagcgatgtaaccagttcaaccattcaaactacttctgttgatccaaccacttaa

SEQ ID NO: 1571 - DNA, 1209 bp, Saccharomyces cerevisiae
atgtctagtacagtaatatctagaaagaggagaaacagcactgttactgagcctgacagtagcggagaaacaagaaaacaaaagaagtcgagaagtgatgaaaagagctcatcttctaaggatggtgacccccagctagaatttaaagttttacagggatatagggacctggaaagtgaaatgcacaaaggcagagctcaggtgaccagaacaggagatataggtgttgctatggacaatctgaacgctgtggattccctattcaataaggttattggtataaagaataatggattgtttgctcatgatgctagagcaatggttagtataagtgaattggctcaaatttctgtgagaaatttgaagtttgatgattcgaggagtatggtcaatttagaaaacatagtaaattccttgaaaagatacatgctaaaagagcatttcaagcttaataatatcgccgaaaataggaatgatttgacgcttgccgctgatgaacaatccgcagcagaccagcaagaggaaagtgatggagatatcgataggacgcctgatgataatcatacagataaagctacttcctctttcaaagcgacatctatgaggcatagttatctacagcagttttctcactataatgagttttctcaatttaattggtttagaataggtgctctctacaatactataagtaaaaatgccccaattaccgaccatttaatgggacctttatccatagaaaagaagccacgagtgttaactcaacgaagaaggaataatgaccaagttggtgaaaagatcaccgctgagaaaatcactcagcattctttaaactccacacagcaagaaactacccctgaacaggtcaagaaatgtttcaaaaagctttcaaaaaaattaggcccagaaggttccattaatctttttaaatttattatagacccaaattcattctcgcgatccatcgaaaatcttttctataccagttttttgatcaaagagggaaaactattgatggaacacgatgaagaaggtttacccacaattaagataaaacaaagcataagtcacacagattcaagaagtaaagaaattgagagacaaaggcgtcgtgccgctcatcagaatcacattatttttcaaatggacatgcctacttggcgaaaactaataaagaaatacaacatcacttcaccattcttagactaa

SEQ ID NO: 1572 - DNA, 834 bp, Saccharomyces cerevisiae
atgcagtgtaacacaagtatagaagatggtttagatgggggcgacataactttcccatcctacagccctgaagcggaggctcaaaacagattcttaccaagaagtgagttcccctctgtgaggcaactcgtgatttcgaaacaaaaaagcagaagaagaagagaagaaaatgtatttgtgggaaaaatggaggacgtacttgtaaaatggaggccacctgcatcttcacatcgtggcgcaattgaagctattaatggcacgcatccatatcagcttagcacagcacaattcaactcgagaagatcggatccatttggttcaacaaagagagatgaatccgtgcgttccattgtagaatcgtttaccgattggtggaaacgcaattccaaaatgttttttcgtgacgaggaagaaggtgtacgaaccgaacacagtgcgagtcaagatgaccaagagttgcagcttttcgaagaagatctcttctcatttcacctaagcccaaatgatatgtcaaccaggaacagcgaacatcaagtgcaaacaccggtgcttttcccgtacgaagctcctactcgaacaaaacaaaacccagcagaaagaaaagtcattgaaattggggacggcgaagaactctctatctatcgagatgtttattccaatcctattcctgtcagctacctagataccttaaacttgaaccactccatgtctgtacggcaaacacaacagcaacaacaacagcggcaacagcagcagtatgtagactcttcatcggcatttcaatgctgtacagactccaattgggcgagaatatttttttgccaccacgattag

SEQ ID NO: 1573 - DNA, 699 bp, Saccharomyces cerevisiae
atggacagaaaagctgtcgaagaaaaaagaattgttatttctatcggtggagggcatgctactggtgttggagcaattgcactggatttacaaaatactttcaaaagcctatataactctatcaatataagggtaataaacctagataatatgatagaagggaacatcaagagctacaataataacgactatgattttgataatatccttaatttggtatatgaaaagcacgctgtaacttctcaaaatgacatgattcaacatgattacgaggacccgatagatttgataatagtatgtggctgttatgcgctatacgataaacgcatcaacgaaatatctcaattaaaagtattcttggatagtgatgcagataaaagattaattagtctaatcaagaagaagaacgtagggagcaatgaacaactagcccagttgatcactgagtatatggaccatctgcgcccggagatgcaacaatatatagagcccactagaacttttgcagatttgatcattccttctacaaatgaaaatctagggcgcgcagtcctcgtggacggtatagttaaagcaatcgaagataccaaaagccaaatagaaggcaacaatacgaacaacaaaatacgcccacgtttatgggatttcgaagctgaaacaatggacttggagaaagatagatattacgatctgtcatga

SEQ ID NO: 1574 - DNA, 2373 bp, Saccharomyces cerevisiae
atgttcgaatctgtcaatttggatgaaaattctccagaggatagagaactggctaaggttttgtccccaccgggtagttatctttctccagcttcactagacagtggttcatcgttcacaaatagtgggacttcaactagttgctttgaaccaaaaaacaatctaccctccttatcgtttttaaatgctagagcgggatctttaggtggcatttttaatcataaacagatgacctcgccgtcaaattcgaatataggaggcgaaaatgtagaatcgaccacaagtagtaatgacggcagtaatgaaaatgcaggtcatcccactacttcagagcaagatcaaaatgcagatcaccccactatttcacaggcagatgataatggacactcatcgttgacccctaatcctgctgtaacttcaactgttacggataagaagggaaatacagtaaaacggaagtactccagaaatgggtgctccgagtgtaagagacgaagaatgaaatgtgatgaaactaaaccgacttgttggcagtgcgcaagattgaatcgtcagtgcgtttacgttttaaacccaaaaaataagaaaagaagaacctcaaatgctcaaagagtaaaagaatttaggaagcacagtactagcctcgataatgatcataataatgctcgcaagcgtcagcattcgtcatgcaaggctgagaagaagaaaaaagtacgacaaaatttaagtgaagacaccacggaccctaaaccgattacagataacggcaagaatgtacctttggatgaaatagaatccctagagattccaaatttggaccttaccaccacaatgaatggatatgacgttaatttactaatgcagaacttgaatgatatggttaatatgaaacttcatgactcttacttattgaatgaagaactgaaaggattagatttgcccgatttggacatacctgaacttttgcccgcttcgaatgtgaacagtagcgtaccaatatcctttctggtgaataatgtaataactttcaacacaaaactaagctcgttcaaactaggtggaatccacgataagtatctaaagatattttactacgattgcttagattctattgcgccctttttccaaaatcaagggaacccgttaagagatatcttactttcatttgcgaaaaacgaggcctatcttttatcttccatattagctacgggagcatctatagcatatagaaagtctaataacttggaagatgaacgaaactattgtgcttatttgtcacattgcctgagcctgttgggtgaacaattcaagaatgagtcaaacgttttaaataggatagagcctatcatcctgacggtcatcatgcttgcatgggattgtatttattcaatgaattctcaatggaggtctcacttaaaaggtgtaactgacctttttaaaaaaatcaatgccgggaattcctccaaagtacttaacgttgcaaaatgttggtttaaagttatggaaacattcgccagtataagtacggtatttggcggatctttaattgataataatgaccttgatgcaatttttgatccatatgattaccaatatgttgactcgttaaaatttttaaatattatgactccactaaatgagtttaatcttttaagaggacataaagaagatttcgatcttgttattaaagaagttttcaaatcactcaatacaattaggtcaactgaaaaaaattacttttctaaagaagaaggtttgttcactaagaaattagactatctgcttttatcatcccaaacttcgtccgaaaagtccaaagaccagatatcatatttcaatacgcagaaaattctagtggaaattgacaagcaattagattacgaatttattgacaaatctggaattataccctcagacaatcagtcacaccctagaattagtaatattcatgataatgccatcgatatggtgacattaaagaacggtgaagaagttgccatcagctggtatgatatttctcatcagacacaagttttatctttcttattaattgtattattaaaacttttaggtatgccaaaagagtcaagtaccattcaacaagtggtcaagaaaatcatgtctttcttcaaattcttagacagtgactcgccgccacaaaattcaaggacttgttatagtaattttgctgtattgattgcaggtttgaatgcaatggacgaggaaacaagagcgattgttaaaagatattataaaatcaatggtggaaaatttcaaaagctcacagaacataatcttaacagactggaaaaggtctggtatggtaaaaatcaaaattacaggttagaagaacaagacgttttaacatggtag

SEQ ID NO: 1575 - DNA, 3276 bp, Saccharomyces cerevisiae
atgagcgagggaactgtcaaagaaaacaataatgaagaattcaatgcttatcacacattgactacagaagaagccgctgaatttataggcacaagtctgactgaaggtcttactcaagatgagtccctccgcagactgaaagcagtgggagagaacacattgggtgatgataccaaaattgactataaagcaatggtcctccatcaggtatgtaatgcaatgattatggtcttggtaatatccatggcgatctctttcgctgtgcgcgactggattactggtggcgttatttcttttgttatcgcggtcaatgtgctcattggcctagttcaagaatataaggctaccaagacaatgaactctttgaaaaacttgagctctcccaatgctcatgttattaggaacgggaaaagtgagactataaactcaaaagatgtggttccaggtgatatttgtctggtgaaggtcggtgatactattcctgctgatttgcgtttaattgaaactaagaattttgatactgatgaatcactactgaccggtgaatctttgcctgtctccaaagacgccaacttagtgtttggaaaagaagaagaaacctccgtgggtgatcgtttgaatttagcattttcttcatccgccgttgtcaagggaagagccaagggtattgtcatcaagacagctttgaatagtgaaattggtaaaattgcaaaatctctacaaggtgattcaggtctcatttcccgcgatcctagtaagtcgtggttacagaatacatggatatctacaaagaaagttactggtgcatttttaggtacaaatgtcggtacgcccctgcacaggaaactgtctaagttggcggtattgcttttctggattgccgtactttttgctatcatcgtcatggcctctcaaaagtttgacgtagataaaagggtagctatctatgccatttgtgtggccctatccatgattccctcttcattagtcgttgtcttgaccatcaccatgtctgttggggctgctgttatggtttctagaaacgttattgtaagaaaattagattctctggaagctttaggtgccgttaacgatatctgttctgacaagaccggtactcttacacagggtaaaatgttagcgaggcaaatttggatccctcgctttggtaccataactatctcgaattctgatgacccctttaatcccaatgagggcaacgtgagtttgattccaaggttttcaccttacgaatattctcataatgaggatggtgacgttggtattctccagaatttcaaggatcgcctatacgaaaaagatttaccagaagatattgacatggatctatttcaaaaatggctcgaaaccgccactttggctaacattgctactgttttcaaagatgacgcaactgactgttggaaagctcatggtgacccaacagaaattgcgattcaagtgtttgctactaagatggacttgcctcacaatgcccttaccggtgagaaatcgactaatcaaagtaatgagaatgaccaatcctctctttcacaacacaatgagaagcctggcagtgcacaattcgaacatattgctgaattcccattcgactcaactgtgaagcgaatgtcatctgtctactacaacaatcacaacgaaacatataatatttatggcaagggtgctttcgaaagcatcatcagttgttgcagttcttggtatggtaaggatggtgtaaaaatcacaccattgaccgattgtgatgtcgaaacgataaggaaaaatgtttacagtctatcaaatgagggtttaagagtcttgggttttgcctccaaatctttcactaaagatcaagtgaatgacgatcaattgaaaaacattacttcaaacagggccaccgcagaaagtgatttagttttcctagggttgattggtatttacgatccacccagaaatgagactgccggtgcagtcaagaagtttcaccaagctggtattaacgttcatatgttaactggggactttgtgggtacagcaaaggctatcgctcaggaggttggcatcttacccaccaatttgtaccattactcccaagagattgttgacagtatggtcatgaccggatctcagtttgacggactaagtgaggaggaagtggacgatttgcccgtcttacctttagttattgcacgttgctctccgcagactaaggtgagaatgatcgaagctttacaccgtaggaagaagttctgcgcaatgacaggtgacggtgttaacgattctccatctctaaaaatggccaatgttggtattgcaatgggtattaatggttcagatgtttccaaagaagcgtctgatattgttctaagcgatgacaattttgcttctattttgaatgctgtcgaagaaggtcgtaggatgacggataacattcagaagtttgtcctacaattattggcagaaaatgttgctcaggctttgtatttgatcattggtttagtattcagagatgagaacggaaaatcagtatttcccttatcaccagtggaagtattgtggattattgtcgtcacctcttgttttcctgctatggggctaggtctagaaaaggctgctccagatttgatggatagacctcctaatgattcagaggttggtattttcacatgggaggttattatagatacatttgcatatgggattataatgacagggtcctgtatggcttcatttactggatcactgtatggaataaatagtggtagattggggcacgattgtgatggcacctataacagcagttgtcgtgatgtttatagatcacgttctgcggctttcgcaactatgacgtggtgcgctttgattctggcttgggaagtggttgacatgagaagatcttttttcagaatgcatccagacactgacagcccagtcaaggaatttttcagaagtatttggggaaaccagtttttgttctggtcaatcatttttggatttgtgtcagccttccccgtcgtctatattccggttattaatgataaagtgtttttgcataaaccaattggtgctgaatggggtctcgccattgcattcacaattgcattctggataggtgctgaactttacaagtgtggaaagaggcgctatttcaaaactcagagagctcacaattcggaaaacgatttggagcgaagcagtaaacacgatccatttgaagcgtatagcacatccacaacccttcaaagcgaaattaatatcagtgtcaagcattaa

SEQ ID NO: 1576 - DNA, 3276 bp, Saccharomyces cerevisiae
atgagcgagggaactgtcaaagaaaacaataatgaagaattcaatgcttatcacacattgactacagaagaagccgctgaatttataggcacaagtctgactgaaggtcttactcaagatgagtccctccgcagactgaaagcagtgggagagaacacattgggtgatgataccaaaattgactataaagcaatggtcctccatcaggtatgtaatgcaatgattatggtcttggtaatatccatggcgatctctttcgctgtgcgcgactggattactggtggcgttatttcttttgttatcgcggtcaatgtgctcattggcctagttcaagaatataaggctaccaagacaatgaactctttgaaaaacttgagctctcccaatgctcatgttattaggaacgggaaaagtgagactataaactcaaaagatgtggttccaggtgatatttgtctggtgaaggtcggtgatactattcctgctgatttgcgtttaattgaaactaagaattttgatactgatgaatcactactgaccggtgaatctttgcctgtctccaaagacgccaacttagtgtttggaaaagaagaagaaacctccgtgggtgatcgtttgaatttagcattttcttcatccgccgttgtcaagggaagagccaagggtattgtcatcaagacagctttgaatagtgaaattggtaaaattgcaaaatctctacaaggtgattcaggtctcatttcccgcgatcctagtaagtcgtggttacagaatacatggatatctacaaagaaagttactggtgcatttttaggtacaaatgtcggtacgcccctgcacaggaaactgtctaagttggcggtattgcttttctggattgccgtactttttgctatcatcgtcatggcctctcaaaagtttgacgtagataaaagggtagctatctatgccatttgtgtggccctatccatgattccctcttcattagtcgttgtcttgaccatcaccatgtctgttggggctgctgttatggtttctagaaacgttattgtaagaaaattagattctctggaagctttaggtgccgttaacgatatctgttctgacaagaccggtactcttacacagggtaaaatgttagcgaggcaaatttggatccctcgctttggtaccataactatctcgaattctgatgacccctttaatcccaatgagggcaacgtgagtttgattccaaggttttcaccttacgaatattctcataatgaggatggtgacgttggtattctccagaatttcaaggatcgcctatacgaaaaagatttaccagaagatattgacatggatctatttcaaaaatggctcgaaaccgccactttggctaacattgctactgttttcaaagatgacgcaactgactgttggaaagctcatggtgacccaacagaaattgcgattcaagtgtttgctactaagatggacttgcctcacaatgcccttaccggtgagaaatcgactaatcaaagtaatgagaatgaccaatcctctctttcacaacacaatgagaagcctggcagtgcacaattcgaacatattgctgaattcccattcgactcaactgtgaagcgaatgtcatctgtctactacaacaatcacaacgaaacatataatatttatggcaagggtgctttcgaaagcatcatcagttgttgcagttcttggtatggtaaggatggtgtaaaaatcacaccattgaccgattgtgatgtcgaaacgataaggaaaaatgtttacagtctatcaaatgagggtttaagagtcttgggttttgcctccaaatctttcactaaagatcaagtgaatgacgatcaattgaaaaacattacttcaaacagggccaccgcagaaagtgatttagttttcctagggttgattggtatttacgatccacccagaaatgagactgccggtgcagtcaagaagtttcaccaagctggtattaacgttcatatgttaactggggactttgtgggtacagcaaaggctatcgctcaggaggttggcatcttacccaccaatttgtaccattactcccaagagattgttgacagtatggtcatgaccggatctcagtttgacggactaagtgaggaggaagtggacgatttgcccgtcttacctttagttattgcacgttgctctccgcagactaaggtgagaatgatcgaagctttacaccgtaggaagaagttctgcgcaatgacaggtgacggtgttaacgattctccatctctaaaaatggccaatgttggtattgcaatgggtattaatggttcagatgtttccaaagaagcgtctgatattgttctaagcgatgacaattttgcttctattttgaatgctgtcgaagaaggtcgtaggatgacggataacattcagaagtttgtcctacaattattggcagaaaatgttgctcaggctttgtatttgatcattggtttagtattcagagatgagaacggaaaatcagtatttcccttatcaccagtggaagtattgtggattattgtcgtcacctcttgttttcctgctatggggctaggtctagaaaaggctgctccagatttgatggatagacctcctcatgattcagaggttggtattttcacgtgggaggttattatagatacatttgcatatgggattataatgacagggtcctgtatggcttcatttactggatcactgtatggaataaatagtggtagattggggcacgattgtgatggcacctataacagcagttgtcgtgatgtttatagatcacgttctgcggctttcgcaaccatgacgtggtgcgctttgattctggcttgggaagtggttgacatgagaagatcctttttcagaatgcatccagacactgacagcccagtcaaggaatttttcagaagtatttggggaaaccagtttttgttctggtcaatcatttttggatttgtgtcagccttccccgtcgtctatattccggttattaatgataaagtgtttttgcataaaccaattggtgctgaatggggtctcgccattgcattcacaattgcattctggataggtgctgaactttacaagtgtggaaagaggcgctatttcaaaactcagagagcgcacaacccggagaatgatttggagagtaacaataagcgcgatccattcgaagcgtatagtacttctactacaatccatacagaagttaatattggtattaaacaatga

SEQ ID NO: 1577 - DNA, 603 bp, Saccharomyces cerevisiae
atggagcaaatattatataatcaaagccttaaaatttctaccctttctacttttcaaggtttaaagtttctaaaggtcctcattttttctattttccaacaactattttataacccagttatacaattattcggaacgaaagcctcaataatggaatctgattccactactctgctcgaaagtagttggagtactgagcgaaactttctcaatatgaattcagattccatatctgctaccaagaatgtttttatattattttttaccattttcagattagcggagtatattgtatacaaactctctgaccagaagtatcggttacacacatccctgaatgtccaacatttcaggtggaattcgaagaagaatacaaacagaaaaaggacactttcctttagcaaagcttacttaccaagaacaaatatactaccgatttttgtagccgatggactaaaaaatagattctcaggcccgctacctggtaagtccttggaaagcttccagaaactaaatttattgagcgataacaatattaagcggtatgcagtaccaggaaacaaagcagtgaacacacttttatggcaagagcaatactcataa

SEQ ID NO: 1578 - DNA, 855 bp, Saccharomyces cerevisiae
atgtcgaatactattgtgatagtctatttgggagctaacagaatcgaaattggaagaagtgctgatgcgtgtccacaagaaattatcgcctggaaaacaggtagtattaatgaaaaaaatagggaagaattgaaaaaaatatttgaacattacttccaaatttgcaacatcttgggaaatcgagaagtacaagtgttgatactagaagatatcttcatttctgtagtagagaaaagaattatttgtagcatcttgtttaaggaatttgactgcgctcacgtttcgtttgtccccagggccattgtgcactgcttatcctgtaatacaaggaatgccatagttatagatataggtaccaattatactacatgcgtacctattttcgaccttagacctttgcaacagttcataaaatactcaaaacgaggcaaaagacaggttgagtcaagaattcctctcccgggcagtctctacatgccaatattttttgacgaagaatacaactctaaaaattgtgaagtagatgaaaccccggtaataaatcttgtcaaaaatattgtagagtcacttcctatcgacttgagaaggccactgagagaaaatatcattatagtaaacattgaagaggcgtatgaaacagtaataaggaatttattcaagttaaaaatggatacgtccaaaatccagtttcctaaaaattactggcaggctggttctgcatgcgcgaaaatacttctgcactataaggggagcaacattgtaggaatagaaagagatgagttttataacaatcctcatattgctcctgattggtttgattattacttcagaactggagtgaagcgcttacaatag

SEQ ID NO: 1579 - DNA, 303 bp, Saccharomyces cerevisiae
atgaaaacattcttcttgattgaggctggcagagccttgcaaatagtggcattccgtcctgcgattactactgttctattccaacgtttctcagtgagtttctcctgtagttatttcacttgttgtacctcacagcttctacgggaaaattggcttttcaaattccttacagctttcgatcacgtgatccgagcttcaaatgacctttcgacgatgcgtttcatgattatgtatatatatgtatatatatatatctatacagtcttaaggaagcgcttaagttgttacatgttaatactttag

SEQ ID NO: 1580 - DNA, 1362 bp, Saccharomyces cerevisiae
atgcttttaataaagaggtacttgatggaccctgaaagtttaaggaggcagataatgaatgtatataaatgttacatgtggaagagagcgttccacagtaatagaagcctactggaagttaaacgtcgtgaaaagagtctccagagaaaaattttggaaaggattcttagacccaaggaggaaaatgctgtcaaaaaatctggattcaagctatggtcaagccatttgaataacccacacaaaacttatatgcggctggaggaattacagagacgtattatggaagaggtacacgttgaaggtattaaaaagaatgataagttattcaacgaaataaatcaatggcatttccaaaatgaaaacacaagtactgttcgaacaccaacattgctgatacatggctatgccgcatcttcaatgtcttttttcagaaattatccaggtctgtccaagcacatccgaaatttatactcaattgacatgccagcgagcggattgtcttcagtaccgtctttagagatcaatacaacaacacctctgccgttagatatcaaatttattggagaaaataaatttaaggttccatatacaataaatgcaaatcacaataaatttgtgattcaaatgtacgaagatttctatctcgacagaatcgagcaatggcgcattgataacaaattgggcaaaatgaatgttgtggggcattcttttggcggatatttatcttttaaatatgctgttaaatatccaaactcggtaaacaaactttgcttggtatccccactaggagtggaaaggaatatctggtctgtaaataataatttccactccaacactctttatactatcgattttaaaaatccaaattccaagttttactccaaaagaaatatgattccaaaatacttatttgaacaacaatttcacattttgagaatgatgggaccattaggagctaagttatgttggaattacataatggcggcatatagccgagtcccatcgttggcatacaaagagtacatatttgaactgttttacggtaagggaggtataccggaggttacgacagatattttcaaagcgttattttcaagatgtatcctagcaaaggaccccttgatggattctctgcaatatttaaatgttaagaaattattgatagtatatgggcaatatgattggatgaataaaaaagccggtatgttcatggtcaaagagttgaacaatttaaagaactgtctagaaggagcaagttatttagaaataccttcttccggtcacaatctttttttagataacccagaatcattcaaccaatctatagtgtccttcttatcagacgaaactaaatcgccttga

SEQ ID NO: 1581 - DNA, 1671 bp, Saccharomyces cerevisiae
atgtttgataagttaccttatgagatttttaaacaaattgcctggagaattccgcaggaagataaaatttcgttaacatatgtatgcaaaagatcctatgaatcaattatacctttcatctaccagaatttatttcttaatgaaacctatcacatcaatggtgactatgataactcatttggaacctgttattggtctgtcctaaactttcactacatagatgaagatgattccaatactaaaaacgacatgtcgaatagaagactagctaaagtgaaatttagttatttcgaaagaacattagcagagtcaccgaaaagattatgtcccttaattaatcgaatacgttgtacatggcatttaaatgaagatgtgatgacaaatgtacttaaattgctatccgagtatggatccaatttgaaatttgtcgatcaatttgttcgctcatcagttaacaaggggctagaacctttatcaaagcaattaaaaactctaacattaacgccaccaacgttaatgcccacccataacagtgtaagcggttcttatttgaataaaattgatcggttgctcttgaagtgcgatctatctcgattagaaaaactttccattcatataaacgcattgaagtacttcaaaaataccgggtctcctatgaagatcaaagcattggtattaaatttgcgacccgacacacttaaccttgcggagtacgacgcttccgatgacttcttaaaagagctagaatacatcgacatatttgatgcttccaccttaaggcagctagagattttgtcttggtacagtcgcgacgattttccctctggcgaagaaggtggttttgacaggttatatgtcaaatgggggctagaaggattttggaaatttccgaacattgagaaactatcattagcgtcattggtttacagcgaattttttctaatgaattgtttggctgtgtttcacaatttaaagatactgaaacttgattacatgggtaaatttgacttcgatgtgtcgttgattaacttcttatctaaacaagtgtgtggcaaaaaattacagcgttttgacatacactgccaactaaatcacaggcttttttttcccatgacagataacccactaactcgcttgaatttcgatggtttctgcccttgttcaacttgcaaaaatacaattcacgaggtcattctaaaaaaaatctttcctgaaacccggtcaaaacttttaaagaacccaaataagttccaagcccataatttcttttaccaaatgtttttcgagaacaagatcatgccctatacaaacattattgacaacgaatcacctgcgatgggatgggattctgtacctattgaaacgtttgtacgaaagttcaatgaaaatctgcaaagcaccatagaaaatactgagaatattacagtgaataaaattactagagaagatgccattagtttgtaccacttataccttcattatctaaaagacgtatttaaagtttttgagcaaagtttgccgaacttagaatatctaaccatcaacggtatacctacaaaaataatacaagtggacgagttacaacgatgcgcggttcccctcttctataataatggctataaaagcaactctgtttatgaattggtggacgcagaagctctatttagttga

SEQ ID NO: 1582 - DNA, 3930 bp, Saccharomyces cerevisiae
atgtcaggccagttagttcaatggaaaagctctccagatcgagtcacccaaagcgctataaaggaagcactgcattctcccttggctgatggcgacatgaacgaaatgaatgttcccgttgatccgttggaaaacaaggtaaatagcacaaacataatcgaaggaagtcccaaagcaaatccaaatcctgtcaagtttatgaatacaagtgagatatttcaaaaatctctgggattacttgacgagagtccaagacatgatgatgagttaaatattgaagtaggagataatgatcgaccaaatgctaacatattgcataatgaaaggactcctgaccttgaccgaattgctaactttttcaaaagcaatcgaacccctggtaaagaaaatcttttgaccaaatatcaaagctccgatctggaagacactcctctgatgttaagaaaaaaaatgacttttcaaactccaactgatccattggaacagaaaaccttcaaaaagttgaagtcagatactgggttttgctattatggagagcagaatgatggagaagaaaatgcgtcattagaagttacagaggcggatgccacttttgtacagatggctgaacgttctgctgataattatgactgtgcattggaaggaattgttacacctaaaagatataaagacgaattaagtaaaagtggaggaatgcaagatgaacgagttcaaaaaactcaaatcatgatatcagcagaatcacctaattcgataagctcttatgacaagaacaaaattaccgggaatggccggaccacaagaaatgtaaacaaggtttttaacaataacgaagataacataggagctatcgaggaaaaaaatccagtaaaaaagaaaagtgagaactattcatcagatgatctcagagaacggaacaatcaaataatacaaagtaatgaatcagaggagattaacgaattggaaaagaatctgaatgtttcgggtagagagaatgacgtgaacaatttagatatcgatattaatagtgctgtgtctggcaccccttcacgcaacaatgcggaagaagaaatgtattccagtgagagtgtaaacaatcgggaaccatccaagaagtggatattccgatactcaaaagacaaaacggaaaataatagcaatagatctacgcaaatagtcaataatccaagaacacaggaaatgcctttagatagtatttcaatcgatacgcaacccttatctaaaagtttcaataccgaaacaaataatgaattagagacacagataattgtttcatcgctttcccaaggcatatctgctcagaagggacctgtttttcattctactggccagacagaagaaataaaaacccaaataataaattctcctgaacaaaatgctttgaatgcaacctttgaaactcccgttactctttctcggattaattttgaacccatattggaagttcctgagactagttcaccatctaagaatacgatgtcaaaaccctcgaattcttcacctattccgaaggaaaaagatacatttaatatacacgagagagaagtagagacaaacaatgttttttcaaacgatatacaaaattcttcaaatgcagctaccagagatgacattatcatagccggttcatctgatttcaacgaacaaaaggaaataaccgatagaatatacttacaactttcaggaaagcaaatatctgattcaggaagtgatgaaacagaacgtatgtccccaaatgagcttgatacgaaaaaggaaagtacaatcatgagcgaggttgaactaacccaagaactgcctgaagttgaagagcagcaagatcttcaaacgtctccaaaaaagctggtagtcgaggaagaaactttaatggagataaaaaaaagcaaggggaactcacttcagcttcatgatgataataaagaatgcaattcagataaacaagatggcacagagtctttggatgtagctttgattgaacacgaaagcaaaggacagagctcagaacttcagaaaaacctcatgcaattatttccaagtgagtcacaggagattattcagaaccgaagaacaataaagcgacgtcaaaaagatacaatagagatcggtgaagaggaggagaacagaagcactaagacatcaccgacaaaacacctcaaaagaaattcagatttggatgctgcttctatcaaaagggaaccgtcttgcagcattaccatacaaacaggggagacaggttcgggcaaagactctaaagaacagtcttacgtgtttcctgaaggtattagaacggcagataatagtttcttatcgaaagacgacataatttttggaaatgcggtatggtgtcagtatacgtggaattacaaattttatccgggtattttattggaagttgacactaatcaagatggctgttggatttatttcgaaacaggaagatcgctaaccaaagatgaggacatctactacttagatattagaataggggatgctgttacctttgatggaaatgagtacgtagtcgttggtctagaatgtcgtagccatgatctcaacataataagatgtattcgaggatatgatacggttcatttgaaaaaaaaaaatgcaagcggattgttggggaaaaggacgttaattaaagcactaagctcgatcagtcttgacctaagcgagtgggctaaaagagcgaagatcatattagaagataatgagaaaaataaaggcgacgcgtataggtacttgagacatcccattaggggaaggaaatcaatgaccaatgttctgtctccgaagaaacatactgatgacgaaaaggacataaatacgcatactgaagtgtacaataacgaaatagaatcgagctccgaaaagaaggaaattgttaaaaaggattctagagacgcattagctgaacatgcaggagcgccaagcctgcttttttcttctggtgaaatcagaacagggaatgtatttgataaatgtatttttgttttgacaagcctattcgaaaatagagaggaacttcgacagaccattgaatcgcaaggcggcactgtaattgagtcaggattttccactttatttaacttcactcatccgctagctaaatctttagtcaataaaggtaatacagataatattcgagaattggccttgaagctagcctggaaacctcattccctatttgcagactgcagatttgcttgcctaatcacaaaacggcatttaagaagcttaaagtacttagaaactttggcgttggggtggcctacactacactggaaattcataagtgcatgcattgaaaagaaaagaatagtaccacatttaatataccaatacctattaccttcgggtgaaagttttcggttatcgttagattctccatcaaagggaggaatcattaaatccaacaatattttttcattttatacacaattcttacgcggatctaatttaagagatcagatatgtggagtgaagaaaatgttaaatgactacattgttattgtttggggtagatctgagttggacagttttgtcaaatttgcttttgcatgtttgagcgcaggtagaatgcttacaattgatttacccaatattgatgtagatgatacagagccattgttaaatgccttagattctttagtacccagaataggatcagaattatctaatcgaaagttaaagtttctcatatatgctaacgaaaataatggtaaatctcagatgaagcttctcgaaagattgagaagtcaaatatcactgaaatttaagaaatttaattacatatttcacactgaatctaaagaatggctaattcagacaataattaacgaggacactggttttcacgatgatattacggacaatgatatatacaacactatttctgaggttagatga

SEQ ID NO: 1583 - DNA, 1272 bp, Saccharomyces cerevisiae
atgttcccaatgaaagatcactcagctcttgaacaacatactctcagcagagatgagttaagacgtcgcaagggttacaagaaaggactgcagttgtcaattttgttacttggagaaaaaggcagcggcaaatcaacgtttttaaacaatctgtgcggtcaggatatatcgctttctgatggggattatgatgatgatgatgataaagtgacaaataatgtaacaccagaaaatggaaacgccatcgaagatatagatcctggatataaaacagcccatttgagtcctgggctgaagcttgtcaccagaagagtgtatttgaacgatgaactaggcgtacccataacattagatatcatattgtttccaggctgcggtgacaatgtcgacaattcacaaagctctgttgttataaaaaactacttagaccaacagtttgcaaatgttttaaaagaagaggtcagaataaagagaaacacaaaagaaactgatgggaggcctcatgtttgtttatactttctgaagagtactccaagaggagtcaaaaaatttgatattgagttaatgaaaacgatttgtgataaagttaatttaattcccattattccaaaagccgatggtctcacagaaactgaattaaatttacacaaagacattgtgcgccaagaaatctctcagaacaatatacgtgtttttgattttaaaagtgacaccctaggcgaaacattagctctgtacgatatggacatcgattccagttcagcaaaatccaaatacgataatgacacgaagatcaaggaaatatcgccatttgccattgtttgcagcaaaacttttaataaaaattcggaaaatagggttgagcatatcagaacgtacgaatggggtagcttggtggtcgaagaccaaaacacctccgattttatatacttaaaagcaatactgttaggttctcaccttcaggaattaaaagatgtaacaaacaacgtattgtatgaaaattatagggctaaagtgttaactgagaagaaaaacaactatgatattccaaactatagctatatcgacgaaacctcaaggggaagtgtcagcaatgtttccaccagaagaaatagtgcaagtagaacacttgggaatccagatacaaacgatgaaaatgcttatcaaatacacaaagaaatagacgaaaaaaacagaattattgaagactatcaaaggaagattgatttattggagaaaatgttggcagctccccatcaaaataaggtctaa

SEQ ID NO: 1584 - DNA, 1479 bp, Saccharomyces cerevisiae
atgcgcccaagaaggagaggattagcgtatcatcataccaagccgaagggacaactttcacaaggacattatcctacgacatccaatgatggccaaagaaggaaggtcggtaattctgaagcattccaatcttttgatatatggaaaaacctagataggataaggtcgactaagaagaatgcagggcaattcataaaaggtagtctgctcatactccccatgagaacggaagataaacaacagttcgacgagtgcatggatgaattgcataagtatatatcgaaggatatattacgatgttatccacagaaagagcagaaagatgaaggcatgcttttctacatagttttgaaggacttcaatatattggactcttgcttcgtattatcagttctgcttgctttccagaagcgattatggatggcaccatccgaaaaatcatactttagagttcctaagaatattaacttgacaggttcgttttatttgcccaagaatatagaaactggtagaggccatataataacaagctatagaagagagcagccctcatccagtattgtagaagttggtttcaatgttgttccagattttcaacagtttcaagttaaggcttgtcatgtaagtaagttcatgaatgagctttctaattttttttcacaagtagaatttggcaagtgtgaagctaacgtgataaactactttaagcgtgaatataaccgcacttattcacagatatcacttgccctctacgaacttccattaattggcgatggcttgtttgatataaagtcgtacattagtaaaaccaggccaattatagaaacatcaaaagctcaaatgattaaacatatttctgaaatgaaggcatataacgaaataagtggccttcaaggagatcaatttccacgacaacaaagacctttatcgaattcgccctcttcaaattcaatttcctcttctcaaactattgaagcaggtgcaacttcatatcaaacacaaccacagagacacgctgttaataagccatcaaatgtattgaattcttccaatcgtcattccgggccaaaaacttttgaggacggaaggtatagtgaaggtaataaaccgggttttatgacgcaggatgaaatcaaacaacattgcattggtaccataaaagcttctatggatgcagtgaaaaagaagtcttcgtatcagattctaaagacatacgttaggtgtccaagacaaaattatattgatattgtttatcaaaatctaaatgatctacgatcaaagacaaattgtaatatcgtcgtattgaatctgaataatcttcacgagtcacaaatgtggcttgaatctttaaatacaacaaattacactatttttgctcaggcgcctcacccaagtaccatccgcgttattagtattggtggagtcggtgaatatatagtcaaagcattagagctgatattgaatatattagaacattga

SEQ ID NO: 1585 - DNA, 1152 bp, Saccharomyces cerevisiae
atgcaaaaccctccgttgattcgtcccgatatgtataatcagggaagcagctcaatggctacttataatgcctctgagaagaatctaaatgagcatccttctccgcaaattgcacagcccagcacgtcccaaaagttaccttatagaataaatcctacaaccactaatggggacaccgacatatctgttaacagcaatcctatccagcctcctttgccaaacttgatgcatctatctggtccgtctgactatagatcgatgcatcaaagtcctatacatccatcttatatcatccctccgcattcaaatgaaagaaaacaatcagcttcttacaacagacctcaaaatgctcatgttagtattcaaccttccgtggtattcccccctaaaagttattccatatcttatgcaccttatcaaataaatccccctttaccaaatggacttccgaaccagagcatatctttgaataaggagtatattgcagaggagcaactatcaaccctcccatctcgcaataccagtgttactactgcacctccttcttttcaaaacagtgctgataccgctaaaaattcagctgataataatgataataatgataatgtaaccaaacctgttcctgataaagacacccaactcataagtagttcaggcaaaactttaagaaatactagaagagctgctcaaaatagaaccgctcaaaaggcatttagacaaaggaaagaaaaatacatcaagaatctcgaacaaaaatcaaagatatttgacgatttactagcagaaaataataacttcaaatcattaaacgattcattaagaaatgacaacaacattttaatagctcagcatgaagctataaggaatgcaattactatgttaagaagtgagtatgatgtcttatgtaacgaaaacaacatgttgaagaatgagaatagtataataaaaaatgaacacaacatgtcaagaaatgaaaatgaaaacctaaaacttgagaataaacgcttccacgctgaatatatacgaatgatcgaggatattgaaaatactaaaagaaaggaacaagaacaacgagatgaaatagagcaactaaaaaaaaaaataagatccctggaggaaatagtagggagacactcggatagtgccacgtaa

SEQ ID NO: 1586 - DNA, 2628 bp, Saccharomyces cerevisiae
atgtcaaacttttttagagatagttcaatgggattcaagcctcgaccaaacatcttcgctaagctgagagtcagagatgtagattcagattcttccgctaatactgttgtcgagaattcatccaactgtttagacgtgggttcttctatagagggagatgataccttcaaaaaaccccacaaaacttctaccgaacaagaactgattacaagtatgagccttagtcagagaaaccatggttattctgatgatatggaaataggttcaccaaaaaaaacaacatcaacagaccaatacaacagaattttaaaaaatgatgttgccgcaattgaaaatgatactgatgaagattttgaaattacagaagtaagagaagtgagtgaaggagtagcaaaagaaacgaaagaaagtcatggggatcctaacgattctgagacaactctcaaggatagtaaaatgcatgaatatactatgacaaatggaaaggctcctttgcacacgtccatcaataattctagtacatcttcaaatgatgtcctgttagaagccttcacaaacactcaaagaatatgttcaaatttaaagcaagagctacaaaagcagcaacaggataatgcaaagttgaaagttcgactacagtcgtatgcttccaattctgataagatcaatgaaaaagtcggaaaatataaatcttgtttagaaactcttcaagaaaggattgcaacgttgacgagccataagaataatcaagaaactaaattgaaagatttaagacaaaaccaccaactatatcagagaaggataagcggatttaagacaagtattgaaaacttgaacaaaacaataaatgatttagggaagaacaaaaaggaggcggatgcagaattaatgaaaaaaggtaaagagattgaatacctgaaaagagaactagatgattgttcaggtcagttgagcgaagaaaaaatcaaaaacagttccttaatacaggaaatgggaaaaaatagagaagaaatgattaaatcaattgagaatttcttttcagaagataaagcacaccatttactgcaatttaacaaattcgaagaaagagttcatgatttgtttgaaaaaaaattacaaaagcacttcgatgtggcaaaagatacccttaacgtaggcttgaggaacaccactgtagagttgagtagtaatacagagaccatgctaaagcagcaatatgaagatatcaaagaaaatcttgaacaaaaaatgtcatccagtaaggatgaaatggcaaaaacaataaatgagctgagtgtaacgcaaaaaggacttataatgggagtacaagaagaactattaacgtcatcagggaatattcaaactgctttggtaagtgaaatgaataacacaaggcaagagcttcttgatgatgcgtctcaaacagccaaaaattacgcgagtttggaaaacttggtgaaggcatataaggcagaaatagttcagtcgaatgagtatgaagaaaggataaaacatttggagagtgaaaggtcaactttgtcttcacaaaaaaatcagattattagctctcttggtactaaagaagcacaatatgaagatttggtcaaaaagttggaggcgaagaatatcgaaatttcacaaatttctggcaaagaacaaagtttaactgaaaaaaatgaaaacctttctaatgaactgaaaaaagtccaggatcaactagaaaaactcaacaatttgaacatcacaacaaaatcaaattacgaaaataaaatatcttctcagaatgaaattgtgaaggctttagtttccgaaaacgacactctgaagcaaagaattcaacagctagtagaaatcaaagaaaatgaacagaaggatcatacaaccaaactggaggctttccaaaagaacaatgagcagctacaaaagctaaacgtcgaagtagtacaactgaaggctcatgaattggagcttgaagagcagaataggcacttaaaaaattgtttagaaaaaaaggaaactggtgttgaagaatcactaagcgatgtaaaaaccctaaaacagcaagtgatagttctgaaatcggagaagcaagatataacagctgaaaagttagaacttcaagataacctcgaaagtttggaagaagtcaccaaaaatttacagcaaaaggtgcaatcgcaaaagagggaattagaacagaagattaaagagctagaagagataaaaaaccataaacggaacgagcctagtaaaaaaggtacacaaaattttactaaaccatcagattcacccaaaaaaaatgctacgacgtccaacttatttcctaataactctgctgccattcactctcctatgaaaaagtgtcctaaggtggatcatataagtaagtcaagaattaattcatccaaagaaacatccaaatttaacgatgagttcgatctttcttcatcatcaaatgacgacctagagttaaccaacccttccccaatccaaattaaaccagtgagaggaaaaatcaagaagggttcaaattgcatgaaacctccaatttcttcaagaaaaaaattactactagtagaagacgaagaccagtcattaaaaataagcaagaaaaggagaaggaaatag

SEQ ID NO: 1587 - DNA, 2025 bp, Saccharomyces cerevisiae
atgagtaggaaaaattctaagaaactaaaagtctattacttacctgtaacgctaacccaatttcaaaaggatttatcagaaattttgatatccctgcacgccaagtcattcaaagcaagcataataggagaaccacaggcagatgcagtgaacaagccttccggcttacctgctggccctgaaacacatccgtatccaacgctatcacaaaggcaattaacctatatctttgattcaaacataagagcaatagccaatcatccttcccttctagtggaccattatatgcctcgacagcttttgagaatggagcccacggaaagctctattgctgggagccacaagtttcaagttctcaaccagctcattaattcgatatgctttagagacagagagggctcaccaaacgaagttataaaatgtgccatcatcgcacacagcataaaggaattagatttgctagaaggtttaatattaggcaagaaattcagaaccaagagactttccggtacatctctttataatgagaaacacaaattccctaatctacctacggtcgattccacaataaataaagatggaacaccaaattctgtaagcagcacaagctctaattccaattcgacctcttatacaggttattctaaggacgactatgattactcagtgaaaagaaacctgaaaaaaagaaaaataaatacggatgactggctgtttttagccactaccaaacatctcaaacacgatcaatacctattggctaactatgatatagatatgataattagttttgatccaatgttggaagttgaattgcccgctttgcaggtactgaggaataatgccaataaggatattccgataataaagctattagtacaaaattctccagatcattacttgttagattctgaaatcaagaattcaagtgttaaatcgtcgcatttgagcaataacggtcatgtcgatgatagccaagaatatgaagagatcaaatcctccttactatattttttgcaagcaaggaatgctccggtgaacaactgtgagattgattatattaaattggtaaagtgttgtttagaggggaaagattgcaataacattttaccggttttggatttgataacgttagatgaggcctccaaagattcgagcgattctgggttttggcagcctcaattaacaaaattgcaatattcgtctacagaattgcccctttgggacggaccattggatatcaaaacctaccaaacagagttaatgcatagagccgtcataagattgcgagatatacaggacgagtatgccaaaggcactgttccactgtacgagaaacgattaaacgaaactcaacggcagaaccagttggacgaaataaagaattctgttggtcttacattcaagaaaaaacaagaagtggaaaaatccattaatgactctgaaaaaaggttgaagcatgcgatgacagaatctaccaagctacaaaataaaataaatcacttactgaaaaataggcaggaactagagaatttcaacaaattgccctcgaatactatttcatcagaaaatcatctggaagagggatctgccttagcagacaagttgaaggaatacatagacaaaaatgcgactctttttaataagttaaaggaactccaacaagcaaatgcggaaaaatcaaagctcaatgatgaactacgttccaaatatcaaatagaatcttcaaaagccgcagagtccgcgcaaacattgaaaattttgcaagaatcaatgaagtctttagaaaacgaagttaatggtccactgactaaattttccacagaaagcttgaagaaggagctggaacgtttacagaatgattttcagtcgcttaaagcaagaaacaaattcttaaagaattacataaccttaatgaaccgacagtacgacttaaaaaacaaaaacaacgtccaggtggaaaaagctgccgcaaatggtacacggtttagatcaacaagatccaatacccctaattacacatga

SEQ ID NO: 1588 - DNA, 2079 bp, Saccharomyces cerevisiae
atggccaagagactgttagaatcaagccaaaatgatcaggccaatcgaaaaaactcaaagattgagaagaaagaagtatcgttttatgaggaggaagaaacagatgattcttttgatagtttttaccaggatgaagaagatgatttaagtgatattgattgggaagaagtttctttagatggaagcttaactgtcacatttggcaatatacgcagagacagggagaaagtcagcaagtacaaaagaaagcataataaaaaagcattcaattatcagcgacttaaatatggactccatttgataatgattccatttatgttatttttgttaaaatctaggatgaaatggatagacgatgaaagactaaataggcgactaagaaggtctgtaccaaaattaattggcaaaaaattcaaagattgggatgtaagggatccagcttttaaaatggattctttaagaacccttttgcttggtttggtcttatggttccgttccaattacaaaatgaatagcaatggcattagacagaatttcaacaggctgcaataccttatcaagtatgccgataaccaaaacgaaaattcaatctctgaatctacatataaaaaagttcttgaaaatcaacaagaattttatggaaataggccgttgataaatcatggtgttgaagatattcgcaagatggctaaaaggaaaatggccaacagagatattctaacgttgttcttctttattatcttagaaaatgtgctaccggggcctaagaagctttacttatgctttgccttgcccttgcacgattacgatattaggtgcaataaggtgaagtggcaaatcgaacatggtattggcaaagttcccaacagatttgactctgacctaatacaaccttatttttggattgaattagaagttcctactttgagcgatggtgaattatacatcattgaccctatagcccatctgggtgaacgtgaaatggtcttgaaaacacgcgaagatcagtttgtccctacttatcaaccttcggtagacatgaagtacaacctaaaccaaaagtttcattatgtagtccgtatcaatcatgctgaaaaggtactacaagatgtttcaccaagatatgtgccaaatgtttgttacaggtactttgaattatctgagtcttctcctattttgaaatcgaagcattacactagctaccaatatctatctaagtggttgaaagtcttgaacaagaaaaaagcatctgttcatcattacgcaataatgaaaaagattgctttaactaattttacattaccaaagagtgtgacagagattaaaagaacagataatttcgtgattccctctctgttaaagtctaatgaagtattaaaagcatgtgcaaaacaagccgcaacatttactaagggagacaattcacaagagcccatattttggagaagagacgtcattcaattaaagagtaaacagcactgggcaatattagggcgttccattctacctaatgctcaaccattaaaacgtaaaaagtatctaccgatgagggaaaggatggtaagaaacctagacaagtacgttatcaaagaattgttttcgtatgagcaaacaatgaagtctcctaaataccccagcacgtattgcgatcatttaggacaggaacatgtgataacagatttgtcgcattataaaaataaatttggcaacatcgaaatttactcgaaagaaactaagcctgatggatttgaattaataccgcttagcaaagaagttgatattaaatgcctgataaaggagtataacaaaggtaaaagaaagatgcaaaaaatcaagtatttggatgtggtaagtggatttgattttaaacagaaaaaaggccatgccattccgaaaattgaaagcattctagtcaaagagacagactataaagcagtccagcttttgaagcagcaaactaaagtactactgggactctcgttctgggacattctattaagaaagctacgagttaacgatcgattaaatgctgagtacggtaatgttggaaataatgaagaaacgttggacgaccattga

SEQ ID NO: 1589 - DNA, 1536 bp, Saccharomyces cerevisiae
atggtaggacactcagctcagcacagatcaaaaagcagcttagtgtctcacctactaatactacttatctttataacgattattattgaaatgtgtttatataataaaatttttaagaaccaaaggtcggatgatattagagacaactttaacaatggcggacatcgagttcccagtaatgtccaaaatcatggaacccatataagagacgaagcctttatatcaggggtctattattccaattggtccccatacaaaccgaggtttcatttccctcacgacataaacttgaagcaagtgtctcacatttactatgcatttttcaaaataaactctagaactggtggtatagaaaacacggatagttggtctgatctagaaatgaatttgtataaatcgctggcaattaaaaattcagaactaattaaagaaagctcgaacaatagtgtccaaaacatcctacccttaggttgcattggtgaactattttatttgaagaatacctgttctgataagaaatttaaagttatcatgtcaattgggggctggtctgatagtgaaaatttcaaaatcataattaaagatgataaactcttacaaaattttgttgattcgtcggtggaaacaatgttcagattaggatttgatggcattgatctagactgggagttccctggtaacaatgaatcagaacctcgcggatatctgaaactggtcagaatgctgcgattaaaactaaacagcctcgaatcccaaatatttgggaaacgtactgaagatcattttcaattatctattgcggcacctgcattcaaggataaattattttacttgccaatcacagaaattgatcaatatgttgactactggaatatgatgacgtacgattattatggctcgtggtcagaaacaacaggatatcacagcaatctattcagtgagacggaattgaatggaaactttgccatgcattatatgatcgatagatttggcgtcaattctagaaaattagtactgggaatggccgcctacggaagaagtttccatatcaaagataacaaattcgaaccattcaatcaaaatactgtattaattaacaaaattttcaaaggagtgggcaagcccactaaagaaatagataaagctgatggcaaggagggcatctggccttacaaaaatttaccaaagattggtacaatagaacaatacgatccaaaatatgtttcagcatattgctttgatgaaaaaaattcaatatttatcagttatgataacactaaatcagtcaaaactaaggctgaatatgtgacacataacaatttaggcggaggcttttggtgggagtcatgtggtgaagcttatgcaaatgagtcaaggtcgttgataaacgcatttaatgaaggcttgcactttaatgtgtcatcaaaaccatcaatatttcaagatgtgagagttaaaaaatattacttgaataaatatggcgatggcggatttttatctccatatttaaagcatttggattcaagaaagcaatga

SEQ ID NO: 1590 - DNA, 921 bp, Saccharomyces cerevisiae
atgaatcaaatctggtctacaggtcccccaaatttttacttcaactctgaatggaaagaaaataagagaaatgacaggacaattgaagactctttaagagaactagatgggttgatccattccttggagagaactcatattgaagtacaaacaaacccaaagctaaagaacgatgtcacagctttaaatgatattaacaagaaagaaaataaagaagagatcactcatgaaaactatacacaccagattaatagtattccattgacaagctcaaatttaaatcggcatttctccttttctagagactacaaccaatctgataatagcaataataattattacagggaatatttatccaaaccaaggtatttgcagcagtcaactaaagaacaaactttcaatgaaattaataaaagaaaaagtgctgcaattattcccccttggttaaatattccagaaaactcaagattttttgtaataaagtcctcgtctttgaagcatgtcaaaaggtcgttttacaacggaatttggtcgtctactcatttcggcaacaaaaggctatctgaggcatataaaaagcttaattcgggagccaaagtgtttttatttttttcaatcaacacatcaggaagattctgtggcgttgcagaaatggtatcggatttgaaaatggatttggacaccagtatatgggaagatgaacaaaaatatggcaaagcctttaaagtaagatgggtgatcgtgcgtgatataaataacagatcgttaaaaaggtttttgataccatccaatgaaatgaaaccgataacacattccagagatactcaagaaattccatattcgattggaatttcaataattaatctatttaaaactcaagattctgatattttctccttcttggatgagacgtatgaatag

SEQ ID NO: 1591 - DNA, 1899 bp, Saccharomyces cerevisiae
atggaactctcatcaaacttaaaagacctatatattgaatggttacaagaattagttgacggattaacccctaaacaagaacaactcaaaatagcctatgaaaaagcaaaaaggaatttacaaaatgctgaaggttcattttattatcctacagatctaaagaaagttaagggaattggcaatacaataataaagagattagatacgaaattacggaactattgcaaaattcaccacatatctcccgttgaggctccttccttaactcagacaagtagcaccagaccaccaaagaggactactacagctttgcgtagcatagtaaactcatgcgaaaatgataagaatgaagctcccgaagagaagggaactaaaaagagaaaaactaggaagtatatacccaaaaaaagatctggaggctacgctatccttctttccttactcgagcttaatgccattcctcgaggcgttagtaaagagcaaatcatcgaggttgcaggaaaatacagtgaccattgtatgactccaaatttctccacaaaagaattctacggtgcttggtcgtctattgctgcacttaaaaaacattcgttggttcttgaggaaggtagaccaaaacggtattcgctaacagaggaaggtgtagaactaacaaagagcttaaagacggcagacggaatctcttttccaaaagaaaatgaagaacctaacgagtattccgtaaccaggaatgaaagtagtgaattcacagcaaatctgactgacctccgtggtgaatatggtaaggaagaagagccctgcgatataaataacacttcattcatgctggatataacttttcaagatttgagcacgccgcaaaggctgcagaacaatgtatttaaaaatgatagactgaatagccaaactaatatatcttctcataaattggaagaggtctctgatgatcaaacagtacctgattccgcattaaaggctaaaagcacaataaagaggagaaggtacaacggagtaagttacgaattgtggtgtagtggtgatttcgaagttttcccaattattgatcacagagaaataaagtcacaatctgatcgtgagtttttttcaagggcatttgaaagaaaaggtatgaagtcagagataaggcaactcgctttgggtgatattatatgggttgccaagaataaaaataccgggttgcagtgtgtgctcaacaccatagttgaaagaaaaaggctagacgatttagctttaagtataagggataacaggtttatggagcaaaaaaataggttagagaaatctggctgtgaacacaaatactatctcattgaggagactatgagtggcaacattggaaatatgaatgaggccctaaagaccgcgctttgggtcattttagtgtattacaaattctccatgataagaacttgcaattcggatgaaactgtggaaaagatacatgcgttgcatactgtaatttctcatcactattctcaaaaagatctcatagttatatttccaagtgaccttaaaagcaaggacgattataaaaaggtgcttctacagtttcgtcgagaattcgaacgaaaaggcggtattgaatgctgtcataatcttgaatgctttcaagaactaatgggaaaaggcgatctaaagacggttggtgagctaactatacatgttttaatgcttgttaaaggtatatctttagaaaaagcagtagccatccaagaaatatttcctaccctgaataaaatactaatggcatataaaacgtgctcctcggaagaagaggctaaattgttgatgtttaatgtactgggagatgcacctggtgcgaagaaaattactaaatctctttcagaaaagatatatgatgcttttggtaaactttag

SEQ ID NO: 1592 - DNA, 2853 bp, Saccharomyces cerevisiae
atgtctgctaagaaaaggccttcgggaaacgcagcatttgaacttccaaaacggagaagaacctaccaagcttgcatcagctgcagatcaaggaaggtgaaatgtgatcttggtccggttgataacccacacgacccaccgtgtgcacgttgcaaaagggagctaaaaaaatgtatttttagctctaataagggaacttcgaacgacttgcctcctaattcgattaatgcaataagtctgccatctctaggtaagagtaagcaagagatacaaaatgactcaacgagcccaattttatcggatgtacctttgtcaagaaaagggattagcagtgaaaaatcatttaaatcagaagggatgaagtggaagcttgaactttcctccatgcagaacgccctagagtttctggcccaagctgctggaactgtagcaaaagaaggcgcaaaagaaatcataaaagagaagtccacaacaccgaaaccactgaaaagttctttggatgcgacaaataaatctgctacggacgaggggttgaaacgactttcaaaaagtgacagtactaacacactttacgaaaatacagcagatatgcttaaccacacgctgaatacgaataggaaaacatcacaattaatggaagaaatcgggaaagtgagacctccacctacccggaaaattgacgacttcgattacatcggtccagatagcttgcttactaaagaggaggcgattgaactcatagaggcattttttctcacgatgcacccattctttcccaatatcccacttcaattgcatgatccgaaagaattagcagaatatccaattttgttttgtgcaattttgactgtttctgctcgctatcatcctttcgatactttaggattagacaatggagaagatgggatgagacacattgaagttcacgataaattatgggtgtattgccagaagcttatatctcaaacaatttgggcagaggctagtactaggtcaattggcaccgtgcttgctttcataattttcacggaatggaacccaaggagtatccactataaatggtctgactatgcaaatgatcctgagttaaataatgtcaacgctagaggaagtaagaatattagtacgaggaaggacgaagaaggattgaccggtgtcggcgcaatccgtagaagcgaccgaatgtcatggatgctgacagggtctgcagtaaggctggcgcaagatatgggattcattgaaaacagctcaaaagtattcattgtcactcatatatctgagactaccagtgctatgaatatgaatcaaagatccttattagcagaatcattcagcgttttaaacttgaatttaggaaaaattgaaaacgatggaaatgaaagcaatgaggattaccttgggaatgaaaaattttatctgaatgagattttgcctgatgaagaaagtaaactaaggtggaagagagtttttgaaaactcagaaaatgaccacgacaacgagaaaaattttttgactgattgggagagggagtttttaaacgatgagtatgttctatattattctaataaaaaagatgatactaatctagcacagaatcacataccaccatttccactaagattctcattcgcccaaagagcaaaaatagagatcattcgaatcctatccatagcatatgagacgatttactgtgagaagaataagaggaaattggcaacgacagatcagagacacaacctctctgtcctaagtgttttttctcccttgatagagggctggctcagtaactacagagagcttcttgtacccctttctgatgtccctttctcactagcagataggaagaacaaaaaacaaatatttgataacatcgatagaataaatggtgaaagtattatcacagatttcaattattgtcaactttatatcttttccctcgcactgcaagtggatgggaaaacaagcagattgaatatgaatgaaattgtgacaagcgcgaggtatgtggaattagcatacagatctgcaaaagaaatattgagttctgcaaagcgagtttcaaggcaaggaatgctaaaatacatgcccgtaagatgggtaatacgaataattagatccattgcgttcatagtaaaatgctacctaacacttactggtagtgaactggcaacaaatccagatgccagaaacattttaaaattaagtgcaatatcggttgacgaaacattcgatatcatccgtgacactgcggttactttgaaagaagctacaccagatgaattacatctatgtcaaagatacgcagccatattaatgtacttatgtacagagatgaaacttcgaaaaaaatcttacttagaacgaccacccttattaagagatggcaccactcctctagagagcaatcgcgaatcctcactggagggacaagacttaactaagaagccaatattctctaaacgtattggatataataaaaccgagactacttttgaaccctcggaaaggcctttgacggaggaaattaatagcaattctcagaattcaaatgatacatcttctaaaggtatcgttgatccttttgttgaacaaaacaacgatatcacaacagcgttactgaacaatgaactcttccaaggtccatctctatctgacgaggttacagattggttcggtgctagtgaagatatcgggcttgaatttgtagaaccatggacagaacttattgagcaacgatatatgcaatgtggagatggtgataataataatttcgaaaatttatacaacttgttcgtgaatagtaataacatcaataatgatattaataactcaaggccaataacgcgtaaataa

SEQ ID NO: 1593 - DNA, 909 bp, Saccharomyces cerevisiae
atgactgttataaagacagaaccaacaacagaagtgacattatattctccaccatcaaaagaatctttaagtaaagatgacgcccacagaaaaaaacaaaataataaaccaccttcgagtataaatagccgctcaggaccaaataagcataaacttgccgccaaagcaccggaaaagaaaatcaataacacagataaacaagacctctctgcctttttattaaatccttcccttattgttaaaccttctgagagcaaaaaaaaagaaaatattgtggcctataatgatacaccaggtataaaaacagaacatacagcgtttcagccgctgacaccaatttcgaaaaaaagggccctgaaagagaaagcagcatcagaaaaatgtgatagctttgatctttccagagacgagaagccttatattcagaaaaagtcaaagacgctttcttccgtcacagagattaattcctcagaatataaactctcactaaatggcgaaaatacatcatccccagctaaggaaaaatcgcaagaacccatagaaaatcctggaagttaccaaaaaacaagaaattacctttttgaaaagcccgatcctttagacacgtgccttcaggactactcgagtatgctaccgtcaaatgtagcagaagaagatcaagaatattttatcagcgtagctgattcgacattggaggagtggactaacaagggccaggaaattattgaccaacagttccagctctaccaagaaataatcaagaaacgaatagaactaagctacaaatttaagggtattatttctgtaatcaatgatagggcagatgccctagaagaacagggtcaacaactagaaggaaaaattaagaaagttaaaactttggctaatgaaattctcaatattatataa

SEQ ID NO: 1594 - DNA, 1509 bp, Saccharomyces cerevisiae
atgaacaacaataatgttacggaagcaacgtcaagggcacagatacggccttattatgatcccgattctttcaatgctgggtatagcgctgttttcaagcccgatgagggtgtagtagatccgcacggatacacaattgcttctaagctaaacgttatcaactcatctccaactacaaagagaatggctaatgcattgtttaaaagctccccaatgaagaaattgtcaaattcagttaacgatggattgtcactggagggaagtaatggcgaaataactggcctgaataattttgaatgggcggaattggttaacatccagaaatggcgaaaaatatttgaacaactgctggatatgtttttcagaaagtattttcaattgctcattcaacagccctttgatgtagcaagactacttatccaagtaggtgagtttaaaatcttcaaaactacagttgacacgaataaacctcaagcaccaataattttgcgggatgaagaaggagatggcgctgcgagagaaggagaagaagatgcttacgatgaggaggagatagatttctttcccatagaaaggaagatcgccgaggcaaactctactgcgcctattatggccgaagaaactgatcattcacatcatgaacctactgatatatccttgactattgcaccacagtccctacatacaattgacgtaatcaacgccctatttgatcaggagggtattcgtggtctatggaaggccaacaacacgacttttatttacaactttctttccctaagcatagatacttggttcacaggattactctcgtcttttttgggtgtccctgacccatattttatggaggtcatcaactctcctgatatttctaagtccttcattttagccttaggcgcgggagtatttaccagtattatattattacctgtggacctgataagaactagattgatagttacatcattcaaaaaaaagaagaatgtcaagacagatggaaagaatatggttactaatactagaagcttgaggcagttaatcagatgctggtcatggcgtaaaaacggagtttccattccattagatatgtggtccctaactattcttcaatctatcaataatagctttttcaacaaattgtttgatttagtcatctacaaccaattccatatcgaaaaatactctcaaaccgtcatgtacaatactatgaagtttttttctaaatcacttgaactatttatcaagttaccattggaaaacctgttacgtcgttgtcaactaaactacttgttgaacgatcagcggttatcatttaaagtagattccactgaattgatagtaaagccaaaaaaatacaatggcatatgggatgtgataagaaacaattctaatacaaatagaggccaactttggaacggttggaaagttggcgttattagtttaatttgcggatatgggttacaaatgatgaataaagttgatatcaacatggaacaagagaagttctga

SEQ ID NO: 1595 - DNA, 1566 bp, Saccharomyces cerevisiae
atgtcccatctcttcccaccatcatcaccagttgctggtaaacctttggaaagcccacaaaaagaacctggtaagcttgctaatacttctgtattgaccttaggaagaaaacggtataattacgaattggaagagtatcctactccagacccgtcgtctagcatcggaagacaatcttcaccagtgaaagatatcacttcacgtttaaatgagaccaaatctgccttgtcatctccttcaaagcaagaaaaggtgcttgcaggccctatcgagattgaattagatgcatcggatccctcacgtttagccatcggtaggaaaaaatcagtctgcaacattattttgccatgcagaaagaatatctctaggcagcacgcttttatttcatacgccgccgacagaaatgaaataaaattggaatgtaatggaactaatgggttgtccgttcacttgccttactccatgcagttgcatttggtaaaacccttcccaacaaggaacttttataaactagtggcagaagagcctttgacctcgcaaaatactaaacaatcgcatggaaaaactcttcaaaagaaccaaaacttcatcagctttgttttggctaaaggtgaaactgttactttcccctatatccaaggaagtttcataaattttacaggcgtcacagtctgtctttcattgaaaaaagtagcaccttatcctggcgatggcaacaataactttgacgaagagaactcgacagaaacggaggatgagttgtgtttattaacaacaacgagcgatgatttttcttggcaaaaagaaacaccttcgatgaaatttgtcccagttgagcattcacctcgtacagaacagatctcaaaaccattacttattgcatctcctgctcttgtgaaaaactcccccattagttatagaacaacaccccaaacatctttcgttattaatcagccatcaactccaaagaaactgaagcgtaaatcaatttcattgaaaaataacactatacaagagacaccacttcctaaagataaaataattgggacattaagtgccagtactaggagtggtggcattaatgaagaagaatctttcgcagcagttgcaaaaaaaactaaagagctgtcttctacaaccgcgattgtatctcctgcacaaaaacgtcttaagacttcattgaatattattcccgaaatttctcggtcgctctcagaaagaggaattcggtttgatgacctagttcatgtgctatgtaatcatcttgcattttctaaccttcaacaaacgcctttatcccaattgcaaaacatcaattccaacacttcacaattaagcaaagatgaactaaaaaaggtcttggagactatttcttgcattggtattattgtgcgtgaaggaaaagatgcgtctggcaagccattagaagacgagtattactatgatgttgaaaacgatgatagcgacgagagaaagattttgtataattcgttaaaaggcaggagccgattaaggtcgtgcaggaagaaacataaacagtatttctggaagaggccgaccaaataa

SEQ ID NO: 1596 - DNA, 1509 bp, Saccharomyces cerevisiae
atgccaatttggaaaacacaaacattcttcactagtatttctgttattcaaatagtcaataaagaaaccaaagtttctacaaaaaaagaaaaggatagcatgttgaaccagttgaacacaatcttaagatttttattcttgtttctgcagttaattaaatcatccgctgcagttgaacctaatggtggaccgaatattctagatcacaacattatgttggttaacactaatgcaacgatccctaaaaaggaacaaactgattttgaggtgatttctccaacaaaacaaacacaagtagatgaagactgtaaaaaaggcttgtatcatattgagaatgctggaaatttgattgaactgcaagctaaatgttggaaagtggtaggaaacattgaaatatcaagtaactacagcggatctcttattgatctagggttaataagagagatagagggagatcttattatcaagaataacaaacacatttttagaatccagggttataatttagagtctttgggaaagttggaattggatagcctaacttcctttgtatcattagactttcccgctttaaaagaagttgaaaccgttgattggagagttttgcctattctaagtagtgttgtcattaacggaaatattaaaaagatcaaaaatattatcatatctgatactgcattaacctccatcgattacttcaataacgtcaagaaagtggatattttcaatatcaacaataacaggtttttagaaaatttattcgcaagtttagaaagtgttactaaacaactaaccgtccactctaatgccaaagagctggaacttgatttgagcaacttacacacggttgaaaatatgaccattaaggacgtttcagaaattaaactagctaaactttcctctgtgaacagttctctagagttcatcgagaatcaattttcaagcttggaactaccacttttggcaaaagttcaaggaacgttggggttaatagataataaaaatctgaaaaagctaaacttttcgaatgccaccgatattcaagggggtctaatgattgctaacaatacagagcttgccaaaattgatttcttccccaagttgaggcaaattggcggtgcaatatattttgaaggtagctttgataaaattgacctcccagagctaaagttagtaaaaggtagcgcttatatcaaaagttcatctgaggaattaaactgtgaagaatttacatcaccaaaagccggtcgttcgatcataagaggcggtaaaatcgaatgcacatctggtatgaaaagtaaaatgctgaatgttgatgaagaggggaatgtactaggaaagcaggaaactgacaatgataatggaaagaaagaaaaaggaaaaaatggtgcaaaaagtcaaggaagttcaaagaagatggaaaacagtgctccgaagaacatttttattgatgctttcaaaatgtcagtttatgcagttttcacggtattgttctcgataattttttag

SEQ ID NO: 1597 - DNA, 1473 bp, Saccharomyces cerevisiae
atggaaagcaaagaaatatcaattaggtcaagaacccctccatcgaagctatattccatccaatcatgtattggcagaggtaactttggtgatgtgtataaagcagtggatagagttacgcaagaaattgtggcaattaaggtggtcaacctggagcattccgacgaagacattgaactgttagcacaggaaattttttttctggcggaattgaaatctcctcttattacaaactatattgcaacaatgttagaagatgtctctatgtggattgtcatggaatattgcggcggtggatcatgttcagatttactgaagcgaagttacgtcaacggtttgcctgaagaaaaagtttccttcattattcatgaagtcaccttgggtttgaaatacctgcatgagcaaaggaaaattcatcgtgatatcaaagcagctaatattttactaaatgaagaaggtatggttaagttgggtgatttcggagtaagtggccacattcgttccactttgaaaagggacacttttgtaggaacgccgtattggatggctccggaagttgtttgctgcgaagttgatgggtataatgagaaagcagatatatggtccttgggtatcaccacctatgagttactcaagggcttacccccattatctaaatatgatcctatgaaagttatgactaacttaccaaaaaggaagcctccaaaattacaaggtcccttttcggatgcagcaaaggatttcgtagctggttgtcttgttaaaacacctgctgatcggccatcggcatataacttgttatcatttgaatttgttaagaatatcaccataacgaacttgaaaagtgatgttgatctaattaaacagaaaaaggttcaggagagatatacaaaagttcccaaataccctcttcaaaatcgcttgtataaaaacagcaacacagtgaggggaaaggaattttggaattttgaatcgacaagactaagcacaacacaaatttccaaagaggaattatctcccattacacaagactctccaacatcatctttaaatatggaaagtccttatttacttcatgggcaaactgtaacgccgataaccaacccaagttcttcatcatttagaaaatgtacgcaaccagttttcgagcttgattcaggaatggatatagattcaggctgcccaaatgctcaagcagagaccgaaatagttcctctctctaatcataataagaagcataaaaagaacgatattcaggcgttgaagatagaaaagtttgactacttgaaaaacattgtatctcatattctcaacagaatgtatgatcgtgcgcgcgacgatgaaacaagaaaatacgtaaatgaaatgttaaagcaattcattaaaactgaggcaaacgttcctggatttaatgaggtttttatagaagagatctcactaagaattgaagcaataaagaaaggattcgtttaa

SEQ ID NO: 1598 - DNA, 1158 bp, Saccharomyces cerevisiae
atggatacagggagtgcgagcataaaggactatgagaccgtgttaacggatattgaggattctattgctgtgagcagcgaagaagtgctaaataaccaagaactaaggctcaaaaatacattgcacgaaattacttccagcattctggcaataaatgaagagaacaagtttgtgaatcctcttaggaacgatgagagcttagacgtagagggaaaggaggtctttgtaaatccaaaaattctgagtgcaaaaatcaaggagttcaataaactaatggagttacttaagttgacttacttggaacaggagacattggactatttcttcaggtttactttgtcctcgacgaaacctttgcagttagattccgaaaaagacccccaatttgtaaaacttaatgaaagagttaatgatttaaaggaagaaatttcgaatgttcaagaaagcaaaatagaacaaatcaaagctgaaatccaagagaccggtcacaactttgcagaaaggcaagatttaataaatgagttgtatctggaagccactggtgatattgaaaattgttgggattcgctcaatgaactaaaaaatttaacaaacaaagaagataagaatatgatgggagaaaaagatacgatattaaattcaagtgattcagatgattttgtggaagagacatacacgaattggcaaaaactactatttttgcagaagcaaaatcaaaggttaacgaaagagctcaaggaaatgcatgaagttaaaaatcaaataatacgaaaaggagagcaatcaaaaaaagaggattctggacatttaatggccaatgaatcagaattatgtcagtcaattaatttgctaacaaaattttgggaaaagcactttttactcaaagggtcaaagacgactatattaaattttgaaatctttacccagcttggaaaagtacaatttgaaataaaggatatgcaatatataattgccatatctttaagcgatttaaaaaggccaatgataaaagacattactattttacaaaaagcgggtggcaatatagtcacagacattgaagcgagcagtaaatttaacaataagtacagaaataatactaaggtgcaaatctttgaggtaatggatgacattataagcgagctaacaaacgaataa

SEQ ID NO: 1599 - DNA, 804 bp, Saccharomyces cerevisiae
atggccttgaacgataatcctatacccaagtcagttcctctacacccaaaatcaggtaagtacttccataatttacatgcccgagacttatcaaatatatatcaacaatgctacaaacaaattgatgagaccataaatcaattagtggattctacatctccttccaccatcggcattgaagagcaggtcgcagatattactagcacctacaaactcctctcgacatacgaatcggaatccaactcatttgacgaacatattaaagatttaaaaaaaaatttcaaacaatcctcagatgcctgtccgcaaatcgacctttctacctgggataaatatcgtaccggagaactcaccgctcccaaattatctgaattatatctaaatatgcccacaccagagcctgcaaccatggttaataacacagatacactcaagatactaaaagtgttgccgtacatatggaatgatccaacttgtgtaataccggatctgcaaaaccccgcagacgaagacgatctacaaatagaaggtggtaaaattgaattgacttgtcctatcacctgcaaaccttacgaagcaccattgatatcaagaaaatgtaatcacgtcttcgatagagacggcattcaaaactatttacaaggatacacgacaagagattgcccgcaagcagcgtgttctcaagtcgtttcaatgagggattttgtaagagaccctattatggaactaaggtgtaagatcgccaagatgaaagaatctcaggaacaggataaaagaagtagtcaagccatcgatgttttatga

SEQ ID NO: 1600 - DNA, 420 bp, Saccharomyces cerevisiae
atgaaaaaagaaaaaaaaactccgacgccccttccatcacatcatgtactcttcgctgaaccgggtttttttctttgcaatttttttttcgttctcctaaagcatacacaaataaatccttttttttattttctatttattttgttatttatcatctatatagcaataatatactttgtttttattcgtatttcacacttttctttttccttatgcaggcagtgtaattcattggggaggatgattttcatgtgcgcatatctaccggctgcaagcagccggtcggtggcaaatccggcgcttccccctcaaaaaaaaaaaaaaaaaaaaaaaaagggaactctcagaacgggggaggttgaagagcaggccaagggaaatattagttttgacctatgtgggaaacagaattttcaatga

SEQ ID NO: 1601 - DNA, 3003 bp, Saccharomyces cerevisiae
atgccagcggaaaaccaaaatacgggtcaagatagaagctccaacagcatcagtaaaaatggcaactctcaggttggatgtcacactgttcctaatgaggaactgaacatcactgtagctgtgcgatgcagaggaaggaatgaaagggaaattagtatgaaaagctccgttgtggtaaatgttccagatattacaggttctaaagaaatttccattaacacgacgggagataccggtataactgctcaaatgaatgccaagagatacacagtggacaaagtcttcggtcccggcgcttcccaggatctaatttttgatgaagtggcgggcccattattccaggatttcattaaaggttacaattgcaccgtactggtatatggtatgacgtcaacaggtaaaacatatacaatgacgggcgacgaaaagttatataatggtgaattgagcgatgcagcaggaattataccgagggttcttttgaagttgtttgacacattggaactacaacagaacgattacgtagtaaaatgttcgttcattgaactctacaacgaagaattgaaggacctcttggacagcaatagcaacggctctagtaatactggctttgacggccaatttatgaaaaaattgaggatttttgattcaagcacagcaaataataccactagcaacagtgctagtagttccaggagtaattctaggaacagttctccgaggtcattaaatgatctaacacctaaagctgctctattaagaaaaaggttaaggacaaaatcactgccgaataccatcaagcaacagtatcaacaacaacaggcagtgaattccaggaacaactcttcctctaactctggctctaccactaataatgcttctagtaacaccaacacaaataacggtcaaagaagttcgatggctccaaatgaccaaactaatggtatatacatccagaatttgcaagaatttcacataacaaatgctatggaggggctaaacctattacaaaaaggcttaaagcataggcaagtagcgtccactaaaatgaacgatttttccagtagatctcataccatttttacaatcactttgtataagaagcatcaggatgaactatttagaatttccaaaatgaatcttgtggatttagctggttcagaaaacatcaacagatccggagcattaaatcaacgtgccaaagaagctggttcaatcaaccaaagtctattgacgctgggcagggtcataaacgcactcgtagataaaagcggccatatacctttccgtgaatcgaaattgacccgcctgcttcaagattccctgggtggtaatacgaaaaccgcactaattgctactatatcgcctgcaaaggtaacttctgaagaaacctgcagtacattagagtatgcttcgaaggctaaaaacattaagaacaagccgcaactgggttcatttataatgaaggatattttggttaaaaatataactatggaattagcaaagattaaatccgatttactctctacaaagtccaaagaaggaatatatatgagccaagatcactacaaaaatttgaacagtgatttagaaagttataaaaatgaagttcaagaatgtaaaagagaaattgaaagtttgacatcgaaaaatgcattgctagtaaaagataaattgaagtcaaaagaaactattcaatctcaaaattgccaaatagaatcattgaaaactaccatagatcatttaagggcacaactagataaacagcataaaactgaaattgaaatatccgattttaataacaaactacagaagttgactgaggtaatgcaaatggccctacatgattacaaaaaaagagaacttgaccttaatcaaaagtttgaaatgcatattactaaagaaattaaaaaattgaaatctacactgtttttacaattaaacactatgcaacaggaaagtattcttcaagagactaatatccaaccaaatcttgatatgatcaaaaatgaagtactgactcttatgagaaccatgcaagaaaaagctgaactaatgtacaaagactgtgtgaagaaaattttaaacgaatctcctaaattcttcaatgttgttattgagaaaatcgacataataagagtagatttccaaaaattttataaaaatatagccgagaatctttctgatattagcgaagaaaataacaacatgaaacagtacttaaaaaaccattttttcaagaataaccatcaagaattactgaatcgtcatgtggattctacttatgaaaatattgagaagagaacaaacgagtttgttgagaactttaaaaaggtcctaaatgaccaccttgacgaaaataaaaaactaataatgcagaatctgacaactgcaaccagcgcggttattgatcaagaaatggatctgtttgaacccaagcgcgttaaatgggaaaattcatttgatctgataaatgattgtgactccatgaataacgaattctataatagcatggcagcgacgctatcgcaaatcaagagtactgttgatacatcatcaaattcgatgaatgagtctatttcagtcatgaaaggacaagtggaagaatcggagaacgctatatcccttttgaagaacaataccaaatttaatgatcaatttgagcagcttattaacaagcataacatgttgaaagataacattaaaaattcgataacatcaacacactctcatataactaatgtggatgatatctataatacgattgaaaacataatgaaaaactatggtaacaaggaaaacgctaccaaagacgaaatgatcgagaacatattgaaggaaataccaaatctaagtaagaaaatgccgttaaggttatcaaacataaatagcaattcagtgcaaagtgtaatatcgcccaaaaagcatgcaattgaagatgaaaacaaatccagtgaaaatgtggacaatgagggctcgagaaaaatgttaaagattgaatag

SEQ ID NO: 1602 - DNA, 1395 bp, Saccharomyces cerevisiae
atgggaagcgtgaactcatcaccgaatgaagagtttgaaactgtgccagattcacaaatttcagggtttgattctcctttgataccgactagtgtgggaagttactttcgcgatgacgatgacgatgagaaggtgcatcccaactttattagtgatcctgagaacgacagtttgaatagcgacgaagagttttctagcctagagaacagcgatttgaatctttctggtgccaaggcggagtctggagacgattttgatccaatcttaaaaagaaccatcatttccaaaagaaaggcaccaagtaataacgaggatgaggagattgtcaagacacccagaaaattagtcaattacgtacctttaaaaattttcaatctaggtgatagcttcgacgatacgatcactactacagtggccaagctacaagacttgaaaaaagaaatattggattcacctagaagcaacaaaagcatagttattactagtaacactgtagccaaaagtgagttacaaaaaagcataaagttttctgggtctatcccagaaatttatttggatgtggttaccaaggaaaccatatcagataaatataaagattggcatttcatctctaaaaactgccattacgagcaattgatggatttggaaatgaaagatacggcgtattcattcctgtttggtagtagtagatcgcaaggaaaagttcctgaatttgttcacttgaaatgcccaagcatcacgaatttactggtcttatttggcgtcaatcaagaaaagtgtaactcgttaaaaatcaactacgagaaaaaggaaaattctagatatgataatttatgcacaattttccccgttaacaaaatgctcaaattcctaatgtatttttatagtgatgatgataatgatgatgttagagaattctttctgaaagccttcatatgtttaatcttggatagaaaggtttttaacgctatggaatcggaccatagactgtgttttaaggtcctggaattatttaatgaggcacatttcataaattcatatttcgaaattgtggacaagaacgacttttttttacattataggctactacaaatcttccctcatttacaaagcgccttgctcaggagacgctttagtgaaaagcaaggtcggactgaaactatacagcaaaatataatcaaagagtttaacgaattttttgattgtaaaaactataaaaatctactatattttattttaacgatgtatggctcgaaatttattccttttggtcccaaatgtcaagtaacagaatatttcaaagattgtattttggatatttctaatgaaacgacaaatgatgttgaaatttctatcctgaagggaatattaaatttgttttctaaaatcaggtaa

SEQ ID NO: 1603 - DNA, 1227 bp, Saccharomyces cerevisiae
atgagtagaggcaaactggaagatatggaacaaaaggaaacatcggaagttgactggataatctgttttgctttaattcaatccaggaatcctacgttgtggaagagggcactttcaagaaagaaaggagatgtcgaagatgtaggtgctctcaagagtgaaaaaaatttaaaaataaatcctcgggaaaactcaaaacatatatacaaatgggttgcgcctttcgaaaatggatttttgaataataaatcactgtttgctcatctggaacctatatacaatttcctttgccagaataagtacaaaagcttcgaagatgcagttggtttaaaggagctgcaatcatttagcaaagatgtatcaactgctgatataaacaactggtttttaccgagatataaaattctgctaaaaatcctgagcttaaaaacaaaagaaattgactttagagggttatcgcaagtgtttcaaacactccaaatcttgttagtttctcattattcgcatcgcatagattctgattcttcttttaagaggacactgatagacgttcatgttttcaatttcatcgccaagtttctgtttaatagaattttattgaagaagaaccaaaacgatccaaaatggcttcaaaacttttacgaccagggagatggcaaacatttatgtgataaagttgactacaagcgcttgtgttcgttgcattttacccttatttactctattattaacattcaactcatcaaaatcaagacaaaccaaacatttgaaccgcagatattaaaatacgtatctgttctgaaattaattgaacacatacttatcatcatcgaaagtctgatacatgtacttattagatttgtatcgaagcataaactaatatgcatcaaccggaaaaaggcgtactgtcgagtatacctcgaaagagaattgagtttgaagaaaacctacttaaagaacttttacagtgtaataagcggtgtcccagaaaaagagttagggggtctattgaaaatactcaagatagttattctatcattgctcgagacatttgaaagcattgaatggcagcacttaaaacctttcctggaaaaatttccggctcatgaaatatcgcttcagaagaaaaggaaatatatacaggcggccttattaattactgccgaaagaaatttgatagcgcgctttcgattgtcaagatggttcaatgagacagaaaacatttaa

SEQ ID NO: 1604 - DNA, 1536 bp, Saccharomyces cerevisiae
atgttacataggataaacccagtacggttttctatgcaatcttgccaaagatacttctcgaagttggtatcgccattggaacagcataaaagtaatacttttactaatagagtcagaatccccattgaggcaggccaaccactgcatgagacaaggccgttccttataaagtcgggcgagttgacaccaggcatttcagccttggaatactatgaaagaagaattaggttggcggaaacattgcctcccaaaagttgtgtgattttagctggtaacgatatccaatttgcatctggagcagtattttatccgttccaacaggaaaatgacctgttttatcttagtggttggaatgaacctaattcggtcatgattttagaaaagccaacggatagtttaagtgatacaattttccacatgctggttccgccaaaggatgcgtttgctgaaaagtgggaaggatttaggtctggggtttatggtgttcaagaaattttcaatgccgatgaatctgcttccattaacgatttgtctaaatatttgcccaaaataattaacaggaatgatttcatctattttgatatgctatcaacttctaatcccagttcgtccaattttaaacacatcaagagcctgttagatggcagtgggaatagcaatcgatcattgaattccattgcgaataagaccatcaaacccatcagtaaaagaattgcagagttccgtaagatcaagtcccctcaagagttgagaattatgaggagagctggccaaatatcaggaagatcgttcaatcaagcctttgctaaaagatttaggaatgagagaactttagattcctttcttcattacaagtttatatccggtggttgcgataaggacgcatatatccccgtggtcgctactggttcgaattctttgtgtatccattacacaagaaacgatgatgtgatgtttgacgacgaaatggttcttgtagacgctgctggctccttgggtggttattgtgctgatatttcgagaacgtggcccaatagtgggaaattcactgatgcacaaagagatctctacgaagctgtattaaatgttcagcgtgattgcattaagttatgtaaagctagcaataactattccctccacgacatccatgaaaagagtatcacactcatgaaacaggaattgaaaaacttgggcatagataaagtctccggttggaatgttgaaaaattgtatccgcactatattggacacaatttaggtctagatgttcacgatgtgcctaaagtttccaggtacgaaccattaaaggttggacaagttattactattgaaccgggtttatatattcctaacgaggaatcatttccatcttactttagaaacgtcggaataagaattgaagatgacatagccattggtgaagatacttacactaatttaactgttgaagcagtgaaagaaattgacgatttagaaaatgtcatgcaaaatggcttatctacaaaattcgaggaggaccaagtggcaccactgtaa

SEQ ID NO: 1605 - DNA, 522 bp, Saccharomyces cerevisiae
atgaatttcaaggagccgctagtgaattttttaaaatgcgtcttgaataacataaactcggcattttcgcataggattgatcaattgcaattgcagctgttgcgggaaacaaatatcttgagggttttgaacaggggaatagagagactgtttagcgagaatccaaggacccattctgtttcccgtatcgtggtggaaaaagatgtgggctgcagaattggacgatatgtggaaggttctaaatatgaactggtagagtccagggcgaaagaaatacaaatatattatgaaaggatggtttttgaaataacacaagaattgaaaggggacaagcgggtgtttgccttgattgcaaatctttcccaaagatatagcgcagagaggaaagaaatacgaaatgtaaaggtgcatggtgggcggccatgtaatgagaacgaattccaggtgattccgataagattcaaacctattaatttggaaagaagagcacgactgataagaaagaagaagactattaattaa

SEQ ID NO: 1606 - DNA, 3282 bp, Saccharomyces cerevisiae
atgccatttgatgttttgatatcaaaccaaaaagataataccaatcaccagaacatcacgccaatatcaaaatcagttcttttggcgcctcattcaaaccatccagtgattgaaatagctacgtattcagaaaccgatgtatacgaatgctatatacgtgggtttgaaactaaaatagtgatgagaagaactaaagatgattggattaatattacccaggttttcaaaatagctcaattttcgaagacgaaaagaactaaaatactggaaaaggaatcaaatgatatgcaacatgaaaaagttcaaggtgggtatggtaggtttcaaggtacttggatcccactggattcagcgaagtttttagtcaataagtacgaaataattgaccctgtggtcaactccatcttaacttttcaattcgatccaaataaccctccaccaaagagaagcaaaaatagtatattgaggaagacttcgccgggaacgaagataacttctccatcgagctacaataaaacaccaagaaaaaagaacagtagttcatcaacatcggctacaactacagctgcgaataagaaaggcaagaaaaatgcatcgatcaaccagccgaatccaagtcctttacaaaaccttgttttccaaactcctcaacagttccaagtaaattcatcaatgaatataatgaacaataatgataaccacaccacgatgaatttcaacaatgacacaagacacaatttaataaataatattagtaacaacagcaatcaatctactattattcaacaacaaaaatccattcatgaaaactctttcaataataattattcggcaactcagaaacctcttcaattttttccaattccgacaaatttacaaaacaagaacgttgctctgaataaccctaataataatgacagtaatagttacagccataacatcgacaatgtcattaacagcagtaataacaataataatggcaataataataacttgatcatagttccagacggacctatgcaaagccaacaacaacaacaacatcatcatgaatatttgacgaataacttcaatcattccatgatggactccattacaaatggcaatagtaaaaaaaggaggaaaaagctgaatcaatctaatgaacaacaattttacaaccagcaagaaaaaatacaaaggcatttcaaattaatgaagcaacccttattatggcaatcctttcaaaatccaaatgatcaccataatgagtactgtgacagtaacggcagcaacaataacaacaacactgtagcatccaatggctcctccattgaagtattttcatcaaatgaaaatgataacagtatgaatatgtcttcacgatctatgacaccgttcagcgcaggaaatacttcatctcaaaacaagttggaaaacaaaatgacagatcaagaatacaagcagacgatattaacaatactatcatcggaaaggtcttctgatgtagatcaagcgttgttggctactttatatccggcgcccaaaaattttaacataaattttgaaattgatgatcaaggtcacactccactccattgggctacagctatggcgaatattcctttgataaaaatgctaattaccttaaatgctaatgcattacagtgtaataagctcggttttaattgcatcacaaaatcaattttctacaacaattgctacaaggagaatgctttcgatgaaataatatccatcttaaaaatatgtcttataactcccgacgtaaatggaagattgccatttcattatttaattgaattgagcgttaataagtccaaaaatccaatgataataaaatcttatatggattcgataatattgagcttgggtcagcaggactacaatttgttgaagatatgtttgaactaccaagataatatagggaacactccactgcatttatctgctttaaacttgaacttcgaggtttacaacagactggtatatcttggtgcgtcaacagatatattgaatctagataacgaatcgcctgcgtcaataatgaataagtttaatactccggctggcgggtcaaacagcagaaacaacaacaccaaggcagatcgaaagttagctcgaaaccttcctcaaaagaattattaccaacaacagcaacagcaacagcaaccacaaaacaatgtcaaaattccaaaaattataaaaactcaacatcctgataaagaagattctactgcagatgtcaatatagctaaaacagattctgaagtcaacgaaagtcaatacctgcattccaaccagccaaattctacaaatatgaacactattatggaagacttgtcgaatattaattctttcgtgacgtcgtctgtcattaaagatataaagtctacgccgtccaaaattcttgaaaactctcccattttatacagaagaagatcacagtcaatatcagatgaaaaagaaaaggcaaaggataatgagaatcaagttgaaaagaaaaaggatcccttgaatagtgtgaaaactgccatgccatcattggaatcgccttcttcccttctgccgatacagatgtctccactaggaaagtactcaaaaccgctttcgcagcagatcaacaaattaaatacaaaagtttcttctctacaaagaataatgggtgaagaaattaaaaatctggacaacgaagtagtagaaaccgaatcctctatttctaacaataagaagagattgattacaatagcacatcaaatagaggatgctttcgattccgtatcaaacaaaactcccataaattcgatatcagatttacaatcaaggattaaagaaacatcgtcaaagttgaattctgaaaagcaaaattttattcaaagcttggaaaaatctcaagctttaaaactggctacaattgtccaggatgaggaatcaaaggttgatatgaatactaactcaagttcacatccagaaaaacaggaagatgaagagccaattccaaagtcaacgtcggaaacttcttctcctaaaaacaccaaagcggacgccaaattttctaatactgtacaagaatcatatgatgtaaatgagacgttgagactagcaacggaactaactattctacagtttaaaagaaggatgacaacattgaaaataagcgaagctaaaagcaaaattaattcatcggtgaagttagataaatacagaaacttgattggtatcacaattgagaacattgactcaaaattggacgatatagaaaaggatttgagggcaaacgcataa

SEQ ID NO: 1607 - DNA, 2637 bp, Saccharomyces cerevisiae
atgagtgaatctaatctatctagttttatcagtacaaattatttcaatttaaggtcggcggctaattcttcaaactctatttcgaagccaagtacgaaaaagagtatcaggaaccaaaaatcgccaactaacataagtagttgggctctcaaaaagaaaacgctacaaatagcagagacaacatgggaaaacaatgaaaaagattcaacacatagccattacttaatgactggatcaatggcctctaggaccgcaacctccttaagtcgatacagcaccaacgcttcactcctcggtcctagtattgactgtgttctttgttgcatatacgaagtgccaagagacataagtacgcggattgggttatgtattatcaactgtaacacgggacagatgtatctttcagatttcatggattcacaaatttacattcgtgtagttcataaactccaaatttaccaacctacggaaatactgattccaagcagttctctagctccaacagtatcaaaattagcgacaatgataaaatttaatgtggccgagacagttaaaattgaagagggttcacgaaagtgcttcaatagccaagatggactggcggcgattacaaagtatttaatggatgatacaaaaaaggacttgaaaatcgaggagattatagataaaacgtttgctctttgtgctgcatctgctgcgataagctacatggaagagattatatccaaaagcagccgaaatttgaatgcgtttcgaaaactacgtatacagtttgaaggaacagaaaatacaatgctgattgattctaaaaccgtcagaggtttagaacttgtagaaaataaattggataagaatggcatatcactatggaagttcttggataccacgtccactaaaatgggacaaagatcacttcggaacagtatactgcagccattaactgataggggcagtatcgaaatgagactagaggccctagaagaattgaaagccaatgatgaccttctacaaaaattaaggctagaaatgaaatcattgcctgatctagataagttattttcaaggttattatgcattaatcattctgcaataaaacctgaccaaagaattaattacgttttgttgctaaaggaaactttacaaagcgtgaagtcattgaaagacgcacttaatgatcagttaattcaaagccgtttaattagcgagaccaaaaaaatattcaataatgacgcaattatggaaattgaaaaattaattaatagttgtataaatgaagactgtgtctgggcatcctcagctatacaactacttaaccaacgttcatatgctgtgaaaagtgattccaatgggcttttggatgtttctagacaaatctacaaagaggtaaaagaggaattttttcgtgaggtagaagatcttaccgctaaaaacaaaatcaatttagatcataattacgattctgcacgaggcttttatctcagaataaaaagacaggaatttaccgatgacgtcgctacacttccagacgtattcatttcaagaacaataaaaaaaaattatattgaatgtacaaccctaaatataataaaaaaaaatgcgaggttgaaggaagttatggaagagattttacttttaagtgaagagacagttgatgaactgctcgataaaattgcaacccatatttctgaactatttatgattgcagaagcagtggctatcctggatttggtttgttcattcacatataatttgaaagaaaataattacacaataccgatttttacaaacaatctactaattcgagattcaagacacccactacttgaaaaggtactaaaaaattttgtccctaacaccatatcaagtacaaaacatagctccagcttacaaatcataaccggatgcaacatgagtggaaaatctgtttatttaaaacaagttgcccttatttgcataatggcccaaatgggatcaggtataccggcactttatgggtcttttcctgtctttaaacgtctacatgcaagagtctgcaatgacagtatggaattaacctcatcaaattttggttttgaaatgaaagaaatggcttactttttagatgacataaatacagaaacactgttaattttagatgaacttggtcgtggttcaagcatcgctgatgggttttgtgtgtctttggcagtaactgaacatttacttcgaacggaggcaacggtatttctttctacacacttccaggacattcctaaaataatgtctaagaagccagcagtttcccatcttcatatggatgcagtccttctcaatgacaattctgtcaaaatgaattatcagttgacccagaaatctgtcgcaatagagaatagtggaataagggtggtaaaaaaaatattcaacccggatattattgcagaagcgtacaatatccattcgcttttgaaaattgcaaaagcaaggactgaaaacgaagattcaaatggcgttgttgatcaaaagaccataaaccaaatgaagagaatacacaatcttgtagcgatattgaaagaatgtgcaggaaatgaaaaagagcccttgactttagggaaattaaaagaaataaactccgacttcatcgaaaattttgaagaataa

SEQ ID NO: 1608 - DNA, 1641 bp, Saccharomyces cerevisiae
atggttagttcaagtgtttccattttggggactagcgccaaggcatccacttctctaagtagaaaggatgaaattaaactaacccctgaaacaagggaagctagcttggacattccatacaaacccattattgcatactggacggtgatgggtctctgtctgatgattgcctttggtggattcatttttggttgggatacaggaaccatttcagggtttattaaccaaacagatttcaagagaaggtttggtgagttacaaagggacggcagttttcaactatcagatgtcaggacagggctaattgtcggtatcttcaacataggttgtgctttaggtggcctaacgctgggacgcctgggcgatatttatgggcgtaaaatcggcttaatgtgtgttatactggtgtatgttgttggtatcgtgatccagattgcttcctctgacaaatggtatcaatattttattggtagaattgtttctggaatgggtgttggaggtgttgctgtgctgtcgccaactttgatctcagaaatttccccaaagcacctaagaggcacttgtgtctctttttaccagctaatgattacccttggaattttcttgggctactgtaccaattatggtacaaagaaatattcaaattcaatacagtggcgggttcccttgggtttgtgttttgcgtgggcaatctttatggtgattggaatggttatggttccggaatcgcccagatatttagtagaaaaaggtaagtatgaagaagctagaaggtctttggccaaatcaaacaaggtcacagttactgatccaggcgttgtttttgagtttgatactatagttgcaaatatggaattagaaagggctgttggaaatgccagttggcacgaactcttctcaaataaaggagcaattctaccaagggtaataatgggaatcgttatccagtcactgcaacagcttactggctgtaattattttttctactacggcacgaccattttcaatgctgttggaatgcaagactctttcgagacttccattgtccttggggctgttaattttgcttctacatttgttgcactatacattgtggataaatttgggcgtcgaaaatgtttattgtgggggtctgcctcgatggcaatttgtttcgtcatattcgccaccgttggcgtcactagattatggccacaagggaaagaccaaccttcttcgcaaagtgctggtaatgttatgatcgtttttacttgtttcttcattttctcttttgccattacttgggctcctatcgcctatgtcattgtggcagaaacttatccattaagagttaaaaatcgtgccatggccattgcggttggtgcgaactggatgtggggtttcttgattggatttttcacaccctttatcactagatccataggattttcttatggctatgttttcatgggttgcttaatcttttcgtacttctacgttttcttctttgtttgcgaaacaaagggattaactctggaggaagttaatgaaatgtacgaagaaagaataaagccatggaagtccggaggttggattcccagttctagaagaacaccacaaccaacaagcagtacaccattagttattgttgatagtaaataa

SEQ ID NO: 1609 - DNA, 447 bp, Saccharomyces cerevisiae
atgcccaaatcccgaccaaaaaggaccattgcgtcttcctcgtcagttttttatggaagttcacctttccaaaatgatggctacatcaaagtaatggaactcgtatcacacattgtcattgaaataaatcattcacctaccgcaacaacggatgaaacgagaaagcagaataatccggagctgaaagtgaaagaaccagtttgtaacctcaagaagtgggaaaataacactaactttatattggaagatcatacgaagaataaaacaaaactttctagcacagataggatacgtaagtggtttagaagacatatattaaaggaagagatcgaaatcctttcccatggaaaacaattgagtagtattgatgaggattattgcccttcaaatgttcttgtaggatgttcaagagatctaaataaactcagatcatttcaaaatttttag

SEQ ID NO: 1610 - DNA, 2499 bp, Saccharomyces cerevisiae
atgccgacaccttcaaacgctatagagatcaatgacggttcgcataaatctggtagaagcactaggcggtctggatctaggagtgcgcacgatgacggtctagattcattctcaaaaggcgattcaggtgctggagccagtgctggtagcagtaatagtcgatttagacatcgaaaaatatctgtgaagcaacatcttaagatatatctgcctaacgatctgaaacacctggataaagatgaattgcaacagagagaggtggttgagatcgaaactggtgtagaaaaaaatgaagaaaaggaggtccatttgcatcgaatattacaaatgggttctggtcatacaaagcacaaagactatattccgaccccggatgcttctatgacttggaatgaatatgataagttttatacgggcagtttccaggagaccaccagctacatcaaattttctgccactgtggaggattgctgtggtaccaactacaatatggatgaaagagatgagacctttttaaatgaacaagtcaacaaaggttcatcagacattttaactgaagacgaatttgaaatactttgttccagttttgaacatgctattcacgagcgtcaaccattcttgagtatggatccggaaagtatactttcttttgaagaattgaagcccacattaataaaatcagatatggctgatttcaatctaagaaaccagctgaatcatgaaataaattctcataaaacacattttatcacacaattcgaccccgtatctcaaatgaatacgagacctttaattcagctgatagagaagttcggctctaaaatttatgattattggagagaaagaaaaattgaagttaacgggtacgaaatttttccgcagctgaaatttgaaaggccgggtgaaaaagaagagattgatccctacgtctgtttcagaagaagagaagtgagacatccgcggaaaacaagacgtatagatatcttaaacagtcagcgtttaagggcgttgcatcaagaattgaaaaacgcgaaggacttggccctgcttgttgctaaacgtgagaacgtttccctaaattggattaatgatgaattaaaaatattcgatcaaagggtaaaaattaagaatttgaaaagatctttgaacattagtggagaagacgatgacttgattaaccacaagagaaaacgccccacgattgttacggtcgaacaaagggaagctgaactaaggaaagctgaacttaagagagcagctgctgcagcagcggcagcgaaggcaaagaacaataaaaggaataaccaacttgaagacaaatcttctaggctcaccaagcagcaacagcagcaactgttacagcaacaacaacaacaacagcaaaatgcccttaagactgaaaacggaaagcaactcgcgaatgcatcctcttcttcaacatcacagccaattacgtctcatgtttatgtcaaactaccatcttccaaaattcctgacattgtattggaagacgtggatgctctattgaacagcaaagaaaaaaatgcaagaaagttcgttcaggaaaagatggagaaacggaaaattgaagacgcagatgtctttttcaacttaacggacgatccctttaatcctgtatttgacatgtcgttgcctaaaaatttttcgactagtaatgttccctttgcatctatcgcgtcatccaagtttcagatagatagatctttttattcttcacatttaccagaatacttgaaggggatatctgatgacatcagaatatatgattcaaatggccgttcgagaaacaaagataattacaacttggataccaaaagaatcaaaaaaactgaactgtacgacccattccaagaaaatttggaaattcattcgagagagtatccaataaaattcaggaagagagttggtagatctaatattaagtatgttgatcgtatgccaaattttacaacatcgtcgaccaagtctgcatgttctttaatggattttgtagatttcgattcaatcgaaaaagaacaatattcaagagaaggtagtaacgatactgactcgattaatgtttacgattccaaatacgacgaatttgtcagactttacgacaagtggaagtatgattctccacaaaatgaatatgggatcaagttttcagatgaaccggcaagacttaaccagatttcaaatgatactcaggtgattagattcggaacaatgttgggtacgaagtcctacgaacaattaagggaagccaccataaagtatcgtagggactatatcaccagactgaaacaaaagcatatacaacatttacaacagcaacaacaacagcagcagcagcaacagcagcaagcacaacaacaaaagcagaaatcacagaacaataattcaaattcttcgaactccctaaaaaaattaaatgattcgttaatcaattcagaagcgaaacagaactcttctataacccagaaaaattcatcatga

SEQ ID NO: 1611 - DNA, 1623 bp, Saccharomyces cerevisiae
atgacagcaatgaaagctattgtctggagacttcccaagatgccgaaaatcaaaattacaaaaacttatgaagttacgaaaattacggcgatattgacactagtaggatttataatgggccttgaggtgccgtcattggcaacttttctcacaaacaaaacgtttaatgagtacttcaagtatccaactcctttacaacaaggtttactcatggggtccacccccctgggtggtatcatgggatgttttatttgctgcataatgaatgatagattcagtagaatatatcaatttcaatcgggaataataatatggaatattgttacgttattgaacttttgtatttgggatatattaggtttactaatttgccggatgatcaagggtatgatccttgggaacttttcaattttagtagcatcctacgcaaatgaagttatcccccgcggcaagcgtggaagtacgatgagctatattcaattgtgtttaaccattggaattcttgttatgcattatttgtgcattgcattaagtctatgggattctcattttgcgttccgtatagcgtggtgcataggaatcattcctggattactgttctggatggctagctacgctctacctgaatcttatcactggctagtactacatgggaagatgagtgaagctcaggaaattcagcacaatttagccaaaaagtttaatgaaagccagccaagggatgcagtccctgagatgagtaagatcgaattagcaggagatttttggattggagttaatgatttggacttctccaaaaaattacctcggggttcgtttaagcctttgattcttggaatgactttacagttattggttcaatttagcggtataaacattatccttggttatattacatacatttgcgagattgtagggcttgaaggcaatgtaaaactattcaccagttccattccatatttcatcaacatggttttgagcttgttaccgattacattcattgattacactagcagaaagctaattaccttgttgggtggctttcccattagtgggttgctcattacaatcggcgcattatttgtgaagtatggtcaagacaccaagcccatcgacggcaataggagtttagtttggtcaattggagaaaacccgtttgtgggaggatggattctaactttatgctttctaattgttggaatatttgccatgagcctttccagtataccttgggtttacacgaatgaaatgttgccctcacgagtgaaagttaagggatttgccatttgcgtaacgtttggatggttgggcaattttattttaacgtttctatgccctgtgatgattgaaagattaaaaggcacaacatttataatatttggatctttgacattcttgatatcactttcagttttgatttggttcccagaaacaaagggtatgagcatagaagatattgataaattcttcgaatttgagagtaaagagggcaccaatttacatggggaaaagggtatcaaaacgccggactcaaattctaatggcggttctacaagatcctcccaagaagggcaattgcataaacctataaaactgaaaagcgatgaagagatgatcatatga

SEQ ID NO: 1612 - DNA, 639 bp, Saccharomyces cerevisiae
atggctgatttatttgctcctgctcctgaaccatctacagagttaggacgtctcagagttctttctaaaagtgctggtattagagtttcccctctcattttgggaggaatgtcaattggcgacgcttggtctgaaatcctaggatcaatgagcaaggagcgagcttttgagttgctcgatgctttttatgaggcaggtggaaatttcattgatactgcaaataattatcaaaacgaacagtcagaagcttggatcggtgaatggatggtttcaagaaaattacgcgaccagattgtaatcgccaccaagtttaccactgactataagaaatacgacgttggtggtggtaaaagcgcaaactactgtggcaatcacaagcgtagtttgcatgtgagtgtgagggattctctccgcaaattgcaaactgattggattgatatactttacgttcactggtgggattatatgagttctatcgaagaagttatggatagtttacacattctagtgcagcaggcaaggtcctctatttgggtgtgtctgatacgcctgcctgggttgtttctgcggcaaattactacgctaaatctcatggtaaaaccccttttagcatctatcaaggtaaatggaacctgttga

SEQ ID NO: 1613 - DNA, 528 bp, Saccharomyces cerevisiae
atggaatctattatcctcagcattgccatctttattggcgtcctccttggcactagcgttggtgctggcagtggtagtagcattagtcctgacgttgatgctggcagtggtagtcgcactagtcctgacgttgatgctggcagtggtagtcgcattagtgctggagttggtactttcagtggtagtagcactagtcctgacgttgatgctggcagtggtagtagcactagtcctgacgttggtgctggcagtggtagtagcattagtgctggagttggtagtcgcattggtactggcattggtagtcgcattggtactggcattggtactggcattggtagtcgcattagtactagcattggtagtcgcattagtcctgacgttggtactagcagtggtaatcgcattagtactggcgttagtactggcattagcactaccatgaatgcacgtgtcgctgtcctcatcactgctgcaatactttctgcacctgtcactgctattgctctcctggaagctagacggtaa

SEQ ID NO: 1614 - DNA, 609 bp, Saccharomyces cerevisiae
atgctaaattataaattgattttattgttttcctctttcctacaattaatctctttttctggctttatgatatgttgtttaacttcaccaataattagaaactgggggctggctcaagctgctggagtttcatatggtacctttggttactgtaaaactttgaattctttttcctgctctcgagtacgtttaatatataacacctcgaaagaaatattacctggcccttctcttgaacgttggtggctgagtcctaaggcaagacatacaataggaggacttttgatttcgataccggttgctacatgtttgactttcatttcttttgcacttcccttggttattatttttctttttcagactggaggaactaatgtctcacttattacttccaacgctatattacacatattgacacttttatcaactatttttgcatgcaccgtgatcctgttactttgcatgcaccgtgatcctgttacaatttcatccttatacgacttggtgtggctggctaactgttccctgttccctctgctcgttattggcgtgcattttctcagttttaggtttgatacgtctgcgcagtcagacagaaaacatagctaa

SEQ ID NO: 1615 - DNA, 345 bp, Saccharomyces cerevisiae
atgagcgcgagtgacaaaacaaagctctgcaataagggcatgagcaggacatcgcgaaccacaactttcgtaatcacacccgccttccgtgagagagacgatgagggtgccaattccctgtgtaaagctttcttgaacactttctcgaacctcaaatcaggtatgttcaaatgtttgttgggagttggcgccgtaggtacgttcatttctacgttcccacagtttttcttgctgccttgccttctttgcgtacggtgtgtatgtgtatgtctgtgtgcaagtatttcctatgctgcaagtgcgattttctcgttttctatttttttttttttttgcctcgcctaa

SEQ ID NO: 1616 - DNA, 456 bp, Saccharomyces cerevisiae
atgatatttggacctactagtgtctatagtaagtgctcggccaagtcaagcggtatcattaaagacaccgccaagcttccaatatcacgagtaaggatcaaagttatgttagagataactgtgagttttttattttttgatcgatttccaagatcattcctcaatcataatctatatgattcaatatgtcctttctttgcgtggcaatatacctcatattatctttctatttacaggcagtcctttctatttcatttcttacaaaaggattttagcaacgacttcgtctcagaagagttaatatatgcactagttgcactaggcgcaaaaaattcctttgacaatagcctttcaaagcatacatatgaatattacaaccactcaaagagaaatttactggaagattcgacaaataaaaattcagctttttcaagtgcaagcgtaacaaagccataa

SEQ ID NO: 1617 - DNA, 111 bp, Saccharomyces cerevisiae
atgctaatcttcataattcattatcatcgccacttggcattgcatttaatgggcgccttccaaaaacattcaaatagtatcagcccccccccaaggaaaggctttatttga

SEQ ID NO: 1618 - DNA, 393 bp, Saccharomyces cerevisiae
atggaagacacgatacgtccattaaattacgcagatatcgagaccagcgggcccataaaccttcttgagacaactaataacctaaaaagctcgttaaaaaagttttcacaaaaggcaaagggatcacacatttccagagaaaggattcaccattttagaaaatggaaaaataagaccgaatcactttcagaaaaccatttgaagcctcctcctgacgtcgactctctatgtttcagtaactgctttcaacctgacgccctgtctggaaatgtatttttaccccccagaagctcaaacatgtattggaatgaaaagcaattacaattagaaatggaaattctaaaatttttatcactaaatactagcaatgaatgctgcacttctgatgattag

SEQ ID NO: 1619 - DNA, 657 bp, Saccharomyces cerevisiae
atggcaccgaaaaagaaatcaaacgatagagccattcaggcaaaaggctcagaagctgaacaattaatagaagattacttggtgtcacaatataaaccattttctgtaaatgatatagttcagaatttgcacaataaagtgacaaaaacaacagcaaccaaagcattagaaaatctcgttaacgagaaacgcatagtgtctaaaaccttcggaaagattataatttactcttgtaatgaacaagatacagcattaccaagcaatattgatccttctcagtttgattttgaaactgtattgcaactgagaaatgatttaatagaactagagagagataaatcaacggccaaagacgctcttgactctgtaactaaagaacctgaaaatgaagatctcctaacaatcattgaaaacgaagaaaacgagttgaaaaagattgaatcaaaattacaaagtctacaggatgattgggatccagcaaatgatgagattgtcaagcggataatgtctgaagatacgctgctacaaaaagaaatcacgaagagatcaaagatttgcaaaaacctaattgctacaataaaggactcagtgtgcccgaaaaatatgaatgaatttttggtatgtattttgaacatttttcgagaccttttcttttga

SEQ ID NO: 1620 - DNA, 363 bp, Saccharomyces cerevisiae
atgaaattcatttctacctttctcacttttattttagcggccgtttctgtcactgctagttccgatgaagatatcgctcaggtgccagccgaggccattattggatacttggatttcggaggtgatcatgacatagcttttttaccattcagtaacgctaccgccagtgggctattgtttatcaacaccactattgctgaggcggctgaaaaagagcaaaacaccactttggcgaaaagagaggctgttgccgacgcttggcactggttaaatttgagaccaggccaaccaatgtacaagagagaggccaacgctgatgcttggcactggttgcaactcaagccaggccaaccaatgtactga

SEQ ID NO: 1621 - DNA, 1266 bp, Saccharomyces cerevisiae
atgtcccagctgacggagttcattagctgtatccctgtggttaatgaagaacaaaatgaagaagatgagcgtggcctctgtaagattcagattgaagatggcgctatgttggaaacattagatgagaacagtctttcagggcttagaatagagaaaatgttggtaagtgaaggtacaggaattttttccaaaagcagttttggaatcaatgatttgcgaatctttacgggagaaaatatcgatgaagagtctaagaaatatgtgtggtatgaactactcaaaatgttaactggtcacaaagtgtacattgcatcgttagacgaaaaagtcgtattcacaaaatggacgtgcagaatgcaagatgatgaggtatggaaagtagttatggagttggagtcatcggcgatcataagaaaaatcgctgaacttaccttgcatccagtcaaaaagggagagattgatttatttgaaatggcagataaactctataaagatatctgttgtgttaacgattcttaccggaatataaaggagagcgattctagcaatagaaatcgagttgaacagctggctcgggaaagggagctattggataagcttttagaaacacgtgatgaaagaaccagagcaatgatggtaaccttgttgaatgagaagaagaagaaaataagagagcttcatgagattctgcgacaaaataatatcaaattgtctgacgatgatgttttagattctgcgcttattaatacggaagtgcaaaagccaatttctgagttaaactctccaggaaaaagaatgaaacgaagaaagacggtagtagagcctcaaaatttacaaaagaagttgaaagacacaagtcggaggagagctaatagaaaaatatctaatcaatccgtgatcaaaatggaagacgacgattttgatgactttcaatttttcggactttctaaaaggccaattattactgctaaagataaactcagtgaaaagtacgatgatattacctcttttggagatgacacacaatcaataagttttgaatctgatagtagcagtgatgttcaaaaacatttagtgtctttagaagacaatggtattcaaatatcagcaggaagatcggatgaagattacggagacatttctggttctgaatctgagactgatgcaagtgcaggggaaaagaagagctccaaccatagtgaacaatccggtaatgatagggaaccttgcttgcagacagaatcggaaacggatatagaaacatag

SEQ ID NO: 1622 - DNA, 1038 bp, Saccharomyces cerevisiae
atgtacaactttttagaatttttcttcttttttataacgtacaccttatttaagagcactttcgttcaaggaaaaagttcatttcctggacatgatgtgtgtaagttcgaagaccaaaatttccagacagagttcttcttaaatgttcttaaaggtgacaagttacagaacttgaagcaggagtacgaacaatacaaaaaacaaagtactttgtacacaggctttgtaattgaaaaacaatatgaataccaggtagcgcccttgcaaatcaataattttcttcaagtgaccttttgtaaaggaggaaagccaatttggaatcatattctaccctttcaaaaggatttagattgggcagaaccactatgcattccagcccaggaggatgatactatctcccaaaacagctcagtatgtttcaagtttgcaagggtgcagaaatatacacagcgtaatgtaaccctttactttcctaataaatttgttggattcgtatttgtttgcaattcttcaaagacgcatccccccactcagaacaattttgaaactattccattaacgcctattatttctgatgatattagagattacaaaatatcttggtcaattaaaggaagaatcaccaaggtggtaccttatctacattcgttaagtattcctatgtccaaatatgagatgctcatccattcagataagaacatatcaaacgaattggaatataaatccttaacttcggagttttggaagagctataaaaacttaagaaagtttaaaaacaaagaaatgtcttggataaacgaaataaatcctatggagcaatatgatagctctgggaatgaaaatgtcccgaattttcatgaaaaactagaccgtacaataaatcggattgcgcaaaacatagaaaggcctcatgatgcactaataagagcgatagccgcacataatagaaactctaatagtggaaatattacaagaaggaaatatttgaggaggaagatctcaaagatgttaaaaaataagatacctcttaagaactga

SEQ ID NO: 1623 - DNA, 1539 bp, Saccharomyces cerevisiae
atgtcagtaaacccagaatttatagccgatggcatcgatttttatccaacaacgcccgatgccgcgtatttcaatgccgctgatggtaaaaataaagttaacaggataaatggtaactcagaaaatttacaccactcctttgcatcgggttgccgtagatcatctctttcagtcgactttaatgttacctcgtccgattcagaaaaaagtgaacagagctgcttggaaaacaactctcaagaagacgaatatttttgtgacattttttccactgaattaaaattagatgaaacttctaacaagtcaaccgattattccagttcaaatcaccagtatcctgaacaactggagttgcacaattataaactgctcaataaaattggtgaaggggcattttccagagtatttaaagcagtaggcatcaacacggatgaccaagctcctgttgccatcaaagcaatcataaagaaaggcatttcgagcgatgccatcttaaaagggaatgatagaatccaaggttccagcagaaagaaagtcttaaacgaagttgccatccacaaactggtttcgaaaaataatccgcattgtacaaaatttatcgcattccaggaatcggcgaactactattacttagtgacggagttagtcacaggtggggaaatatttgataggatcgtccaactaacatgctttagtgaagacttagctcgtcatgtcattactcaggtagcaattgcaattaaacatatgcactacatgggtattgtgcatcgtgatgtcaaaccagaaaacctactatttgaacctatcccattttatggccttgatggggacatgcaaaaagaagacgagtttacattaggtgtcggcggaggcggtattggtttagtgaagctaatggacttcggactagccaagaaacttcggaacaataccgcaaaaactccctgcggaacgatagaatacgtcgcatcagaagtattcacctccaaacgatattccatgaaagttgatatgtggagtattggctgcgtactattcacgttattgtgtggatatcctccgttttacgaaaagaacgaaaaaacattattgaagaaaatatcgagaggagattacgaattcttggcgccatggtgggacaacataagttctggcgctaagaacgcagttacccatcttttggaggttgacccaaacaagagatacgatatcgatgacttcctaaatgatccttggttaaattcgtacgattgtttgaaggattcaaactcaaattcttatgccagcgtgcaaagcatactaaatgattcattcgatgagagagcagagaccctacattgtgcattaagctgccaatctgaaaaacaagatgacaccgagttttccagaagtgaaagctcggaatacatatttatgacggaagaagacagaaacctacggggcagttggatcggtgagccaaaagagtgttttaccttagaccttgcaacatcttctatataccgaagaaggaagaacaagatattcttctggtaa

SEQ ID NO: 1624 - DNA, 333 bp, Saccharomyces cerevisiae
atgtttatcttagtatccgttgtaaatatatgtacatatatacatctacatatgttcccattaattagtacatttacctcaatagggttgggcgtcctcatgaaagataaagggaaggaaggaaaaacgataaaagcacaaaatgtgacatatcaaacatttgagaaatacgttgagtcttcttcattctttttcctcgtccacaattttctcaattcatcaacgatgaaaacgctactgctgatgagcaataacaatagtatatcagagataccaagtttctcagttttaaagatactttggaaaaatggtatatatatagcgcacatttga

SEQ ID NO: 1625 - DNA, 1242 bp, Saccharomyces cerevisiae
atgggagctggcactcttttaaatggattagaaaaggaaaactttccaaataacatccattcagatttgcctgcgtatcctaacatggattctcaagaagatggcaatactagtaaggaaagtaaaagaaatagtccagtaaaacagaagtcccaaaaagatgaagaaaagtcatctaaaatggggactgcaagcaacatattccatgaaaataaagatatacacgaaagatctgaacacacggacgattttaatgatggcttaaaactggctccggactctagtccaagcttgaaagagtgtcaatttaaaaattgggaaagtttttggtgtaatacagaaggttacaaaactaaacacatgcagccctttcattttacaagcggattagaagaaataaaggaaccggtcatggaattgaatatttccacttcaccatacaagggacagaggccaaattcagctccaaccgagtattcagctgccacaacagcgtttaccaaaacacaattagaggtgagttttctaaaaaccaacttgcttacatacattaaaaaagagattgacatttgcttgtcaagtgttccattttttgacgacgcagttcaaatgcaaaagaaattcttggaatacagagatattgacttggatgaagaatatgagctcaaaattttgggggaacttttgaatgatttaaacttctttcatatgcaagaaaactctttgctaaatagagagctagcagttcgtagattctccaatcaacctgaaagtcaaaatttaccttccattagggattttagaaatccacttttgccaatagataaccgcccttctcccccattaggattgaaaagaaacggaaagtctttcgaggaaacctatgatttcacgtccaatacatcaaatttttggggagaaaaagcagaactacaaaactccataactggtggaacaccctattttttccaccctaacaatatacatcaaacaaaaccttttatgtcatttgaaaatcaaaatgaacttctattccagagaaaaaattcagattacaagcagcattttaactctggaagaaatatacataatggagtggaatcgaaatcttacagaggtgtggggttaaacgatagttatcaaaagggttatgcagcaatgacaaagtcgtttggaaatatcgatttaaatagaatgcccagaagaagtaatgaagaaatgtatagctggtcacgtaattga

SEQ ID NO: 1626 - DNA, 1038 bp, Saccharomyces cerevisiae
atggtgactggtgaagaaaatgtgtatctaaagtcaagcttatccattctcaaggagctcagtctcgatgaactactaaatgtgcagtatgacgtgactaccttaatcgcgaaacgtgttcaagcactgcaaaatcggaataaatgtgttctcgaagaacctaacagtaaactggctgaaattctatgtcacgaaaaaaatgctcctcaacaatcctctcagacgtctgcggggccaggtgagcaagattctgaagatttcatccttactcagtttgatgaggacataaagaaagaatcagcagaggttcactatcgtaatgaaaataaacacactgtgcagttaccgctggttactatgccacctaataggcataaacggaaaatttcggagtttagttcgcctttaaatggcctcaacaacttaagcgatttggaagattgctctgatactgtaatccacgaaaaagataatgataaagagaacaaaacaagaaaactattgggaatagagctcgagaaccctgaatctacatcgccaaatttatacaaaaatgttaaggataatttcctgtttgacttcaatacgaaccctttaacaaagcgagcctggattctcgaagactttagaccaaatgaagatatcgccccggttaagagaggaagaagaaaattggagcgattttatgcccaagttggaaagccagaggattctaaacacagatcattgtcagtagttatagaatcgcaaaattcggactacgaatttgcgtttgataacttgaggaatagatcaaaatcccccccaggttttggaagactggattttccctccactcaggaagggaacgaggacaaaaagaaatcccaggaaatcatcagaagaaagacaaaatataggtttttaatggcaagcaataacaagatcccaccgtacgagagagaatatgtattcaaaagagaacaattaaatcaaattgttgacgatggatgtttcttctggagtgataaattattgcagatatatgctagatgttaa

SEQ ID NO: 1627 - DNA, 660 bp, Saccharomyces cerevisiae
atggggccaaagagacagacagtatcactccaagagaaaaagaaccggattctgaacttttttcaagagacgtacacattctacaacatcaaggaattagagaaaagcatacctaaaaaatgcggaatctcacccatgatcgttaaagatttagtgcaacaaatgattgatgaagacggcgtcatttcggtggaaaaatgtggtaatattaacatctactggtgctttaaaaatcagacactgcaaaaattgtatgattcaagcgagttgataaaaaaaaagatacaggaagtaaagtgtgatattgccacttataaacaagaactagacaaaacgctagcaactggaaggcgtaaaaaatttacggtaggccaaaaatcatacaatagggaggctctactggaaaagagaaaaaaaattcaggatgaaattaagaaaaagagtaatagtctccaaaaaatagaaagcattagatgggatgcagcaaaaatacaagagaataaacaacagatccgcctaaaaaaagtgcatctggagaaaactactgataacattgagattctcattgattatttatacaagaaattctttttgaagccagaacagataagaaaagaatttggaattccagaagagttcaaggaatttacggaggtttaa

SEQ ID NO: 1628 - DNA, 1803 bp, Saccharomyces cerevisiae
atgattaacgataaactagtacattttctgatccagaattatgatgacatcctaagagcaccgctttctggacagctcaaagatgtgtattcactgtacatcagtggcggatacgatgatgagatgcagaagttgagaaacgataaagacgaggtcttacagtttgaacagttttggaatgatcttcaggatattatatttgcaacgccgcagtccattcaatttgaccagaatctattagtggcagataggccagaaaaaattgtttacctggacgttttttccttgaaaattctctataacaagttccatgccttctactatacattaaaatcgtccagttcttcatgtgaagaaaaagtgtcgagtttaacaacaaaaccggaagctgattcggaaaaagaccaactgctgggtagactgcttggagtcctgaactgggacgttaacgtcagcaaccaggggttaccacgtgaacaactgagcaatcgcttacaaaatttattgagggaaaaaccatcatcttttcagcttgctaaagaaagagccaaatacacgaccgaggtcattgaatacatcccgatatgtagtgactattcgcatgcatctctattgtccacctcggtgtacattgtcaataacaaaatcgtttctttacaatggtccaaaatatccgcatgtcaggaaaatcacccaggattaattgagtgcattcaatcaaaaattcactttatccctaatatcaaaccacaaactgatatttcgttaggagattgttcctatttggatacctgtcataaattaaatacgtgtcgatacattcattacctgcaatatattccgtcatgcttgcaagagcgagctgatcgtgaaactgcgagtgaaaataaaagaatacggtcaaacgtttccattccattttatactctgggcaattgctccgcacattgtatcaaaaaggctttacctgcacagtggatccgttgcgatgtgcggaaatttgattttagggttcttggaaagttttcggtagttattgcagatcctgcatggaatatccatatgaacctaccatacggtacttgcaacgatattgaactattaggtttgcctttgcacgaactacaagatgaaggtattatttttctttgggtgacgggtagagctatagaattgggtaaagagtctttgaataactggggttacaacgtgataaatgaagtttcatggataaagacaaaccaactgggtagaacaattgttacaggtcgtacgggtcattggttaaatcattctaaggagcatttattggtgggcttaaagggtaatccaaagtggatcaacaaacatattgacgtcgatttgatcgtatcaatgaccagagagactagtagaaagcctgatgaactgtatggtatagcagaacggttggcaggcacccatgccagaaaactagagatattcggaagggatcacaatacgcggcctggctggtttaccatcggaaaccagttgacaggaaattgcatttacgaaatggatgtcgagaggaagtaccaggagtttatgaagagcaaaactggaaccagccacactggtactaaaaaaatcgacaaaaagcaaccttcaaaattacagcagcagcatcagcagcagtattggaataatatggatatggggagtggtaagtattatgctgaggccaagcagaatcctatgaatcaaaaacatactccctttgaatccaaacagcaacaaaaacaacaattccaaacactaaataacctatattttgctcagtaa

SEQ ID NO: 1629 - DNA, 1359 bp, Saccharomyces cerevisiae
atgtctggaacatttagttatgatgtgaaaacaaaggagaacgaaccattatttgagtttaattctgcttattctcccagggtatcgtatcattttaactccaaagtttcacattaccattatggtgttaagcatccaatgaagccgtttcggttaatgctaacggatcacctagtttcctcttatggattgcacaagattatggacctttatgaaacaagaagcgctaccagagacgaattactacaatttcactcggaagactacgtgaattttctctcgaaggtttcaccagaaaatgcaaacaaactgcccagaggcacacttgaaaattttaacattggagacgactgtcctatttttcaaaatttatatgattatacaacactatacactggtgcgagccttgacgccaccaggaaactaatcaacaatcaatcggacatagcgataaattggtctggtggtcttcatcatgcaaaaaagaatagtccatctgggttttgctatgtaaatgatattgtgctttctattttgaacttattacgatatcacccaagaatcctttatatcgatatcgacttacatcacggcgatggtgtccaggaggcattttacaccacagatagggtcttcacgttgtcttttcataaatataatggcgaatttttcccaggaactggtgatctgacagaaattggttgcgacaaaggaaaacatttcgcattaaatgtacccctagaagatggcatagatgacgactcatatataaaccttttcaagtcaattgtagatcctctaataatgactttcaaaccaacacttattgtccaacaatgcggtgcggattccttaggtcatgatcgcttaggatgcttcaatttaaatataaaggcacatggagaatgcgtaaaatttgtcaaatcatttggtctaccaatgctagtagtgggcggtggaggttatacacctagaaatgtatcacggctttggacctacgagacaggaattttaaatgatgtcttgctaccagaagacatccccgaagatatcccattccgggactcattcgggccggattattcactttatcctatgttagatgacttatacgaaaacaaaaacagtaaaaaactactggaagacattagaatacgatgtctagaaaatatcagatacttgcaaggagcaccaagtgtcagaatggatgctgaatgcataccgacacaagatataagtgccctgacagaagaagaggataaaatcattcaagaaatgaatgaagaaacagaagcagacagttcaaataggctagaagaaatggaaaaagaaaacagtggattgattgccttttcatag

SEQ ID NO: 1630 - DNA, 444 bp, Saccharomyces cerevisiae
atgggaattattacactatccggcaatgttctacatttattgaaagcctacccaaaaaagggccttgaagaggtttctcaaccagagcctaatacagcaaatgattcctcgactgaatataaaggaaaaagcaaggatgattttcaaatggtcgaaaaatccaatacagatgagagatacaattttacaagaacgaaaaaatggtttttattgatgacctcagaatattacaaactaatggaaaacagacttttaatgttttgcattatcgcttgctcttttatttgtgctatccaatttcttttctttataatttattggaccaacattgttccacggaagacgcaaagggcaataactaacctaaattacgattatttaacagcccatctaaaagagcaatgcgttccatatgcgaaaattcttgaccaatgtattctctag

SEQ ID NO: 1631 - DNA, 870 bp, Saccharomyces cerevisiae
atgggtgaaaaacgtaaccgtaatggtaaggatgcaaattcccaaaacaggaagaaatttaaagtatcttccggattcttagaccctggtacgtctggaatatatgccacatgttctagaagacatgaacgtcaagcagcccaagagttgcagcttttattcgaagaaaaatttcaagaactctatggggatatcaaagaaggagaagatgaaagtgaaaatgacgaaaagaaagatctatcaattgaagaccagataaaaaaggaattacaagaattgaaaggtgaagaaacaggcaaagatttatcttcaggggagacaaagaagaaagaccccttagccttcatcgacttgaactgtgagtgcgtgacattttgtaaaacaagaaagccaattgttcccgaagaatttgtgctaagtatcatgaaagacttagcggatcccaaaaatatggttaaacgtactagatatgttcagaaattaacacctattacgtactcttgtaatgcaaaaatggagcaattaatcaagttggccaatttggttattgggccacactttcatgacccttcgaatgttaaaaaaaattataaatttgctgtagaagtgacaagaagaaatttcaatacgattgaaagaatggacatcattaatcaagttgtgaagctggtcaataaagagggttctgagtttaatcatactgtggacttgaagaactatgataaattgattctagtggaatgttttaagagcaatatcggaatgtgtgtagtcgatggggattataaaaccaaatatcgtaaatacaacgttcaacagctttatgaatcgaaattccgaaaggatgaagataagagtgtaaaacaataa

SEQ ID NO: 1632 - DNA, 537 bp, Saccharomyces cerevisiae
atgaccttgtggccacatccggggtcatacaagatcaagtcagcaactttgttctgcagcagagacaagttggggtgtgctttcttgtcggaaagttccctttgcatgtatttcttatataactctctgtctatctgggctctgggcccccacacagcaggacccttgcttctgttcagcattttgaattgcactccagcgagatcagttactttgcccatcagcccatcgagagcgtcgatttcctttacaaggatgcccttacccactccaccaatagaggggttgcacgaacacttaccaatatctgttaacgatggtgtaatgagagtagtatgcgcaccagtcctagatgacgcagctgcagcttcgcagcctgcatgtccagcaccgatgaccacgacctgtgtcttggttgtgggttggaagcttgtcaaagaagatatggtcaaccgcctcctgaggacctgtaagggaaatgaagtacacgaagacgccaaggttgttacacgcagcatcgttctttggggcgtttag

SEQ ID NO: 1633 - DNA, 2115 bp, Saccharomyces cerevisiae
atgattattgaacgttgggaagtaaagttatctaaatgtaaccaaaatgtgggcggctattctgttctgtcaggaaacttaaaagaaaacatcaaactgggaagacgagcacaaaaatatttgaaagagctaagaaatttgcaacttaaaccactgaaaatcggagggtatgaaaactgcggcacgatcaatggtgaagagtattttttggaggtaattcacatcacctctggaagacaaaaaatagatgtagccgttggcaaaacatggaatgtgactaacattgagaatgacaacaaagaagaactacagtatgagttattcaaggaaaagttaaaagtcgggaaacaggacatgttattttttagctggatgaaaagtctttcagttcaattaaatgctcctcttcaccaaaaaatgacggaacacggtttggcagacgataacacgaggttagagtggttcaacatcccacttctcagaagaagtcaatacaggaaaaaggtaccatatccgagtttaagacaaatgtcctctgtactggaagtgcaatgcagcacactaacggaggaaaagttgaacttctgcgttggattttctgataaacctttgtcagaatggaagccccaaatttttgagcaaacctacaatagataccgtttacaacggatctcacctgagaaatctttcaaatataagagtaggtgcagtaagtacaatttcaagaccagttcgcaaagctgggttgtgaaagtcccagaacatgatcaacagcttaatacgtttgaaaaacgttatgatgaactctttgatgctcaatttaataaactagaattttttaaaataagaatgaaaaaattgaaaaagaataagccaattgagaaaaagaactataaaatatggtgtctagaaaaagaagacctaaaggatttggtatgggatcctctgaaaagaatttgcaatcattctaggtatgcaatatttgagcatgttaccataaatagggaggcctattcgatcaaaccattaaggttaacttttcaaaaattagattccggctcccttgacctgatcgataatcaaaaaaagacgtttggtagtataaagcttgcaatgagtatgccagatgtaaaaaaaactgaaaatcagtcaattgaagaaagtgaaagacacgatgaaactgctattgaaacccaagaatttgatgaaaatgattgtctttcatctaaggcggatattaatacatcattagctcctcaaaagagatctttcatcgataatgaactaatgtccatgttagtcaccaaaaaaaaaataaagaaggacaaggatgttagtgacaccggtatatcttccacttcatacttgataaattctgggacatatgcaaattctcatattgaaattcctacctctaattcagtttacaatggaaaggaagattgctcatttaataactactcagtaaagcattcaatattggaagaagatattgagaataaatgcatagccgtaaatgaaaacaaggtgattgagaaccaaaaggtaattcagtcattatgtaaaaattcccatctagaccttatcgaacaatcttactttggcgaatgcgatttcattataaaccattcaacatgtgtatataaaattcaggcgagccgatttatgcaactcagaaataacggctcattgcattacgataaagcggtaaacgatcttttaactgaatttcagagagtcattataattgtggagttttctgaaataatacaagacgttgatcctgatcttttctggaaaatcaaactttatttattgaattcacgtgttgatgtttttttcattcatgagactactgacttttttattgattggatgaaatatttcattgcaagatgggccttttcatataacgatgagaaagaaaaaaatattgcaaatgccgatattcttctagatttgggatttaacatcctcttagtacggaaaattttccagacatatagtctcgaagaattttttatggcaataataaaggaagaaagcaaagctgttaaaatgcttacggtttcacaaatgactcgcctgaagaagttattaaccttagaatggtaa

SEQ ID NO: 1634 - DNA, 3564 bp, Saccharomyces cerevisiae
atgaaaacaaagtttgatcgcctcggtacaggaaaaagaagtagaccctctccaaataatattgactttaacgaccagtctgctacatttaaaagaaataagaaaaatagccgccaaccaagttttaaagtaggtttgtcttataacagtttactggatgattgtgatgatgaaaatgaaacagaggaaatatttgagggccgtggtctgcaattcttcgacaaagacgataatttttcaataacagcagatgatacacaagtaactagtaaattatttgatcacgatttagagcagacacctgatgaagaggcgaagaaacctaagaaggtcacgataaggaaatcagcgaagaaatgtttgagcacgaccatattaccagattcattcagaggggtttttaaatttacagaatttaataaaatgcaatcagaggcttttcctagtatttatgagagtaacgagaactgcataatttcttcaccaaccggatcaggcaagactgtattatttgaattggcaatattacgtcttataaaggaaacaaatagtgataccaataacaccaaaattatatacatcgcgccaaccaaatctctatgttacgagatgtacaagaactggtttccttcctttgtgaatctttctgttggtatgcttactagtgatacctcttttctggaaactgaaaaggctaaaaaatgtaacataataattacgacaccagaaaaatgggatttgttaacaagaagatggtccgattacagccgattattcgaattggtcaaacttgtcctagttgatgagattcataccataaaggagaaaagaggagcatctttggaagtaattctgacaaggatgaatacaatgtgtcaaaacattcggtttgttgctttaagtgcaacagttccaaatatagaagacctagcattgtggctcaaaactaacaacgagcttcctgcaaatattctttcttttgacgaatcgtacaggcaagttcagttaacgaagtttgtttatgggtactccttcaattgcaaaaatgacttccaaaaagatgctatatataattccaaattgattgaaataattgaaaagcatgccgataatcgtcccgtactaatattttgtccgactagggcttcaactatatcaacagcaaaatttttattaaataatcatattttttcaaaaagtaagaaaagatgtaatcataatccctccgataaaatattaaatgaatgtatgcaacaaggtatcgctttccatcatgctggaatttctttagaagaccgtactgccgttgagaaagaatttcttgcaggttcaattaatatattgtgttcaacttcaacgttagctgttggtgtgaaccttcccgcatatttggtcattatcaaaggcaccaaaagttggaactcttctgaaatccaagagtattcagacctagatgtactgcaaatgattgggcgggcaggaagacctcaatttgaaactcacgggtgcgcagtaatcatgacagactctaaaatgaagcaaacatatgaaaacttaattcatggaactgacgttttggaaagttcattacatttgaatttgatcgagcatttagcagcagaaacctctttggaaactgtatattcaattgaaactgcagtaaattggctacgaaacacattcttttacgttagatttgggaagaatccagctgcatatcaagaggtgaacagatacgttagttttcattccgttgaagactctcagataaatcaattctgtcagtatttgcttgacaccttagtaaaagtgaaaataatcgatatcagcaatggggagtacaaatctacagcgtacggaaatgcaatgacgcgacattatatatcctttgagtcgatgaaacaattcattaacgcaaaaaaatttctatcattacaagggatactaaatttactggccacttctgaagagttttcagttatgagggtgaggcacaatgaaaaaaaattgttcaaagaaatcaatttatcgccacttttgaaatatccatttttaaccgagaagaaacagagccaaataattgacagggttagtcaaaaggtttctcttttgattcaatatgagttaggtgggttagaatttccatcatacgaaggcgcttctaaactacatcaaactcttgttcaggataaattcctcgtttttagacattgttttagattactaaaatgcatggtagacacatttattgaaaaaagtgatggaacatcactgaaaaatactttgttcttactgcgaagcctgaatggtcactgctgggaaaacacgccaatggttcttaggcaattgaaaacaattggactagtttcagtaagaaggctaatacgacatggaattaccaatctagaagaaatggggcatttgtcagatactcagattgaatactatcttaacctcaagattggaaacggcataaaaattaaaaacgacatttctttgttgccttgtctgaatattagaacaaaactagaaaattgcaaaatagaaaatgaagagttgtggttgacatttaaagttgagattagtgcaacattcaagtctagcatttggcatggtcagcacctctcattagatatcgaaaccgagaaaagctcaggagagttaatcgactttagaagattgcaagttaacaaactacagtcaccaaggggctttagaatttcagcaaaaatatcaccaaaactagaaaaaatagaattctcaattcattgccaagaaatcgccggactcggcaaaacaatcgtatattccactgatcatttggcatcacagttctctgcgaagacaccaaatataaggaaagatctaaatagtttagaaaaatgcctcttctatgaaagcagtagtgacggagaagtggggaaaacgtctagggtttcccataaagatggattagaagaatcgctatcctcagatgatagtatactagattatttgaatgaaaggaagaaatcatcaaaggcggttgaatctgcagcagttattcacccggaggcacactcttcttcacattttagtaatggccgccaagtaagatctaatggcaattacgagtgttttcatagctgcaaagacaaaacgcaatgcagacatttatgttgtaaagagggtattccagtaaagtatataaaagaaaaaggaccctcctcaatcaagccagtatcaaaacctgatcaaatacgccagccactgcttgcaaaaaatatcaacacaacccctcacctggaaaaaagactgaatagtaaaccaaagcagtggcaagaagaaaatacagatattgcgacagttcatacacttccttcaaaaatttataatctatcgcaacagatgtcgtctatggaagcgggtgaacaagtcctaaaatcaggccccgaaaactgccctgaaataattcctattgatcttgaatcatccgatagttattctagtaatacagcggcgagctcaataagtgatccgaatggtgatctggatttcttgggttccgatatagagtttgaatga

SEQ ID NO: 1635 - DNA, 621 bp, Saccharomyces cerevisiae
atgagtttcctaagcatttttacttttttcagcgtccttatttctgttgcaacaaccgtcagatttgatttgactaacgttacctgtaagggcctacatggacctcattgtggtacctacgttatggaagtcgttggtcaaaacggtacatttttgggtcaatctacgtttgttggcgccgacgtcttgactgaaagcgctggtgatgcttgggcaagatatttgggccaggaaacaagattcctcccaaagttgactactattgctagtaacgagacaaagaacttttctccactcatcttcaccaccaatatcaacacttgtaaccctcaatccattggtgacgctatggttccttttgctaacactgttactggtgaaattgaatataactcttgggcagacactgctgataacgcttccttcataaccggtttagctaaccaattgttcaactctaccgattatggcgttcaagttgcttcctgttacccaaattttgcttctgttatcttaagcaccccagctgtgaatattttcggtaaggatgacacattaccagattattgtaccgccattcagctaaaggccgtttgtccaccagaagctggttttgattaa

SEQ ID NO: 1636 - DNA, 756 bp, Saccharomyces cerevisiae
atggacctagatctagccagtatcttaaaaggtgaaatttctaagaagaagaaagagctggccaactctaaaggtgttcagccaccatgcactgagaaattccagccacatgaatccgcaaacatagacgaaacaccgcgacaggtagaacaagaaagtacagatgaagaaaacctgtcagacaatcagagtgacgatattaggaccaccattagcaaattagaaaatcggccagaaaggatacaagaagcgatagctcaagacaaaaccatctctgtaatcattgatccatcacaaattggttctactgaaggaaaacctcttttgtcaatgaaatgtaatttatatattcacgaaatattatctcgttggaaggcgtctttggaagcttatcatccggagctgttcttagacactaaaaaagcactctttccactcctactgcaactacgaaggaaccagcttgccccggatttacttatttcccttgcgaccgttctctatcatttacaacaacctaaagaaataaatttagccgttcagtcctatatgaaactcagtatcggcaatgtggcctggcctattggtgttactagcgtaggcattcatgctcgtagtgcacattcgaaaattcaaggaggccggaatgctgctaacataatgattgatgaaagaacgcgattatggattaccagtattaaaagattaataacttttgaagaatggtataccagcaaccacgatagcttagcctaa

SEQ ID NO: 1637 - DNA, 573 bp, Saccharomyces cerevisiae
atgtccagattaagaagattcaatagaaagatcttaagcttgagttctgactacactcatgacggtgaatctgatcaagaagatgtatccatattaccattagatacagaagagcaggaagaactcatacaaaaatttgagactaatgctcacatcacaaataagctgtacataaacctgttaagcatattgtatttgctatatggcggactgctaatgatactcgtaagaaaatcgcgagggtatattaagttagcacttcttgctggcgctaattctttgatctgttcgtgcatcacacttagatatgatattgtaaacgactatcttttgttcaaaaagtttaagttaagagtgagcaatttttctattaacataataaacattattttactagtacttatggcttggataagtttcaatcatgtggtcgaagataaaaaaacggtgctctgtttgcaagttccaatgtttttattctgggtcgctgtgcttgtgaaaagatgggctcgaaatatcgaagatgaaatcgcagatctaagatgcttgaaatacaaatacaaaaatgcttag

SEQ ID NO: 1638 - DNA, 1539 bp, Saccharomyces cerevisiae
atgaagtcaaaagggagtcggttgtcaacagactgtcctgtcgaatttcccaagatagtctctggattcgctgaggaagtgaaaatacgtagacaaagttcccaaggacagtacgccgtcgattcacatcctccgaaaagccctgaactgaaacacagaagacagaggtcatcctcttttgttaacggtaaatgcaggaacagggaccttccattgttagataacaagaaagcacaagaaataaacaccaattcacacggccaagacatcggtatcaaaaacttaccacgtcaacgtgagttgttgaatgccaaaaatggaattgattttacgctgatggtggcgggtcaaagtggattgggtaaaaccacgtttatcaattccttattttctacttctttaattgatgatgacatcaaagaaaacaaacctattattcgttataaaagcattgtagaaggagatggaacacaccttaatttcaacgtcatcgatacacctggttttggtaacaatatggataatgcatttacgtggaggacaatggttaactatattgatgaagaaataagatcgtacattttccaagaagaacaacctgataggacaaaaatggttgataatagagtccattgttgtttgtactttctgagaccttcaaataagggaattgatactttagacgtcgtaacaatgaaaaaattagcgaagagagtgaatttaatcccggttattgctaaatcagatttgctaacgaaagaggaattgaaaaacttcaaaacacaagttagagaaataataagagtacaagatatccctgtatgtttctttttcggcgatgaagttttgaatgcaacacaagatatttttcaaaaatatccattcagtataattgcatctaatgagtacatttttaatgaaaagggcgaaaaagttaaaggaagacaatacaaatggggcgctgttgacattgaaaatgaaaagtactgtgacttcaaaatcttgcaaaagacgatttttgattggaatttaattgatcttgtagaaagtaccgaggattattatgaaaaatgcagatctgaaatgctaagaactaggctattaaaggccagagattgcttaacaacgaaaagtgttgacataacggaagaacaaaggaaatttttggaggaagaaatgaacttcgatgaaatcgaggaaaacaaactcaaaaattacaagtgctatgaaataattaataaaacggtcatggataaggtggctacagaatgggatcctgaatttataactagacaattagaagctaagaaaaaattcaacgagctgtccaacagagaaatttcaaaatttcgagactggaaaaagagcctattcatggaacaagagaattttaaccaagagattgaacaattgaatcacaagttggaaaacttacaactggaatgtcaggacttggaatacaagctgttaatcggaaaaagttccaacagccattccacagatagtgctactttagtaaacgttcacatcaaaaggtag

SEQ ID NO: 1639 - DNA, 633 bp, Saccharomyces cerevisiae
atggttgctaagaagagaaacacgcttagaagcaaagtaagtgcaagaaatagtcaaaattttggaccagacgtagcgaacaatggcattctggacgagagttatgacatagaatctgatccaagggcctttctgcaccaacctaaagaaactaaaaaggaaaagctacttaacagacagaatactttcttatctaacttgaaggggaaatccacacttaacgatggcatagctgccaattttgatggtatttctaaatcttccattagacgtaggaaaagaaagctaagagaagaactaaaaccaagaatgcaagatctgctcacttctttggagcaagaaaaggatttacggggcattattgaaaatagtagcaaagacatgaataacgatgatgacatcgacatggattctaaaataaggtttgtggacacaaaggaaatgaacttgaaaaagatagaacctggttctgttaggataaaaaagaatcagccaaatatcaggaaccaaaagggtgcaaaggcattggctgctaacgaaactgcaagattcaatcaggtcctaaccaatcaagatttccaaaaaaatccatttggcgccttaagagaggttatcaagctgcaaaaacaatga

SEQ ID NO: 1640 - DNA, 2811 bp, Saccharomyces cerevisiae
atggaggaacaatttactaatcagaagaaagtatcacatctacagtcattaatgaacactaaaaggagtgaacagcccaccgaatttgccaaaaaacataggtttaaagatacgcttgcattgttcctggtttttttgagttttaaccacttcacttccctatgtttattggtttcctttattgttgctaccaaatgcaaagattttctggcaaattgttttattatacttttcctatcgaaaaaaccttcccgccatatcggtgaagtggcgcacatagatataagtacttccaaagtgaccaatggtagttcaaaccgaaaatctaattcacgattttttggcaattcaaaaaatagcttcgtcattccgatccccgtattaatttgtgaaattttatttgcaatgttactaaagatttacggtggcgattattttgttaagccaataaaaaatctggcaatttctattattgcctcatttttgatcaatgatccaagcgattgcttaagctatgcaacttcatgctcagtattgtatgctgtgtcaactaacacttttcaaagagtgtcacacttctttgacattatacagttatttgatatgtctttacgaggaaccggccaatcaattaaattattcacggtttttcgcaagtattcacagtttttcaaaaagcttttctctctatttttgccaatgcctttcaagatgcttggcaaacattcagacagtatgatttattatctatcctttcacatcctttttttctcatttgcttcaagtttattacaccctcatagacaaacagcggaaaacaagccattgaaaaagggtttcaattcaactaaaccagatgtagcccgtgttcaaggtctgcaaaagatgagaatttcttcttcttcttccgtttctgccgattcgaacactttagaggaccaaagtcctatgataccgaacgatccaggtggacttagcagcagcaatcaaactatccatccatcccaacaaaataactcgccagttcccctatcatcacacagtaatattttgaaccctgccgcctcttatcctactgatgctacttctagttttccctatttcacttctatggtcaaggaatataagtcatatcagccatcggtaatctctgctgaaggaagcaattctcaagccgttactactactaccagtacaacaacctctcctacaacgttcaacttttctggtgataacactagtttgtcaaatgaaatctctctatctgattcctcgaatggaaattcgaaaaaggattctgatttcttttccccttccaatgacaagtatactaaccaactgtttgaactgaatgttgattttgggaacatgttttcttctagcaaattatcttcagacatatctgttacatcaaacttggaaaattttatccgtcttctattcagaagaaagaatcaacacttgattgcacctctttggtctatggtagttacattaaaaacaacgaattttgaaaaaaaatacttacaagaaacctctgaaaattcactaacaccaacaaattcgaatacttcatacgtcagtaatcaggaaaaacatgacaaagatttggacacgattaatacacattcagtttcatcaagaattagtttcacccatgccggaaagtttaagaagagcgtgtttaacaatttcgaaccttcaaatactatggccctgattgcaaagacaacatctgatgactacaatcttttaaatttagtttccaccaatgaaaatattttcaatagaaatgataatgactacaaagtttgcattattgatattagcacaaactctattacattccatattgaaaatttacatgatggcgaactcattgttttagtaaacggtgttatctggtcagaagtttcttgcgctttaattttagagcatgtaggcgaagaatacgttgtcgttaacggattagtcccttcttgttcttatgatattcaattcatcaacagactaaatcaccgagatgattatttggtttctgatttaattgtaaggacttgtgggaataacaatgcgattgccggaaaatttgaaaaccttgatttcagcttcccttcatactaccataggaaattcttatctccgttgctaactctgaagcattccgtgctaactacaaacgcaaatttgtccgatgaaaggacaaaattgaaaaagacaaaaaaggaattcagcaagaagttaagtcttttgagacaagaaattgattattttaaaggcaggatttcacagaacgcaacacatgacgaaaagagcactttaaaagtcgaaaatttgaaggttgccctacagcaaagtgagactgcggtaaataagttagagatgcaattgaaaactctcactgaaaaagagcttgaattagaagaggaatacttgaaaaagaaagatctacacttgaaaaatcaattagagttcagtaagttagaagaaagcttatcgaaagacctgaaaaactcagaagggaggttccaaaaggtcaatcaagaattagttcaactaggctctaaactggacaaattgaacgcgagaaacgagaagttacaaaaggaggtcgatcagaacgcagaagagatagaaaagttcagtactcaatttttgagtaaaagagaaaaggatagatttagaagaaaggagtacaggatacgcgaagccaataaatttgaattgactataaaggggttagagcaagatatcaacagattagaaaatgagaatgaaaatatacatagtctaattggtaatagttactga

SEQ ID NO: 1641 - DNA, 1143 bp, Saccharomyces cerevisiae
atgaattgtatccctagtccaattagtgaaaggaaaatccaaattaataatgaagattgtataggcaaggaaaatgctttccataccattccaagagaaagttcaattaacttgacacctcactctacgaatgaaaaaaaagttctatccgaggtaaacagtaacaaaatcgattctttacaactccctcgaggtaaattgcaaagagattccacccatttggaaaaaacaagaaagagacaattatcaaatgattcaaccgatcctatagagccaaaaactgtgaaaaaaataaaatgtcatcaatggaaaaatttggattcgatagagatggatgatccattcatggtagcagaatatacagattctatattttctcatctttacgagaaggaaatccaaatgctaccgacacataactatttaatggacacgcaatctccctatcatttgaaaagctccatgagggcgctgttaattgactggttggttgaagttcatgagaaatttcactgcttacctgaaacattatttttagcgatcaacctgctagatcgatttttatcacaaaatgttgttaaattgaataaattacaactactatgcatcacttgcctgttcattgcctgtaaatttgaagaagttaaattaccaaaaataacaaattttgcgtacgtgactgacggtgctgccactgtcgaaggaattaggaaggctgagctattcgttctaagttctttaggttataacatatctctaccaaaccccctaaatttcattaggagaatttcaaaagctgacaattactgcattgaaacaaggaacatggccaaattcatcatggaatattcgatttgttgtaataaattcatccacctgaagccatcatatttagctgcaatgtccatgtatatcgccagaaaaattaaaaatgaaaattccaaatgggatgaaacttttattcattatagtggcggcattgatattgaatcagatccagcgtttaaggattttatcagtgaactagttgaagatattgctgtacctgatacgaatctagattccttgagacttaaatacaaaaagcctaaacatggcatggtttatttcaaggtttttgactggtgtaaacaaaaacgttga

SEQ ID NO: 1642 - DNA, 693 bp, Saccharomyces cerevisiae
atgcctgtcccatctgttactgtcactaccgataatgaatatgaagacatatcgtccttttcttctattgactcttacaaaccggagccctttactgggttcaaagattctgaagctccagaacagcctcttttaaaaaacgataccattgttggaaaggggcaactggaagatgatagtaatgtagatgatcaacaccgtcattcagatgtgcattctcatcacagttctagtactttaaaaaggccaacttcaaattcgatagaaaagatggttacccacaatgctttagagggcaactcagaaacagttgattccttaaaagaagatggtttaaatttgaacaagaaagctcttccggatattaccgccccagtaacaaactcagctcacgatgctgcatttccagaagagtatcgtttagaaactgaaaccgggttggtcaaattgaagacgcttgaaagtttgaagagggaggactctcgcgtatcctcaactaaaaaagagcatattaacgaccatacagatatgcattcgacacgatccaaggttactacaaattctcaaggttcttctctagaaccaaacaagttgaacatggcagtagagaagaataagaagaggatcgaaaaatatcaaaaacataaatcagaaaaggggatcaaggggttttttcatagaattttcgattaa

SEQ ID NO: 1643 - DNA, 654 bp, Saccharomyces cerevisiae
atgggaaaggcctgtttgaataaagaagtcggcacttacgaatgtgagggggaaagagatacctactcattttttacctctctctcagatatacaggattcaagtagtaacgaggaacaatgcggtgtaggaagtatattgagtgaagatagtttcacgtttgaagggtccaacgtgagcatacggttattttccttggacttaaatgccttgaatgaaaatgagaatggatccaagaatcctgtgaaatttaccattccgccaaaaatagaacaaagaaaggaagcaagacaaagagagaaacgtttaaggagggtggcagtactacctgagaattcgagaaactaccttgttgaatcaagtatggattcaagtagggaatacagtcaaccattttttgactggaggcatgaaatggtagaacatggagaggagagtgtaaaaccgtgtggttgtcataaatcgagaaaagcaaaatgcttcaaagaactggagatggagaatatagaaaagggcgatataaagaagagtctcttttacagagacataattgaatggtgcagagactatgaagtcaataaaactagggaagtctgtgttccgtctatacacgagttttacctacatggaaatggaagtgacaacctcttttga

SEQ ID NO: 1644 - DNA, 1407 bp, Saccharomyces cerevisiae
atgaatcttaaactttctgctattgaaagttactttttccatagaagcagactaaatttgcattcatgtttttatgtcggaatcaaactcaacgaattgcccaaaaaaagtcaactgatagcggctcttaagtatactgtaatccaacatgaacgtttgacttgtaatgtattctatgatgaattgaaaaaggaaaacttcctacaaaacattcttgagccactgaaattttgcgatctagtagaataccgccacgattgggaccagttaggggaaaccgaaattaaccacatctttcaaaggtataacttttcatacaacgagaataaacctttatggaaaattctgatcctccctaatcaaaatcaaatgctattgctgacagatcatgttctcatggatgggatgtccgctattcatgtgtgggaaacgtttatggaaggcctacagatgcaacagccggttgaaattgatgaaacaatatattcaccatcattaaattcatcaactgaaaaaataatgtcagccccactatacggagattggcccataccttggaattggcatatagtgcgacaattggtcagtagactacattattggtttccacaaacagtcgtaaaaaacaatagaaatttaatccaatttgccaactactcatttccaaaagacctgctggatgataaaccgagcgatggaactcaaaaatacaaagttaaaaacacgaaccatcaatgggagtttcgattatcgccgacccatctcaacgacattttacaagaatgcaaggccaataatacttcgttgacttcccttttaggtgccctggtctgcaccagtttcgaaaaaatagctgcacatgagtataccggatcatttttgaaaattgaattaccaatgaatattagaaagccttttgaacgagtcttgaaattaccttcagatgataagctcgccgtgggaaattttattgcggtcatagaattcaaccataaactacatcaaaaccgtggaatatgggatatcgcttctcaaattcaaagggccataagaagcagttccgaggataaaataatagataaagtaaacgaagtaaagttattggaggttatttcttctcaacaatacatagaagataaaattagcttgaataacggaccttcttccacatttgaagtaacaaacttaggatttcaaacatttaaagatgcatgcaacaccagtttaccgttttatatagtggatgctacattcaacgagccgcaaggaatatcttcaattttctcactaagcgtaatctctactcctggtaacggactacattgttgtatcagttatccaaatactctcactaaagtgctagaaccccactggcaatatatgaaagattacttaaatttatactag

SEQ ID NO: 1645 - DNA, 3255 bp, Saccharomyces cerevisiae
atggaaggaattttggatttttctaacgacttagatatcgctctattagatcaggtggtatctacattctatcaaggttcaggtgttcagcaaaagcaagcccaagagattttgactaaatttcaagataatccagacgcttggcaaaaagctgaccaaattcttcaattctcaactaaccctcaatcaaaatttattgccctttccatccttgataaattaattactagaaaatggaaattgttgccgaatgatcatagaattggaattaggaacttcgttgttggtatgattatctccatgtgccaagacgatgaagtatttaaaacacaaaagaacctgatcaataagtcggacttgactttggtccaaattttaaagcaggaatggcctcagaattggcctgaatttatcccagaactaatcggcagttcaagttcctctgttaatgtttgtgaaaataacatgatcgttttgaaactgctatccgaagaagtcttcgatttctctgcggaacaaatgacacaagctaaagctttacatttgaaaaattccatgtcaaaagaatttgaacagatttttaaattatgttttcaagttttggaacaaggttcttcaagctctctaatagtggcaaccttagaatctttactgagatatttacattggattccttatcgttatatttatgaaaccaatattttggaattattaagcaccaaattcatgacatcgcctgatacaagagccatcacattgaaatgtttgactgaggtttcaaatctaaaaattccacaagataatgatttgataaaaagacaaactgtactttttttccaaaatactctacaacaaattgccacaagtgtgatgcccgtgactgccgatctgaaagccacttatgcaaatgctaacggtaatgatcaatctttcttacaagatttagcaatgtttctaactacatatctcgctcgtaatagggcccttctagagagtgatgaatcgttaagagagttgttgttgaatgcgcaccaatacttaattcaattatccaaaatcgaagaaagagaactatttaagacgacattggattactggcataatttagtagcagatttgttttatgaggttcagcgtttgcctgctaccgaaatgagcccattgatacagttatcagtcggttcacaagctatctcaactggatctggcgccctaaatccggaatatatgaaaagatttccattaaaaaaacatatttacgaagaaatttgttcacagttgagattggtcattattgaaaatatggttagaccagaagaagtccttgtggttgaaaatgatgaaggagaaattgttagagagttcgttaaagaatcagacactatccaattatacaaatcagaaagagaggttcttgtatatttgacccatttgaatgttatcgatacagaagaaatcatgatcagtaaattggcaaggcaaatcgatggttccgaatggtcatggcataatatcaacactttatcttgggctattggttccatatctggtacaatgagcgaagatactgaaaaaaggtttgtagttactgttattaaagatttactagatttaacggtcaagaaaaggggtaaagataataaagctgttgttgcatcggatattatgtacgtcgtgggccaatatcctagatttttgaaggctcactggaattttctaagaacagttattttgaaactttttgaatttatgcatgaaactcatgagggtgttcaggatatggcatgtgacacattcattaagattgttcaaaaatgtaaatatcattttgttattcaacaaccccgtgagtctgagcctttcatccaaacaataattagggatattcaaaagacaactgctgacctacagccgcaacaggtccatacattttacaaggcttgtggtattattatttctgaagaaagaagcgtagcggagagaaatagattattaagtgatttgatgcaactgccaaatatggcttgggacactatagtggaacaatccactgctaacccaacattgttgttagattctgaaactgtcaaaattattgcgaatattataaaaaccaatgtagctgtctgcacctcaatgggagcagatttctatccacagttgggtcacatctattacaatatgcttcagctatacagagctgtttcttcgatgatttctgctcaagttgccgcagaaggtctaattgctacgaagacaccaaaggttcgtggtttgagaaccatcaaaaaagagattctgaagcttgttgagacctatatatccaaggcgagaaatttggatgatgtcgttaaagtgttagttgagccattattgaacgctgtacttgaagactatatgaacaacgttcctgatgcaagggacgccgaagtgctaaattgtatgacaacagtagtagaaaaggttggtcatatgatcccacaaggtgttattttaattttacagagtgtatttgaatgcactttggacatgattaacaaagacttcacagaatatccagagcatcgtgtagaattttacaagttattgaaggtcatcaatgagaaatcatttgctgcatttttggaactacctccggctgcctttaaattgtttgttgacgctatttgttgggcgttcaaacataacaatagagatgtcgaagttaatggtctacagattgcattagacctagtgaaaaacattgaaagaatgggaaatgtcccatttgcaaatgagttccacaagaattattttttcatttttgtcagtgaaacgttttttgttttaaccgattccgaccacaaatccggtttttctaagcaagctttgttactaatgaagttgatttctttggtttatgataacaagatttcggtaccattatatcaagaagctgaggtaccacaaggaacttcaaatcaagtctacttaagccaatatttggctaatatgttaagtaatgcattcccccatttaacatccgaacaaatcgcaagttttctctctgcattaactaaacaatacaaagacttagtggtcttcaaaggcactttgagggactttttggtgcaaatcaaagaagtcggaggtgatccaacagattatttgtttgctgaagataaagagaatgcattaatggaacagaatagactagagagggaaaaagctgccaagattggtgggttattaaaaccttccgaacttgatgattag

SEQ ID NO: 1646 - DNA, 1782 bp, Saccharomyces cerevisiae
atggctactccccatttatatcacagatataactccaaaagctctaacaaaaatatcaattcgagcggaaattctacagaggttgaccgtttcattccaaaatcagtttcgagaaatgcttataagtctattccaatgttaaatgggtttgacataagttactcagaactttgcgagaaatctccttcacctgagcggctatcatcccctgaattctttaacgaactgcgaaacaccgggcattacgaatcaatcagtacaacaaatgagttttccatgtcaagtatctctagctcttctgagagtcaagttaccagaagtggaagtgcaagagcttcaagaaacgattattcaaaattaactaaagagcaaaaggaccatagaaagaatattgcacattctcttggttttcaattgcccgaccgtgtctttacgtttgagaccacaagtgctgaaattctggaaaagaataaagccatcaaaaattgctttggaccaggaagttgcgccgaaataagatcaacctttgactttagtacactctcgcccgatgttgcccgttattatatcgctaattctaacgcaagatcagcttccccacaaagacaaatccaaagacctgctaaacgagtaaagtcacatattccataccgtgtattggatgcaccttgcctgagaaatgatttttattcgaacttaatttcttggtcaagaaccacaaacaacgttttggtgggactgggttgctccgtatacatctggtctgagaaagaaggagcggtatctatattggaccatcaatacttaagtgaaaagagggatttagtgacatgcgtctcattctgtccttacaatacttattttattgttggtacaaaatttggccgtattcttctttatgatcaaaaagaattttttcattccagcaacacaaacgaaaaggaaccagtatttgttttccaaactgaatccttcaaaggaatatgttgcctagaatggttcaaaccaggtgaaatttgcaaattttatgttggagaggaaaatggcaatgtgagcctctttgaaataaagagtttgcatttccccataaaaaactggagtaaaagacaaaaactcgaagatgaaaatttaataggattgaaacttcattccacttatcaagctcaggcacagcaagtctgtggtatttctctgaatgaacatgcaaacctgcttgcagtcggcggcaatgataattcttgtagcttatgggatatttccgacttggataaacctattaaaaagtttgttcttccacataaagcggctgtgaaggccattgccttttgtccttggtcgaagtctttgttggctacgggtggtggaagcaaagacagatgtattaagttttggcatacatcgacaggcacattgttggatgagatttgcacctcgggacaggtgacgtctttgatatggtcgttgagacataaacagattgttgctacttttggattcggtgataccaagaatcctgtattaataacactatactcatatccaaaattatcaaaactactcgaagttaggtcgcccaaccctttgcgtgtactgagcgcagtaatctctccaagttccatggcaatttgcgttgccactaacgatgaaacgataagattttatgaactgtggaacgataaggaggaaataattaatgaaattcaagagagtgggatttatggatctaatattatagaatatatggagggtatcgaaacaacacataacaaaagaataaggtaa

SEQ ID NO: 1647 - DNA, 525 bp, Saccharomyces cerevisiae
atgcaacatttcgaaagttcagataagatagaaaaggatgatgatacatcaagaattaaattacgctcttcttctttggccgctccaatcctcgaggctgttcaagaagcccagccttttgaagaagccactttctctaacttacagaagatacatccgttaacagaaaactcaacttgcaatggttatgttatttacgataaagatggaaatttgaaatccatgaaggatacatttggtaggaatataaaaacacctgatatttcaaatcctacaagagcaagaaatgaaaggccattggatacaatacgtggatttgaatactccataacaaaagatccccgctggttgcaagagctagaaacatctaagttgggatttaaacctagacctggatttgccgtcattaatcaagactcacaggcttcaataaatttatctcaactggaagaaaaagttatggaaagccaaaaaaaaaaggagaaaagacacatatcacggctttctcggttactctgcagatga

SEQ ID NO: 1648 - DNA, 993 bp, Saccharomyces cerevisiae
atgacgccttctaatatggatgataataccagcggattcatgaaatttattaaccctcaatgccaagaggaggattgttgtatcagaaatagtctattccaagaagatagcaaatgtataaaacaacaaccagacctattgagcgagcaaacagcacccttcccaattttggaagaccagtgtcctgctttgaaccttgacagatcaaataatgatttgctattacagaacaacatatctttccctaagggtagtgatcttcaagcaattcaactaacccctatttcaggcgactactctacctatgttatggcagataacaataataatgataatgatagttatagtaatacaaattatttttctaaaaataatggtatatctccaagttcgaggagtccctcagttgctcataatgagaatgttccagatgactctaaggcaaagaaaaaggctcaaaacagagccgcccaaaaagccttcagagagagaaaagaagccagaatgaaagaattacaagataaattgttagaaagtgaaaggaaccgccaaagtttattgaaagaaattgaggaactaagaaaggcaaatactgaaatcaacgcagagaacagactgctactgcggagtggtaatgaaaatttttcaaaggacatagaagatgataccaactacaaatattctttcccaacgaaagatgaattttttacctctatggtcctggaaagcaaactgaatcacaaaggcaagtattcgctaaaggataatgaaattatgaagcgaaatacccagtatactgacgaagcaggaagacatgtactaacagtccccgccacctgggagtatctttacaaactttcagaagagagggactttgatgtgacatacgttatgagcaaattgcaaggacaagaatgttgtcatacccatggacctgcgtatccaagaagtttaatcgattttctagtggaggaagctactttgaatgaatga

SEQ ID NO: 1649 - DNA, 1758 bp, Saccharomyces cerevisiae
atggatcaatttgagtatatcattactttagaatttggaaaccaaaatcaggttgaatccgcttatcaaattttcaagagtattccgaaaaagttgaaggcaaaaagtatcggggaagaaagtattaaaagtaataatcaagactggcaggattggagagtctgtgacttggaaatagacatgataactgatttcaaaaatcaaacatcaaaagaagaggaaagtgatttgattacttcacaatacttaggccatgggataataaggctattcaagctaagcaatgccaataatactcttaatgagaaggagattttgactatcccgggagatgatactatgatatgtatcctgtttgttccaacttattttaccgttcacgatttattgcatttttatattggtgatgatattgttaataagcaagtttcaaactttcgtatattacgaaatcagcagaagggaatgggttttaatttcacggtcttaattaaattcaggaatgcacttgatgcgaaaaatttcaaggaagagttcaatggcaaaagtttcagcaggatggatcccgaaacatgccatgtgatctctgtaaaagaaatagtttttcaaaaaaagctcttccaaagaccagccgctaacgaggacttcccctatctgcttactgatccattcactgttaagaaaaaaaaggaactggtaaaagtcgaactccccacatgtcccgtttgccttgaaagaatggattcagaaactactggattagtaacgatcccgtgccagcacacttttcattgccaatgcttaaataagtggaagaattcaaggtgtccagtgtgtcgacattcaagtctgcggctaagcagggaatcattattgaaacaggcaggtgattccgcacattgtgcaacatgtggttccactgataatctatggatttgcttgatctgcggtaatgttggatgcggtcgttacaattccaaacacgcaatcaagcattatgaagaaactttacattgttttgcgatggatatacggacacaaagagtgtgggattatgcgggtgataattatgtccatcgcctagttcaaaatgaagttgatgggaagttagtagaggtcggcggctccggtgacgatgacaacaatgatataggcaactccgatgaactacaaaatgttgtttacgggaacaggagcaaaaacggtgagaaatcgaactctaataaaaaagatggcgagctggcggcaaattttttaaggcatagggagtatcatctagaatatgtgcaagtcctaatatctcaattagagtctcaaagagaatattatgaactgaaattacaagaaaaagatcaaactgcgtctgattcttcgaatgttgaaagtttgaagaagtctatggaagatttgaaactccaatttcaggtcactcaaaaggagtggcagaaaagggaaatggcccagaaatctaagcttgaggaagatatgttagtaatcgaaggactacaagcgaacctagatcacttatcaaaaaaacaagagcagttagagcgagaaaacaaagcgttagaagagtctaaacaagatttggaagagcaagtcaaggacctaatgttttatctagattctcaagaaaaattcaaagacgctgatgagagtgtaaaagaaggtaccatcctaatacagcaaccacatggggcagcacaggcatccaaaagcaagaagaagcgcaacaaaaataaaaaagcagggaaatga

SEQ ID NO: 1650 - DNA, 1482 bp, Saccharomyces cerevisiae
atgacggttttctctggagtaaataaaatagagtttgaaggtactttcgaaggtattggaaaggatgttgttatgtcacaaatgataagggccttgcagaaacattttccttcgatacgtgacaagaattatgagtttagcctatttttgcacatttttcaaagatatgtcttagaaaatacttcaatcacccatgatctagtttgtgacaaaattagattaccgataattgatgaagtggttgaactcgatgatattaaaaattacggtttgttagagggtaaactattatcaaagttagctattttaaaattaaccggaaaggctaatccaatcattggtaaagaaagccctttattcgaagtaaaaaatgggatgtcttcattggatgtaatagttcgacaaacgcaaaatttgaatgtacgatataattcagacgttcctcttatatttatgacctcgcttgaaactgaatctcaagtatcaaacttccttgaagagcattattcttctagcaaagtgagatggaaaaccgtagttcagtcaagctttccacaaattgataaagatagattattacctatcgatttacaaataaattctcatgaaaatgatttttggtatccttgcgggactggtaacctaactgacactttgtatttttcaggagaattggacaaattaattgctcaaggaaaagagattttatttgtttcaaatgttgacaatttgggcgctacaggagatttgaacattttaaatttcatcataaatgaaaaaatcgagtatcttgttgaagtagttgaaaggactgcaaatgtttcaaacactggagtgttggcaacatataaaggtaaactacgatcggtttattacaactgcttatccaatgaaagtgcaagcacgtgtcgaattgtcaacactaataacatttggattgatttgaaaaagctaaaggtgctaatagagtctaatagtttaaatttgccaattcattctagtgaaagtaaaataacacacaaaaatgaagagatagagtgtcttcaatttaagacacagttggtcgattgtattgccttctttccgaacagtcgagtattgaaagtatcaagagacagatttttacccctaagaacatgtaaggacttgtttttgttgaaatcaacattatatgatctcgattcaaatggaacatttaacctctaccctctgaaatttggattattaccttcaatcgacttgggcgatgagtttgcaacttatgagacttttaagataggagtaccagatattcctaatattctggaattagagcatttaactgtgatgggaaatgtgttttttggtcgtaatataactctgaaagggacggtcattataatatgtgatgaaaatgatgtaattactgttcccgatggctctattttggaaaatgtaacgatttggcataaatctcagctggaggatatgaatggatattaa

SEQ ID NO: 1651 - DNA, 1197 bp, Saccharomyces cerevisiae
atggctttggagggattgcggaaaaaatataaaacaaggcaggaattggtcaaagcactcactcctaaaagacggtccattcacttgaactccaatggtcactccaacggaactccctgttcaaacgcagatgttttggctcatattaagcatttcctgtcattggcggctaattcattagagcaacatcaacagcctatttcaatcgtctttcaaaacaaaaaaaaaaaaggcgatacaagcagtcctgacattcacacaacattggacttccctttgaatggcccgcatctatgcactcatcagttcaagttgaaaagatgcgcaatccttttaaacttattgaaagtcgttatggaaaaattaccgctaggtaaaaacactacagtgagagatatcttctactccaacgtggaattgtttcaaagacaagcaaacgtagtccagtggctggacgttatacgctttaatttcaagctctctccaagaaaatccttaaacattataccagctcaaaagggtttagtttattcgcctttccccattgatatttatgacaatattctgacatgtgaaaatgaaccaaagatgcaaaagcaaacaattttccctggtaagccctgtctaattccatttttccaagatgatgcggtcatcaagttagggacaacaagtatgtgtaatattgtaatagtggaaaaagaagctgtcttcaccaaattagtaaataattatcacaagttgagtacaaataccatgctcattacaggtaagggatttccagatttcttgacaaggttattcctaaaaaaactagaacaatattgctccaaattgatatcggactgttctatatttaccgatgcggacccctatgggattagcatagccctaaattatactcactcgaatgaacgcaacgcttatatttgcacgatggcaaactataaaggaattcgtattacgcaagttttggcacaaaataatgaagtgcataacaaatccattcaattattgagtttgaatcagcgcgactactccttagccaagaatttgatagcatctctgactgccaacagctgggatattgcaacttcaccattaaagaacgtcatcatagaatgtcagcgggaaatttttttccaaaagaaagctgaaatgaacgagattgatgccagaatttttgaatacaaatga

SEQ ID NO: 1652 - DNA, 708 bp, Saccharomyces cerevisiae
atgagttcagaattattaatatctaattctaaaccaagaccagaaggattaagaaaattatgcgaaggtgagacagtgatccttccaagggacataacccccagcaaatgcgcttatttcttaaaacagaatatcgtattcatttcatatattttcatccatattattattaccataatcttaaaccgcctggcattatctgcacacggtaatactttgattattatcttagcggctttactaattacaatttcactattccttttactcctcttaccttacttaagctgctcaagatataagttaagatgtttagatgatgattgtaagttcaaactattagcggaagtcattacacataaacctaacatggacttgagcacatgggaccggattgcatatgacatgaaccaatttgtatatgaccgtcgtatatgtgcagatagatcttttttctacgatggcagttattgctatcaggtttttaaaaagttggtggctaccccgtaccttgtgaattccaatatgaatagtatatatgctgatctggagatgagaagtaatggagcaaccaacattaacgattctggtaatagttcattacacatcgaattgggcacttatatttttaaagcattggccgttttcaggaactctgttgacaagtactgggaggataagtatccagagatgggggtcacagtttga

SEQ ID NO: 1653 - DNA, 1863 bp, Saccharomyces cerevisiae
atgatcgaagtcccagaagacaatcgttctagccaaacaaagcgtaagaatactgaaaaaaattgtaatgaactgatggttgatgaaaagatggatgacgattcgtcgcccagagatgaaatgaaagataaattaaagggaacaaaatcattgattattcgtaagtctgagctaatggctaaaaagtatgatacttggcaattaaaagctatattcctgttttctgcattcatttgcactttcgcttatggattagatagcagcataaggggtacatatatgacctacgcaatgaactcgtactccgcacattctctcatttctacagtaagcgtcatagttctaatgatatctgctgtttcacaggtgatctttggagggttatcagatatctttggaaggctaacgttgtttcttgtatccattgtactttacattgtgggtacaataattcaatctcaagcatatgatgtccagaggtatgctgctggagctgtcttttattatgtgggacttgtcggtgttatgctacaggttgttttgatgttgtctgataattcttcattaaaatggaggctattttacacattgataccttcatggccctcgattatcactacgtgggtctcaggtagtgtagtggaggcagcaaacccgttagagaactggtcgtggaatattgctatgtgggcgttcattttccctctatgctgtatcccattgattttgtgtatgctccatatgagatggaaagtaagaaatgacgtggaatggaaagaattacaggatgaaaaatcgtactatcaaacgcacggattagtacaaatgctggtacagttgttctggaagctagatgttgtcggtgtgttgttgtttactgctggtgttggttgtattcttgtaccactcactcttgctggtggcgtctctacaaattggagaaattcaaagattatcgggccctttgtgcttggctttgtcctggttccaggcttcatatattgggaaagtcgacttgctttggttcctttcgctccattcaagctgctaaaagatcgtggcgtgtgggccccattgggaattatgttttttatctgctttgtatatcaaatggctgctgggtatctctacaccattctagtagttgcggtagatgagagcgcttcctcagctacaagaataataaacttatactcttttgtgactgctgttgttgctccatttctggggctcatcgttacgagatcatctagattgaagtcgtatattatttttggtggctcactttatttcattactatgggactattttaccgctacaggtcaggtcaagacgccgatggaggtataattgctggtatggttatttggggtctcagtagttgtttattcgattatcctacaattgtttctattcagtcggtaacatcccatgagaatatggctactgtcacagcattaaactatacagttttcagaataggtggagcagttgcagctgccatttccggtgccatatggacgcagtcattgtaccctaaattattgcactacatgggagacgctgacctggctacagcagcatatggctcaccactaacttttattctttccaatccctggggtactccagttaggtctgcgatggttgaagcttacagacacgttcaaaaatacgaagttattgttgcgcttgtattttcagcgcctatgttccttctaacattctgcgtaagagatcctcggttgactgaagattttgcccaaaagttacctgacagagaatatgtccaaaccaaggaagatgatcctatcaatgactggatcgcgaaacgttttgcaaaggccttaggcaggtcataa

SEQ ID NO: 1654 - DNA, 1146 bp, Saccharomyces cerevisiae
atgaaagagaatgaagtcaaagatgagaaaagcgtagatgtgttatccttcaaacagctcgaattccaaaagaccgttctacctcaagatgttttccgaaacgaattgacctggttttgttatgaaatttacaagtctttagcgtttcgcatctggatgctgttatggctaccacttagcgtctggtggaaactttccagcaattggattcacccacttatagtttcacttcttgtcctgttcctgggaccattttttgtccttgttatttgtggactttctcgtaagcgttccttatcgaaacaactcattcagttttgcaaagagattactgaagacacaccaagttcggatcctcatgattgggaagtcgttgcagcaaatctaaattcgtacttctatgaaaataagacttggaataccaagtacttttttttcaatgccatgagctgccaaaaagcgtttaaaacaacccttctcgaacccttctctttaaaaaaagacgaatctgcaaaggttaagtcatttaaggattccgttccttatatcgaagaggccttgcaagtgtatgctgcaggatttgacaaagagtggaagctgtttaatactgagaaggaagagagtcctttcgacctggaagacattcagctccccaaagaagcttaccgatttaagcttacctggattcttaaaaggattttcaacctgcggtgtttaccactcttcctttattattttttaattgtctacacgtctggaaatgctgaccttatatcacgtttcttgtttccggtagtaatgttttttatcatgacgagagatttccaaaatatgaggatgattgttttatccgtgaaaatggaacacaagatgcagttcttgtcaactattataaatgagcaagaaagtggtgcgaatggatgggacgaaattgcaaagaaaatgaataggtatttgtttgagaaaaaagtctggaataatgaagagtttttctacgatggacttgactgcgaatggttttttaggcgctttttctatcgtctcttatctttaaaaaaacctatgtggtttgcttcgttgaacgttgagctatggccatacattaaagaagcgcaatcggcccgcaatgagaagcccctaaagtag

SEQ ID NO: 1655 - DNA, 876 bp, Saccharomyces cerevisiae
atggcacccagaaaacgctttaggctactcgaattagggtcaccaacacattctaaaaggaaagttcaaaaacctcttcaagagaagaccccaaacttgcgagtttctccacttgcttttaaaattggtaaagaaatcaagaataaggaaatcagaaaaacaaaaaaaacagaatcagaaaatatattcaattcgaaacatgtcgatttaagactagaaagcccacatccaggattaaattttgtaagtgatgctcaacagtactcaaaggctggagatgttcgatatttgaaaaataaatcaagcaataccttgaaaaacgaaagacaaacaatagagcgcccctcatttgataattccttaaggttcgaggacattgagcagcctccaaaatctacttcaacgccggttctttctcaatcttctcaaataaatgtagaaagagaagcacccatgtttccagttccttactatattgctccttctcctatgtataattttagcccgtatcaaaatttcgttggaaacccaacgttcctgacgccaagtcataacccaaacctaaactatgccattcccatccaacggccggagttgctttatccgaatgttaacgtatacgattcgccattgtttaagaaaacaagactgccccatcagaccaaaagtctagataaagaaaaaaattaccaatatcttccaatatatccggtctcgatttctaataacggagattttgttggccaagagacaccaagggcagcaccaaagttaagtaaaaagagactttcaaatacattggatgttaattgttccgattatgagtctagtggacaaaatgcaacttataatgatagtgagtcttcccttaattaa

SEQ ID NO: 1656 - DNA, 456 bp, Saccharomyces cerevisiae
atgaacagatcttttcactttctaataaagtacatatatatacatgttcttcttgttttttattttcacattaagcagcaggctattatgcctttttttatttttttcttttcatcattcgacggactttcatttgaccttcgagtggtagcgtttttagccaagcacgttttcgttggcgtttgttcacccttttttgttgtaggtttttttggttcatctagagtagttgttactgaatggctttcgaagcttgtattacctcctcctccagtttcaataacacaggtcttctctttgtcacgtaagagaggcgaattctccagcggatacatcttgattataaacccttacaaaagtttcctgcgatcacttttagatttttcaattttcaataatactgccaagaacaaatcttcaacatttacattgaacttggaggatgtctcaaaatag

SEQ ID NO: 1657 - DNA, 771 bp, Saccharomyces cerevisiae
atgagtgttcgcttatcatacggcgcaagccttgcgtcaatcccaagatgtttcgacttgaaatcttcgaagattactgtaatgggggatgatcattctggaaaaacttctctggttcgcagttggctaggtagttcatttcaaatatcagatgctaatcgttatagggtttcggacctctaccacaagacaatccaatttgatactttggtaaaatactatcgtacctttggcgtaaaaggacagttgccgaattatgcgggtttcaaagctaaaaactctggcacaatttatgaaagttgtggcaatttcctagaagagcgcctgatcaatgccaataaatcgactgctcaaagacgcaccagtattgatgttcaagtttttgataccaatcaaatggaggtttcgtacctttcggagctaactactcttcaaattaggcagtctgatgcaattatattatgtttcgattctactaatgacagctctcttgccagcttagagtcttatatttgtattattcaccacgtacgtttggaatgtgaattggatattccaattattatagcgtgtacgaaatgtgatcttgattcggaaagaacaattactcatgaaaaggttttaacatttatccaagagctgggtttctcgccaggcaatttagactattttgagacatcctccaagttcaatgtaaatgttgaagatttgttcttggcagtattattgaaaattgaaaaatctaaaagtgatcgcaggaaacttttgtaa

SEQ ID NO: 1658 - DNA, 741 bp, Saccharomyces cerevisiae
atggcagaattttcagctgatctatgtctttttgacctagatggtaccatagtgagtacaacagtggccgcagagaaagcatggaccaagttgtgttacgaatacggtgttgatccttccgagttatttaagcattctcatggtgcaagaacacaagaggttttgagaaggtttttccctaaattggatgatacagacaataaaggtgttcttgctctagaaaaagatattgcccatagttacttggacacagtaagccttattcctggtgcagagaacttactgttatcgttagatgtagatactgagactcaaaaaaagttacctgaaaggaaatgggctatcgttacctctggttctccatatttggcattttcatggttcgagacaatattgaaaaatgttggaaagcccaaagttttcattactgggtttgacgtgaagaacggtaagcctgatcccgagggttattcaagagctcgtgatttattgcgtcaagatttgcaattaactggtaaacaggatctgaagtatgttgtcttcgaagatgcacccgtgggcataaaggccggcaaagcaatgggcgccattactgtgggtataacatcctcgtatgacaagagcgttttatttgacgcaggagcagattatgtagtctgtgatttgacacaggtttccgtggttaagaacaatgaaaacggtattgtcatccaggtaaacaaccctttgacaagggcctga

SEQ ID NO: 1659 - DNA, 2991 bp, Saccharomyces cerevisiae
atggaaacaattgatatacaaaatcgatcatttgttgttcgttgggtaaaatgtggccgtggcgatgtaatcaattatcagatcaagccattgaagaaatctattgaagtcggcatatacaaaaagttgaaatccagtgtagatgaccatgcttccgcagttcacattgcacctgacactaaaacattgctagactatactacgaaatctctattacataagggaagttcgagtaatattgaggagcatcacaggcgttcctcacagcactctcatagttcgagcaatggatcggataataagaggaaagagagatcatattcttcactgtccattagcggcatacagcagcaatcccaggaaatacccctacgtgaaaaactctctgcgtcaggattcactttggtcaagagggtcggcaacgtttccggtaacactatggtccaaggtgatcttgaagtgaaagatacagactactattatgcatttatactggacaactcgtcttccaagaatgcaaaaaagaaaattctttttaacgcaagtgtgataaacggcgataatcaatcgatgataagcacaagatccacccctcccgcaaggcctacagctttaagcagaacatctactcaacaggatatgttatttagagtaggacaaggtcgttacttgcaaggctacctgctgaaaaaaaggagaaagagactacaaggttttaagaaaaggtttttcaccttggactttcgatatggaaccctatcgtactatttaaacgaccataatcaaacttgtaggggtgaaattgtcataagcttgtcatctgttagtgccaataagaaggacaaaataatcataattgattctggtatggaagtttgggtcttgaaggctacaactaaggaaaattggcagtcgtgggtcgatgcgttacaaacttgttttgacgatcagttcgaagataaggacacgtccactttggaagaaaatcccgacattcttgacgatgacaaggaagtaattaataaaagctcacctcaagaccacgaccacctcacgcccacggctacgaccaaaagtgcactatcacatagacagcatactcagaaagacatggatgacatatatgtcccattgcccagcgaatcttacgctactttctccatgaatctacgtttgattcaacaacgactggagcagtgtaaaaaagactcgttatcttataaaccaactactttacatcaaagatcggaggggctaaatggaacacattcgtcatcttccgtctttaccaataatagagtgtcttcattcaatcattcttcttctggtatgacgtcatctgattctttagcctctgaagaggttccttccaacaaaacatatattgagcatgctttatataaccaattggcagatcttgaagtatttgttagccggttcgttacacagggagaggttttattcaaggaccaccagatcctgtgcaagaaagcaaaagacacgagagtttctttaacttcatatcttagcgagaatgatgaattttttgatgcagaagaggaaatcagtcggggagtcattatattacctgacacagaagatgatattaataatatagtcgaggaaactccccttcttggtaaaagtgaccaaaatgagttcacaaaagaggtccaattgtcgggatccgaacagatagcttcatcaagtgtggagagctatacaactaacgatgaaaatcatagccgtaaacacctcaaaaatcgtcacaaaaatcgtcgccgtggccaccctcatcatcaaaaaaccaaaagcgcccaatcctcaacagaaacatttacaagtaaggatttgtttgctctttcctatccaaagagtgttacacgccgtaatgacatacctgaagctgcagcttctccgccaagcctattatcttttttgagaaagaatgtaggcaaagatctgagctctattgccatgccagtaacctcaaatgagcctatttctattttgcagttgatatcagaaacatttgagtatgctccacttttaacgaaggctacccaacgtcctgatcctataacctttgtttctgcatttgctatttcctttctttccatatatagggataaaacaagaacgctaagaaagccttttaatcctttactggctgaaacatttgaacttatacgagaagatatggggtttaggcttatatcggaaaaggtctcacatcgtcctccagtatttgccttctttgcagagcatctcgactgggagtgtagttacactgtaacgccatcgcaaaagttttggggtaagtctattgaattgaataacgaaggtatactgagattgaagtttaagacaactggagaactatttgaatggacgcaaccaacaactattttaaaaaatttgatagcgggtgagagatatatggagcctgtcaacgaattcgaagtacattcttcgaagggagacaaatcacacatcctgttcgataaggcaggtatgtttagtggaagatctgaaggatttaaggtttcgataatcccaccaccttcgagcaatcgcaagaaggaaactctagctggtaaatggacacagagtttagctaatgaaactacacatgaaactatatgggaagtaggtgatttagttagcaatccgaagaagaaatatggctttactaaattcaccgcaaatttgaatgagataactgaaattgaaaagggcaatttaccacctacggactcaagattaagaccagatattagagcttacgaggagggaaatgttgataaggcggaagagtggaagctgaaattggaacaacttcaacgtgaaagacgtaataaagggcaagatgtggagcctaaatatttcgaaaaagtatctaagaatgaatggaaatacataactggaccgaagagttattgggaaagaagaaagaagcatgattggtctgatatttctcaactctggtga

SEQ ID NO: 1660 - DNA, 276 bp, Saccharomyces cerevisiae
atgaactatttggaaacacagttaaataaaaagcaaaaacagatacaggaatacgaaagtatgaatggcaacctgataaagatgtttgagcaattgtctaaagaaaagaaaaatgatgagacaccaaaaaaaatttcctcgacgtacattaaagagttaaaggagtacaacgaattgagagatgccggtttaaggttggcccaaataattgctgatgaaaagcaatgcaaaattaaggatgtttttgaagagatcggttattcaatgaaggactaa

SEQ ID NO: 1661 - DNA, 1308 bp, Saccharomyces cerevisiae
atgtccatgcaacaagtccaacattgtgtcgcagaagtacttcgactagatccacaagaaaaaccggactggtcgagcggatatttgaagaagttgactaatgcgacatcgattttatataatacttcactgaacaaggtaatgctgaaacaagatgaagaggttgctagatgtcacatatgtgcatacatagcgtcacagaaaatgaatgaaaaacacatgcctgacctttgctattatatagacagtattcccttggagccgaaaaaagccaagcatttaatgaaccttttcagacaaagtttatctaattcttcacctatgaaacaatttgcttggacaccgagccccaaaaagaacaaacgcagtccagtaaagaacggtgggaggtttacttcttctgatccgaaagagttgaggaatcaactgtttggtacaccaactaaagttaggaaaagccaaaataatgattcgttcgtaataccagaactaccccccatgcaaaccaatgaatcgccgtctattactaggagaaagttagcatttgaagaggatgaggatgaggatgaagaggaaccaggaaacgacggtttgtctttaaaaagccatagtaataagagcattactggaaccagaaatgtagattctgatgagtatgaaaaccatgaaagtgaccctacaagtgaggaagagccattaggtgtgcaagaaagcagaagcgggagaacgaaacaaaataaggcagttggaaaaccgcaatcagaattgaagacggcaaaagccctgaggaaaaggggcagaataccaaattctttgttagtaaagaagtattgcaaaatgactactgaagaaataatacggctttgcaacgattttgaattaccaagagaagtagcatataaaattgtggatgagtacaacataaacgcgtcaagattggtttgcccatggcaattagtgtgtgggttagtattaaattgtacattcattgtatttaatgaaagaagacgcaaggatccaagaattgaccattttatagtcagtaagatgtgcagcttgatgttgacgtcaaaagtggatgatgttattgaatgtgtaaaattagtgaaggaattaattatcggtgaaaaatggttcagagatttgcaaattaggtatgatgattttgatggcatcagatacgatgaaattatatttaggaaactgggatcgatgttacaaaccaccaatattttggtcacagacgaccagtacaatatttggaagaaaagaattgaaatggatttggcattaacagaacctttataa

SEQ ID NO: 1662 - DNA, 1176 bp, Saccharomyces cerevisiae
atgggatattttgttccggattcacatatcgaaaatctaaagtcatataaatatcaaagtgaagaccgctcgctggtatcgaagtatttcttaaagccattttggcaaagattttgtcacatatttcccacgtggatggcgcccaacatcatcacattatcaggatttgcttttatagttatcaacgtgttgactgtattctattacgatccaaaccttaacacagatacgcctcgctggacatatttttcttacgctttaggtgtattcctatatcaaacgttcgatggatgtgatggtgtacacgctcgccgtatcaatcaatcaggacccttaggagaactattcgatcatagtattgatgccattaattctactctgtctattttcatcttcgcatccgaaactggaatgggattttcgtataacttaatgttatcccaatttgcgatgctgacgaatttttacttaagtacttgggaagagtaccatacacacacattatacttaagtgagttttctggacccgtggaaggcatcctgattgtttgcgtttcattgatactgacaggtatatacggaaaacaggtaatctggcatacctacttatttacaattacagttggtgataaggtaattgatgtagacactctagatattgttttttccctagctgttttcggtttggttatgaacgcattgtctgcgaaaagaaacgtggataagtattatagaaacagcacttcttcggccaacaatatcacgcaaattgagcaagatagtgctataaaaggtcttttgcccttttttgcctattatgcaagcattgctttactagtgtggatgcaaccaagctttattacactctctttcatcctttccgttggtttcacgggagcatttaccgtcggaagaataatcgtttgccatttaactaagcagagctttcccatgttcaatgcacccatgttaattcctttgtgccagatagtattgtacaaaatatgtctatccctttggggaattgagtctaataaaatcgtctttgccctatcttggcttgggttcggtctctcactaggtgttcacattatgtttatgaatgacattatccatgaatttactgagtacctggacgtttatgctttatccatcaagcgctccaagctgacataa

SEQ ID NO: 1663 - DNA, 597 bp, Saccharomyces cerevisiae
atgtctgaattcttttgggatgtacaaaaaatacaagagatttctaatgtcgaagaacattctgtggttaagtgtgttactgtgaatacgagcaggttaatttcgcagcttaacgaggagctacaagacgaagaaagtggcgtcaattttattgttacacagctgcaattactgataaataatgtctatgagaaaatacagaaaagccctggagttcccgcacatcgttctctgatgataaatttgaatttcacgcgcttgaaattctcaatagcttattgggatatcttattggagaggtcactagatctaataaatggaccatcgaaaacgggtgcccgctactttattacagaggttacaccagtagacagaagtcgatatgttgaaaacaatcaatattttctagcttttaaagctaaccagcgtttgacacggaacagcgtggatatggacgagtttattgattttgaaattctaatcaagcaaataattttcgacctcttcaaaaaaaacggaattccagatcaagattttgaagccattttatcaaggtttcataatttggaaagcttggtggttgcttttaatgaataa

SEQ ID NO: 1664 - DNA, 852 bp, Saccharomyces cerevisiae
atgaatagtaaccgatgccaaacgaatgaggtgaataaatttattagtagtacagaaaaggggccttttacgggcagggacaatacgctctcttttaacaaaatcgggagcagactgaattcaccaccgattctgaaggataaaattgagctgaaatttctacaacactcagaagatttgaatcaatcacggtcctacgtaaatattcgtcctagaaccttagaggatcaaagttacaaatttgaagcgccaaatctaaatgacaatgaaacttcttgggccaaggattttagatataacttccctaagaatgttgaaccgcccatcgaaaatcaaatcgcgaatcttaatataaacaacgggctacggacatctcagacagattttcccttaggcttttattcacagaaaaactttaacattgcttccttccctgtggttgaccatcagatattcaagacaacaggtttagaacatcctatcaacagccacattgattctttaattaatgctgaattttcggaactggaagccagtagtttggaagaagatgtccatacagaagaggaaaattcaggtacgagtctggaagatgaagaaactgccatgaaaggtttggcttccgatataattgagttttgcgataataatagtgccaataaagatgtaaaagaaagactaaacagttcaaagtttatggggctgatgggcagcattagtgatggttctatagttttaaagaaggataacggtacagaaagaaaccttcaaaaacacgtaggtttttgttttcagaattcaggaaactgggctggtcttgagttccatgatgttgaagacagaattgcttaa

SEQ ID NO: 1665 - DNA, 714 bp, Saccharomyces cerevisiae
atgaatcaaggttacacacagctttccgcaccggaactgaaggagactaaaacatcgaagctaaataaaatgaacaactttcgaagctctccgattgctgagataattaataagataccaccagattgcgggaagatacagaatacaacatttcctgagttcaatccagcgttaagaagacgacaacacgaacagtggcctgcatacgaaaaaccaataagagttactgacagtatgtcaccacagctttcttcaatcaattgtttgccaaatttgtatccccacggtacgctaccattaccaaacccttatttatcctatttaaatcacattgaaaaagttaattgccaagatgtcaagtttagtaactggagtgttttacataattcgaataatggatttgaaattccgacatatttcagtccacggacaacacaaaacatgccttgttccgaaaaagttgaaagctggcttgaaagattaccaatttttgtggggttcgacggttatttatttacaaactgctttgattatgaatatatgttggattgggaagagacagaatttacattcgagaaaacatcatgtatggagacggattattctaaagctttaaccgatactgatattatatatattcaagagaaaaaaattgaagcgttgataagaaaccaatatctgaaggagtatgaattttctcaaaaagatttttga

SEQ ID NO: 1666 - DNA, 429 bp, Saccharomyces cerevisiae
atgcggttaattttcattgcgaaaatgcttcaatattcatttctaccattttccccgttcaatcttttgaattttgataatagtataagcgtaagctggtttataacatactcagtgatcgtttccatttgggggtttgctgtgtggattgaaggagcatataggaataagattaatctacagcttccaagatgtacgaagataaaatgctcccgctacaatacgagaataaaatcccccaagtggttcaactgtaaaaattggatgcattttttcctattatacctttttctaaccgcttctaacttaattgttcaattggcctatttttcaaaagaaatgtgtagtcagggtataaacgttcctggaacgaagaaaccaggtaatagagtttatttatcggttatcatactaatggggaacgggtga

SEQ ID NO: 1667 - DNA, 435 bp, Saccharomyces cerevisiae
atgatgataataatatttatagaattgtgtagaattgcagattcccttttatggattcctaaatcctcgaggagaacttctagtacattctacatacctaatattattgccttattaaaaatggaatcccaacaattatctcaaaattcaccaactcttcacatacatacctgcggtagcaagataggtacactttttctacgtttcacgaaggtagcgataggtacctcactcattgtaggtgcgggggtagcgatggaggtttctgtaccattaccaccacagccactatactcacgtagtgaagtccctagcgtggaattgtgtggtatcgttgctatctgtcgttcgccaccctcggtatatccaacgtgcaggccaatatcactctctaagaaaatcgtatcaggattggtacggacaaactcttcatag

SEQ ID NO: 1668 - DNA, 1818 bp, Saccharomyces cerevisiae
atgtctaataaacaactagtaaagccaaaaacagagacaaagacagaaataactactgaacagtctcaaaaactgctccaaacaatgctcacaatgtcttttggttgtttagcctttctcagggggttgttccctgatgatatatttgttgaccaacggtttgtaccggagaaagttgaaaaaaactacaataagcaaaacacgtctcaaaataactctatcaaaatcaagacattaattaggggcaaatcggctcaagcagatttattactggattggttggagaagggagttttcaaatccattcgtttaaagtgtttaaaagccctatcattaggtatatttctagaggatcccaccgatctcctagaaaattacatttttagttttgattatgacgaagagaataatgtcaatattaatgtaaacttgagtggcaataaaaaagggagcaaaaatgccgacccagagaacgagacaatttctttactagattcgagaaggatggttcaacagttaatgagacgatttatcataattacccaatccctggaacctttaccccaaaaaaagttcctcactatgaggttgatgtttaatgataacgtcgatgaagattatcagccggagttgttcaaagacgcgacttttgacaaaagagcaactttaaaggtccccacaaatttagacaacgatgctattgacgtcggtactctgaacacgaagcatcataaagttgctctttctgttttgtcggcggcaacatccagtatggaaaaagctgggaacacgaactttattagagtagacccctttgatttaattttgcaacaacaagaagaaaataaacttgaagaatctgttcctacaaaaccccagaattttgtcacaagccaaacaaccaatgtgcttggaaatcttttaaattcttcgcaagcaagtatacaaccaactcaatttgtttcaaataacccagtcacgggcatttgtagttgcgaatgtggattggaagttcccaaagcagccaccgtgttaaagacttgtaaaagttgccgtaaaacactacacggcatctgttatggcaattttctacattcgtcaattgagaaatgctttacttgcatttttggaccttccttggatactaaatggtctaaatttcaggatcttatgatgattagaaaggtttttaggttcttggtgagaaaaaagaagggatttccggcctctataacagaactcattgatagttttatcaacgtcgaagatcagaataacgaagtaaaagagagagttgcattcgccttatttgtatttttcttagatgaaacactatgcctcgataatgggggaaaacctagccaaactattaggtacgttacgagctctgtactcgttgatgtaaagggaattgtcataccaaatactagaaagcaactgaacgtaaatcacgaatataaatggcactttaccaccagttcccctaaagccgagagcttctatcaagaggttctgcctaactcaagaaaacaagtcgagtcgtggttacaggatatcactaacttaagaaaagtctattctgaagctctttctccgtcgtcaaccctacaggagcttgatcttaactcaagcttgcctacgcaagatccaataatttctggccaaaaaaggagacgttacgatcttgatgagtacttagaggaagataaaagctcagttgttaatgatacgataaaagcaaaagattttgatgaaagtgtaccagcaaagattcgcaaaatcagcgtctctaaaaagactttgaaaagtaactggtag

SEQ ID NO: 1669 - DNA, 2928 bp, Saccharomyces cerevisiae
atgtcagaccacaacgttaactccacttttagaaaaactttggtcgagttatgcgaaactgcaacttggataacatcgcaagtttatgcggctaagaatttagagaaaaacgatttgattacagtagataataaaataagcgcattgtatcccattgcagaaaaatatgatagatcattcagaaccactacagttatattagacgaagaacttatcctgaaattggaaaatgcagcatcaagtctatggaattcgttgactattgctatgaaagctgaaaaagcttcagacaaatattttaatgaagtcttttgcaaatgtaagattttcgcaaccaagcttctctccatccatgaggctttgtttcggacaaacaccaacctcctacggaacttcaaatgttatatcagttctttcaaaagcgctagtgagtatcgttttgacgatttaataactaatacacagcagcattcagagaaatacttacagataatcaatgagaatgtggaaagtttctccaatgaagagaaaactgagtttaaaaaactgacgttcgagttttacttggtaaattttcaattatatctttcggaaaatgacctggatacagcaaatatttacactgcaaaagtaaacatcactgataattccaaatatatggacgcagatttgctcatcgaattatgcagaatgatctataattccacagttatgttgaaagaaattaataatcctgaaactcagttagtagacgtaaatataatttcttttttgaaggatgtggaaaaatatttggagttacctgtggaaaatttaaaatctcatactgattatagtaatttaaagtattcagttttgatttttatggcaaattgtttggttgaaggacacccacaagcttctgaacttgaacaatgtgatcactatttaagtcttttgcaaaatgaatatccaaacaaagtggacccttttatattggctatcaatttaactaaacggagaaatatcgtaaatccggcagaaaccatagaggaaattctcatgcgaatgattatgtcagtagatgtaatatccaattttcaagctgtcatagcttctatcaatgacttatcaaaaatgaacaccaaattctctatagtgtgtctcgattatttgttaatcaataaactgaattctaagaatgatagtaaattcttaggaaaagccatttgctccaggtttttaattacaacacaatcaaaaacaatgaatgattccgagatagcggaaagcttagagaattttagcacacagatggaaagaatagtttcagaacccctcaccaaacatgctatctcttgcataataactttattatggaatactggaaaaaagttagaaaagatggaaaaatacgttgttagtattagattttacaaattagcactcaaagatattatcagtcaaaattattccgaccgggggaaaattcaaagggctctacaagtcgtatataacaaaattgaagactattccaacacagttagagtatatcaggatatggacgaagtagatagacaatctcctctgtgtcaacttttgatgttgcagtcttttctagcggatgataaaacagaggaagcgcttacgtgcctccagaagataaagtcgtctgaagatgaaaaaagtacagacgctcttatattagcagtagcagaatgcaaacgaaagacagatttgtctgttcaagggctcttaatgatatttgacaaattacaatctaaaagcaattcgcaaactatatcatctacgtcgagttctcagacactgagcattctcaggtataccctacagatgattgtcaaagtatcggaagaggagcctttagaaaccttcataaattatttaccaacagtacagaaacttttacagaaggctgtcgagtttctcaaaactgtaaagttactaaatcaattaccaccagacgttgagaaggaagcaatatatcagcaatcagtggctgtaaacgaaatcgagtggtttgcctctttttcctataatgtggctgtaaaatgcttagttgatcagtcctgtgaatccatctccgagtttccccagtattgcattcaatttattgaccttattccggtccaagacttcactttcccgaaaatgtatcatttcacatattggaggttcaaagccacaatcttgcagttgataatagccaaagaaaaagcaaagcaagaccaacaccaaaaggattgggatatttatgagaagtcagaagagttggttaatagcataaatgttatgaagaaaagctcggaatttaaggatgggtcatcattggaagatagaaatacattacatgaatgtttcctggaggcgttgactatacatctggaaagtgccttaatgatgcctgatcaaactaggattctggacatattgaagaaaacggaattgtatcaagatagccgcgtggatgcgctacttattgatatctcgtcgaatatggaagatttacctaaaggagttctcatagagatacttgaaacagtattaaaaagaaacatgggccctgaagtgaaagaacgggaactctgtagctggctgcgaattttactggaaaatgcaattaatcttaaccatgaggtcgaactacgcatattggatagggttcttaagatcctaaatataaatcaatcaagtcttcaagacacagatggtgtccttcaaacagagttagaaactatagccacttactgttggaatatcggcgtcaattacataatcaaagacaacaaaagcaatggaattgtttggtgtaaacattcaatggggttcgcaaacatggttaatgaaggcttgcaggagcaattgtactctttatgggagtctttagcaagttcggcaaatatcgatatcaatagtattgctaaataa

SEQ ID NO: 1670 - DNA, 984 bp, Saccharomyces cerevisiae
atggctattcaaaaggttagtaacaaggacttgtcccgcaaggacaaaagaagatttaatatcgaatctaaagttaataagatttatcaaaatttttactcagaaagagataatcaatataaagatagactgacagcattgcaaacggatttaacttctctgcatcaaggtgataatggccaatatgcccgccaagtacgagatttggaggaagaaagagatctagagttagtcaggttgcgcctgtttgaagagtaccgtgtttctcgttccggtatcgaatttcaagaagatattgaaaaggctaaggctgaacacgagaaactcattaaattatgcaaagaaagactgtattcgtctatagagcaaaaaataaagaaattacaggaggagaggttactaatggatgtggccaatgtgcactcctatgccatgaattatagcagaccgcaataccagaagaacacgagaagtcacacagtaagtggttgggattcttcgtccaacgaatatggaagagatacagcaaacgaaagtgctactgacacgggagctggaaacgatagaagaacgctaaggagaaggaatgcttctaaagacacgagaggtaacaacaacaatcaagatgaatctgattttcaaactggtaatggttctggaagtaatggccatggttctagacaagggtcgcaattcccccatttcaacaacctaacctacaagtcaggcatgaactctgactcagattttctacaaggtataaatgaaggtactgatctatatgcatttttgtttggcgaaaagaaccccaaagacaatgctaatgggaatgaaaagaaaaaaaaccgtggtgctcaacgatattccaccaaaacagctccacctttacagtctttgaaaccagatgaggtcacagaggatatttccttgatcagagaattaacaggtcagcctccggctcctttcagactaaggtctgactaa

SEQ ID NO: 1671 - DNA, 2433 bp, Saccharomyces cerevisiae
atgaatactccacagattagtctgtatgaacccgggacaatattaactgtgggatctcatcatgctaagattatcaaataccttacgagtggtggattcgcacaagtatatactgccgaaatttcccctcctgacccatatagcaatgctaacatagcatgcttgaaaagagtcattgtcccccataaacagggtttaaataccttgagagctgaagtggatgctatgaaactccttagaaataataagcatgttgtttcttacatagattcacatgctgcaaggtctgtaaatggtatagcatatgaggtgtttgtgttaatggaattttgtgaacgtggaggtcttatagattttatgaacaccagattacaaaatagattacaagaatctgaaatattagaaattatgagtcaaaccgtccaaggtataactgcaatgcacgctctgcagccgccattgattcatagagatattaagattgagaatgtacttatttctcatgatggcttgtataaagtttgtgattttggttccgtttccggtgtgataaggccacctagaaatactcaagagtttaattatgttcaacacgacatcctaacaaatactacagctcagtatagatcacctgaaatgattgacctgtacagagggttacctatcgacgaaaaatctgatatttgggctcttggtgtctttctttacaaaatatgttactatactacgccgtttgaaaaaagtggtgaagccggtatactacatgcaaggtatcaatatccatcctttccgcagtatagtgacaggttgaaaaatttgatacgtcttatgttaatggaagcaccatctcagaggccaaatatttgtcaagttttagaggaggtttccaggttacagaataagccttgcccgattagaaatttttacttgttaagagcaatgaatcagaatgcgaatacccaattggccggtgaaccgtcttcgacaacttatgttccaacacagaaatttattcccgtacaaagccttcagagcatcaaccagccaccaaatatgatgcctgtaactcacgtcagtactactcctaatttgggtactttccctatatctattaatgataataacaagacagaagtaacggcgcatgctggcttacaggttggaagccattcaaatttgactagtcccttaatgaaaacaaaatccgttccactttctgatgaatttgcatcactatattataaagagctacacccttttcaaaagtctcagactttcaaatcagtagaaagtttccaatccccacaaaggaagtctatgcctccattatcgcttactcctgttaataatgacatttttgatagagtttcggcaataaatcgtccaaataactacgttgattctgagacgcaaactatagataacatggctgtgccaaacttaaaactatctcccaccattacaagcaaatcactaagctccacaaaagaaattgctgctccagataatataaatggaagcaagattgtgcgttcactaagctctaagttaaaaaaggttattactggtgaatctcgcggcaattctccgattaaatcaaggcaaaatactggtgatagtatcagatcagcatttggtaagcttcgtcatgggtttacaggaaactcagtgaacaatagcaggtctgcttcctttgataataacaatgtcaacggcaatggtaacaatacaaacaggcgattagtttcgtcttcaacctcctcctttcctaaatttaattctgataccaaaagaaaagaggaatcagacaagaatcagagactggaaaaacgtcgcagtatgcctccttcaattttatcagattttgaccagcatgagaggaataactcgagaactggatcaagggactattacaggtctcattctccagtgaagaaaactcaagcatcagctaaaacgacatcaaagcctactttgataccagataatggcaacgttaatataaatcaagaaaagaaggaatcaattcaaagaagagtgcataacttactaaagagttctgatgatccggtaacgtataaatccgcatccgggtatggtaaatatacagatattggtacagaaacttccaatcgacattcaagtgtaagaataacaccaatcacagaagaaaagtttaagaaaacccttaaggatggtgttttggacatcaaaacgaaaagcaacggtaaagataaatcaagaccaccacgtccaccaccaaaaccactacatttaaggacagaaattcagaagataagaaactttagtcgtttacaatcaaagaaactgccgattgaaagaatttccagcgaagccacagaaactattgttgatgttaacgtagatgatttagaagccgattttagaaaaaggtttcccagcaaagtttaa

SEQ ID NO: 1672 - DNA, 306 bp, Saccharomyces cerevisiae
atgctaaaggtggaaaagttcaaaaaattgaagcgattcgaggtctattattgtttaaaaaattcttttctggaagaagtagatatcgagatgaaatattcctgcagtataacaactataatgagcaatggttcagcaagcttgttgatgaactgggaagaattaacacctggtcactgttttacctcttacacaactaaccctatcgcaggtgactatggtttgaatgcatcagcaatagacggccacacggaagagttagtggcgacccacccagcgggaaccttggagaatgcaacgcagtag

SEQ ID NO: 1673 - DNA, 738 bp, Saccharomyces cerevisiae
atgaatagatgggtagagaagtggctgagggtatacttaaaatgctacattaatttgattttattttatagaaatgtatacccacctcagtcattcgactacactacttaccagtcattcaacttgccgcagttcgttcccattaataggcatcctgctttaattgactatatagaagaacttatactggatgttctttctaaattaacgcacgtttacagattttccatctgcattattaataaaaagaacgatttatgcattgaaaaatacgttttagattttagtgaattacaacatgtggataaagacgatcagatcattacggaaactgaagtgttcgacgaattccgatcttccttaaatagtttgattatgcatttggagaaattacctaaagtcaacgatgacacaataacatttgaagcagttattaatgcgatcgaattggaactaggacataagttggacagaaacaggagggtcgatagtttggaggaaaaagcagaaattgaaagggattcaaactgggttaaatgtcaagaagatgaaaatttaccagacaataatggttttcaacctcctaaaataaaactcacttctttagtcggttctgacgtggggcctttgattattcatcagtttagtgaaaaattaatcagcggtgacgacaaaattttgaatggagtgtattctcaatatgaagagggcgagagcatttttggatctttgttttaa

SEQ ID NO: 1674 - DNA, 2076 bp, Saccharomyces cerevisiae
atgcaaagctcaacaagtactgatcaacatgtgctacatcacatggaccctcatcggtttacgtcccaaataccaactgcaacatcgtcacaattgaggagaagaaacagcacgaatcaaggtctaaccgacatgatcaataagagtattgccaggaatacaataagcgggactggcattcccacaggaggcataaataaaaataagaggacaagaagcacggttgcaggaggtacaaatggtacagcattggctctaaatgacaaatccaacagtagaaacagcgtcagcagattatcaataaatcaacttggcagcctgcagcaacatctgagcaatagagatccaaggccactaagagacaaaaacttccaaagcgctattcaagaggagatttatgactatttgaaaaagaataaatttgatattgaaacaaatcatcccatttcaataaaatttctaaaacaacccactcaaaaggggtttattatcattttcaagtggttatatttaagactcgatccaggttacggctttactaagtctatcgagaatgagatctatcaaattttaaaaaatctgcgttatccgtttttagagtcaataaataaatcacaaatttcggctgtaggtggctctaattggcacaaatttcttggcatgttgcattggatggtacgaacaaatattaaactggatatgtgcttgaataaagtagatcgttcattaattaatcaaaatacacaagaaataacaattctgagccagcctttaaagactttggacgaacaggaccaaagacaagaaagatatgagctaatggtggagaaactgttaattgattattttacagagtcttacaaaagctttttgaaacttgaggataattatgagccttcgatgcaagaactaaagttaggttttgaaaaattcgttcacataattaatactgatatagctaatctacaaacccaaaatgacaatctttatgagaaatatcaagaagtaatgaaaataagccaaaagatcaaaaccaccagggaaaaatggaaggctttgaaaagcgattctaataagtatgaaaattatgtcaacgcgatgaagcaaaagagtcaagaatggccaggtaaactggaaaagatgaaatccgagtgtgaactgaaagaagaagaaattaaagccttacaaagtaatatttccgaattgcacaaaattttaagaaaaaagggaatttcaactgagcagttcgaattacaaaaccaagaaagagaaaagctgactagggaacttgataaaataaatatccagtctgataaattgacaagctcaattaaatccagaaagctggaagccgagggaatattcaaaagcttactggatacgttgaggcaatacgattcgtcgatacaaaatttaaccagatcgcgtagtcaattgggtcataatgttaatgattcatctctaaaaattaacatttcagagaacttattagacagagattttcatgaaggtatctcctacgagcaattgtttccaaagggatctggaattaacgagtctattaaaaaatctatcttaaaattaaacgatgaaattcaagaaagaataaaaaccattgagaaagacaacataacattagaaaaagatatcaaaaacttaaagcatgacataaatgagaaaactcaaattaatgaaaaacttgaattggaattgtccgaagcgaattccaaatttgagctctctaagcaggagaacgaacgattattagtagcgcaaagaattgagattgaaaaaatggaaaaaaaaattaatgattcaaatctcttgatgaaaactaaaatttcagatgctgaggaattggtaacttcaacggaactaaaattggaagaattgaaagttgacttaaacaggaaacgatacaaactacaccaacaagtgatacatgttattgatataacaagtaaatttaaaattaatattcaatcgtcattggaaaactctgaaaacgaattaggaaacgtcattgaagagttacgaaatttggagtttgaaactgaacataacgtaacaaattaa

SEQ ID NO: 1675 - DNA, 1716 bp, Saccharomyces cerevisiae
atgaatgatcctcgtgaaattttagcggttgatccgtacaataatattacttctgatgaagaggatgagcaagccatcgcgagagaacttgaatttatggaacgaaagaggcaggccttagtggaacgattaaaaagaaagcaagaatttaagaaaccccaggatcctaattttgaagccatcgaggtacctcaatctcctaccaaaaaccgtgtgaaagtggggtctcataatgctacacaacaaggcacaaaattcgaaggttcgaatattaatgaagtaaggttatctcaattacagcagcaaccaaaaccaccagctagtacaaccacatactttatggagaaatttcaaaacgcaaagaagaacgaagataaacaaattgccaagtttgaaagcatgatgaatgcaagagtacatacgttcagtaccgatgagaagaaatatgtgccgataatcacaaacgaattagaaagcttttcaaatctttgggttaaaaagaggtacatacctgaagatgacttaaaacgggctttgcatgagatcaaaatccttcggttgggcaaactttttgctaaaattcgcccacctaaatttcaagagcctgaatacgccaactgggccaccgtaggcctcattagccacaaatcggacatcaaatttacatcatctgaaaagccagtcaaattcttcatgttcaccataacggactttcagcatacactagatgtttatatcttcgggaaaaagggtgtagaaagatattataatcttcgcctgggtgatgtgatagcaatattaaacccagaagtactaccatggagaccctcagggcgaggaaattttatcaaatccttcaaccttcgaattagtcatgacttcaaatgtatcctggagataggttcaagtagagatttaggttggtgtcccatagtgaataaaaagactcacaaaaaatgtggctctcccattaacatatctcttcataagtgttgcgattaccatagagaagtgcaatttcgtggaacaagtgctaaaagaattgaattaaatggtgggtacgccttgggcgcgcctacgaaagtggactctcaaccaagcctatataaggccaaaggggaaaacgggtttaatataatcaaaggtactcgtaagcgcctgtcagaagaggaggaaagacttaaaaagagctctcacaattttacgaatagtaattctgccaaagcatttttcgacgagaaatttcagaatccagatatgctggcaaacttagacaataaaagaaggaaaataatagaaactaagaaatcgacagcactgagccgcgaactaggcaaaattatgagaaggagggaatccagcggattagaagataagagcgtcggagagcgacagaaaatgaaacgaaccacagaaagtgccctccagacagggcttatccaacgcctaggattcgatcccactcatggaaaaatttcccaagtactcaagtcttctgtatcagggagcgaacctaagaacaacttactcggtaaaaaaaaaactgttataaacgatctcttgcattacaagaaggaaaaagtcattctcgcaccttcaaagaacgaatggttcaagaaaagaagccatcgcgaagaagtttggcaaaaacatttcggatccaaggaaactaaagaaacttctgacggtagtgccagcgatcttgagataatataa

SEQ ID NO: 1676 - DNA, 4128 bp, Saccharomyces cerevisiae
atggactcttccccgaacaagaagacgtaccgctaccctcgcagatcgctgtcacttcacgcgcgtgatagggtcagcgaagcccgtaaattggaagaattgaatttgaacgatgggctggttgccgctggcttgcagttggtcggtgtagcgttagagaaacaaggtacaggatcacatatatacatgaaacagaagaatttctcagctaatgacgtttcttcgtcaccaatggtttccgaagaagtgaacggatcggaaatggattttaatccgaagtgcatgcctcaggacgcatcactcgtcgaaagaatgtttgatgagcttttaaaagatggaacttttttttggggggctgcttataagaatttacaaaacatctctctacgaaggaaatggttattgatatgtaaaatccgtagttccaatcattgggggaaaaagaaagtgacttcgagcacgacatactctacacatttggccactaatgaactagctgaaaacgcacactttttggatggcctagttagaaacctttcaacaggtggcatgaagttatcgaaggctctatataaactagaaaaattcctgcgaaagcaaagctttttgcaactttttctcaaggatgaaatttacttgacgacattgatcgaaaagactttgccactcatatccaaggaattacaatttgtttatcttcggtgctttaaaatactgatgaacaacccactggcgagaataagagcactacattctgagcctttaattcgctggttcaccgagcttctgacggatcaaaattctaatttgaaatgtcagttactttctatggagttacttttattattaacgtatgttgagggttccacgggttgtgagttgatatgggaccagctttccatattattcaccgattggctagaatggtttgacaaaatccttgcggatgatattgcaattcattcatccctttatttgaactggaaccaattaaaaatagactattcgacaactttcctactgctaataaactccatactgcaaggtttcaacaacaagactgcactagaaattttgaattttttgaaaaagaataatatacataacactatcacatttttagaactggcctataaagatgatcctaatagtgtcgtgatcatggaacaaataaaacaattcaaatccaaagaatctgcgatatttgactcgatgataaaaactaccaacgatacgaattcgcttcacccaacaaaagatatcgcaagaatagaaagcgagcctctatgtcttgaaaattgcctgttattgaaggcaaaagatagtcccgtagaggcaccaataaacgagattattcaatcgctgtggaaaatcttagactctcaaaaaccatactcagaatctattaaactattaaaattgataaattctttgctgttttatctcatagattcctttcaagtgtcaacgaatccttcttttgatgaaaccttggagtccgcagaaaatgtggattatgtttttcaagattctgttaataaattgttggattctctacaatctgatgaaattgctagaagagcggtcacagaaattgatgatcttaatgctaagatttctcatttgaatgaaaaattaaatttagtagaaaatcatgataaagatcatttaatagcaaaactagatgaaagtgaatctttgatatctctgaaaaccaaggaaattgaaaatctgaaactgcagttgaaggcaaccaagaaaagactagaccaaattaccacgcatcaaaggttatatgaccagccaccttcattggcaagtagcaacttgagtattgccggctcgataataaaaaataatagtcatggaaatatcattttccaaaatttagcaaaaaagcaacagcagcagcaaaaaatttctctgcccaagcgttcaactagtctactaaaaagtaaaagagttacgtccctttcatcatatttaactgatgcaaataacgaaaatgagtcccaaaatgaatccgaagataaatcaaaagactcattatttcaaagatctacgtcaaccattaattttaatatcccttctatgaaaaatattactaatatgcaaaatgtctctctaaattcgatactttcagagttggaattttcaaatagcctaggaacacaacctaattaccaatcgtctcccgtgttgtcttcggtttcttcttcaccaaaacttttccctcgactttcctcagatagtcttgataatggaatccaactagtacctgaagttgttaaactacctcaacttccaccgccccctcctccacctccccctcctccacttccacagtctcttttgactgaagcagaagctaaaccggatggtgtttcctgtattgcagcacctgcaccgccaccccttccagatctatttaaaactaaaacttgtggcgccgttccaccaccaccaccgccaccgcctttacccgagtccttgtcgatgaacaaaggcccctccaatcacgatttagttactcctccagctccacctttaccaaatggtcttctttcttcctcctcagtgtctatcaatccaacgacaaccgatttaaaaccacctccaactgaaaagcgattgaagcaaatccactgggataaggtggaggatatcaaagacacactttgggaagacacgtttcaacgccaagaaacaatcaaagaattacaaactgatggtatattctctcagattgaagatatttttaagatgaaaagtccgactaagattgcaaataaaaggaacgcagaatcctcaattgccttgtcttcaaacaatggcaagtcttccaatgagctgaagaaaatttcattcttatcaagagatttggctcagcaatttggtattaatttacacatgttttcccaattatctgatatggaatttgttatgaaagtattgaactgtgataacgacattgtccaaaatgttaacatactgaaatttttttgtaaagaagagttagtaaatataccaaaaagtatgcttaataagtacgagccatattcacagggtaaggatggtaaagcagtaagtgacttacaaagagctgacagaatatttttggagttgtgtatcaatttaagattttattggaatgcaagatcaaagagtctgctgacattgtcaacatacgagagagattattacgatttgattttcaagttacaaaaaattgatgatgcaatttcacacttaaatcgttcacctaaatttaaaagtttgatgtttattatcacggaaataggcaatcatatgaataaaagaattgttaagggtatcaaattgaagtcattgactaaacttgcctttgtcagatccagtattgatcaaaatgtatcatttttgcattttattgaaaaagtcataagaataaaatatcctgatatatacggttttgtggatgatttgaagaacattgaagatttaggtaaaatctcactagaacacgttgaatcagagtgtcatgaatttcataaaaaaattgaggatttagttactcagtttcaagtaggaaagctatccaaagaggagaacttagaccccagagatcaaattattaaaaaggtcaagtttaagattaatcgggccaaaacaaaaagtgaattattgattggtcaatgtaaattaactttaatagatttgaataaactgatgaaatattacggtgaagatcccaaagataaagagagtaaaaacgaatttttccaaccctttattgaatttttagccatgtttaagaaatgtgccaaggaaaacattgaaaaggaggaaatggaaagagtgtacgaacaaaggaagagcttgttagatatgaggacaagcagtaataagaaaagcaatggaagtgatgaaaacgatggtgaaaaagtaaacagggatgctgttgatctactcatatctaaattacgcgaagtaaagaaggatccagaacctctaagaagaagaaagagtacaaaactcaatgaaatagccattaacgtacatgaaggagatgtaaaaacgagaaaggatgaagatcacgttttactagagagaacgcatgctatgctgaacgatattcaaaatatatag

SEQ ID NO: 1677 - DNA, 660 bp, Saccharomyces cerevisiae
atgaggttccagcttttcatatatttttatttcaccattgttgtgattgcaggaactaacacaatacaacagttcagcgatgcgggcgataggttaatcacatcattgagaaatctggacaacaatggaacatacgaaacattgacagcagagaaggtgcctattatcgagggacaaattcaaaacattagtgcaaaatatgagcagcatacttttattttgaagggcttagaagcggtgctaaattataaagtgaaaagtttggataataatgagagagagtcgctcgaaatagaatatgaaaaggtggaaaaggcactagatgcggctttgaatgtttcaccatttgaatatatcaaaaagtttaaagaagtctccaggggcaaggtagttaatgctttagaaaacctcagtagagaacagaatcgaattactataaatggtggtagagaagacgaaaaagaaaaagaagcgagggaaaaaaagaaacgactagacagaataaagagaatcctaactgtaagtctgttagaattgggtctagctcaaggagtggccgatttatgtgcagtagcaccttttgcgtgtcttcttggggtgacagttggaagcatcggtttcatattttggttggcactaatatataatgctattcaataa

SEQ ID NO: 1678 - DNA, 1632 bp, Saccharomyces cerevisiae
atgacagcagaagatatactccttcgagaaagaacatctactacgacacaacgccctgtcaatagcgaacaataccttaatgtgcaattagccacagccccagtaaaaaattttcagactacaagcgagattagccggcaaactcttgtagacacatcaaatgatgacgtttattccatcaagaatttgaagggctcgaggaaccccattagccctagtgtttctaacgttggcttccaatccatattccatacagtagatcatcctcgatcgaaggtcagtgtggcctcaaatcattccttgaggagcaatgacaatgcctcagctgcaacatctaaatctggttcttctcagataggggaatctcatagcgttgacacggtggagtgctcgaacaatctatctaaaaagttatcttctgatgcaatatccattactcagaaaagtttacactccacgccctccggcaggtatatgaaaggaaaggcttctggcttttttaataggagaaacagagcacatacgaccatttcatcggatcctgcctcctttttgacagattcaagcaccttacataatagttcacattcatttcgaaacgtgattaagaactttttccaaaataaaagccacaggcacattggtcaagatgctatcgagcctgcaattccaaattccttgagtaaatttctgcattcctcttacggaagacataaatctccgtcacaatttattcatactaatgcggggcaacttgtggactcaggaacttctgtgtactcattgaatgttaatccatctggtgtcaatcccaacacaatcgttgaggatccgctttctggaactgatcctgcctcaccgaatccggtctcaatgttacacgaccttttaagaaatttaccatctctggaagctaactataaacacttcaactcccaagaactgacaaccctaacaaataatatttggaatatattttgtagtaacgtagcagaattattcagaactcaaagaatatggaaactcagggccaaaatagaaaattttaacgaagttttagaattctattgcattttaaaaacagatccaagagtcacacatagcggcatgaatagaattatcagcgatttgaaagaatttttggttagttccctatacaatttagaaaaccaaattgtttttaactattctaatgaagacacaataaataacgcattgaaaagattaggcgttatatggcggatattttatcaagaggtatattatgatttagccgctgtgttattaccgttggatcagagtatcagagaagatggtaattctacggttttaaagtcaggcaatgaaagtcggactcacattaatggtaattattctattgggtttcttttgcttatgtgctttagagattcaatagtcttaccttgttatgaaaacttcgtaaatagtaacgatggtatcagcaaaagttttcaactttacattttcaatcaagaagaagaaagtaatgtcacagaaacagataaattgacattactgcagtgttttggcatattgagtaccattcaaagtaatgatagaaatcaacgaattatcgaagagttattagcaggcattagaatgagtatatag

SEQ ID NO: 1679 - DNA, 1938 bp, Saccharomyces cerevisiae
atggttgaaaaacgtagtagacagagttccagtagtggctcagagttcagtgttccacctgatgtcgataacccgccactttctatccctttgaagactttatcagacagatatcagctgatcgaaaaactaggtgcaggatcatttggttgtgtaactttagccaaagcgcaatttcctttatcgaacatattgggtaaacaacatgatataaggggtactttaatggatcagcctaaaaatggtcaccaaaactatataacaaagacacaaggtgtagtggctataaagacaatgatgacaaaactgcatacactccaggattatacgagggtcagagaaattaagttcatactggcaatcccagcgaatgaccatctgatacaaatttttgaggtctttattgactctgaaaattaccaattacatatcgtaatggaatgtatggagcaaaacctatatcaaatgatgaaacatagaaggcgccgagttttttcgattccttctttgaaatctattctatcgcagatactggctgggttaaaacacatccacgaacataatttcttccacagagatttaaaacctgaaaatattcttatcacaccaagtacccagtattttgaaaaggagtacatgaaccagattggatatcaagataactatgtcattaaacttgcagattttggtttggcacgccatgttgaaaataaaaacccgtatacggcctacgtttccacaagatggtatagatcgcctgaaatattattaagaagtggttactattccaaacctttggatatttgggcattcgggtgcgtggcggtggaagttactgtattcagagctctcttccccggtgctaacgaaatcgatcagatatggaaaattttagaagttcttggtacacctatcaaacgttctgattttgttaatacaaaccacatcacagctccaccacctggtggattttgggatgatgccagtaatttggtccataaattaaacttgaaattgccttatgtagaaggttcatcgttggatcatctactttctagctcccaactatccgatttatctgaggttgtcaaaaagtgtttaagatgggatcctaatgaaagggcaacagcccaagagctttgtgaaatgccattttttgaaaacaccgtggcatcccaagtagacgcaagaggcaatgtgactaatacagaacaagcattgatttttgcaggtataaatccagtagcgaccaacacaaagcccatatattttaactcttcaacaaaattgcccgcagaaacagagtctaatgatattgatatcagcaacaacgatcacgattctcatgctatgtgctcaccaacattaaatcaagaaaaactaactttggtagaatttttaaacgaattcgttgaagaagataatgatgatcactcaatacctgatgttggaacagattctaccatttcagattctattgatgagactgaattatcaaaagaaattcgtaataatttggccctttgtcaactaccagatgaagaagtcttagatcattcattatcgaatattaggcagttgacaaatgatattgaaattataaataaagatgaagcagacaacatggaacagctattttttgacctggaaattcctgaaaaggatgagtttcagagaaaacaaccatttaatgaacatgcagatattgatgaagacatcgttctaccatatgtgaacaactcaaattacacacatacagataggtcacatcatagaggtgataatgttttgggtgatgcctctttaggcgattcgtttaattcaatgccagattttactccaagaaatttcttgatacctacattaaaaaaatcacgggaaaagttcgagcctcatctatccaattcaaaccaacattttggaaatgtaaccttctaa

SEQ ID NO: 1680 - DNA, 1164 bp, Saccharomyces cerevisiae
atggacggtagaaatgaaaaaccaaccactcctgtgtcagattttcgggtgggaagctccgagcaaagtcaagcgggagtgaatcttgaagatagtagtgaccatcgcacttccaattcagccgagagcaaaaaaggcaatttaagtggtaaaagcatcagtgatctaggtatttctaataatgataacaaaaatgtaagattcactgctgatacggatgctctagaaaatgatttgtcttcaagatctacagaaaccagcgataattctaagggcacagatggacaagatgaagaagataggcctgctcgccacaagaggaagcctaaagtttctttcacacatttaaggaacaatggtaaggatggagacgatgagacgttcatcaagaagataataaataacctgactggaaatcaagggggtttggtccctggcttggcaccaataccttcagaaaatgaaaatgggaagaatgatatagaaaaaaataaccgtaatgaagaaattcccttatccgatctagctgatgcgtctaaaatcgtagacgttcatgagggcgacgataaagaaaaactggaggctctcaaattagaaggtgacgtaaattgtacgtcggatggcgaaacgttaggctcaagttcaaaaaattcatttctggctcctgcagtggatcattttgatgattatgcagaaaacaattcatccgacgataacgaagggtttattgaaacctccacatacgtaccccctccatctcaagtgaaaagtggagtactagggtcattattgaaactttaccaaaatgaagatcaaaattcaagctcaatcttttcagattcacaagctgtaacaacagatgatgaaggtatttcttctactgctggaaacaaagacgtaccagttgccaagcgtagcagattacaaaatttaaaaggcaaggctaaaaaaggcagaatgcctagactgaagaaaagactaaaaactgaagcgaaaattacggttcacattgcagacattttacaaagacaccggttcatcctacgcatgtgtagagctcttatgatgtatggtgctccgacgcataggcttgaagaatatatggttatgacttctagagtccttgaaatagatggtcagttttgtatcttccaggttgtatga

SEQ ID NO: 1681 - DNA, 1923 bp, Saccharomyces cerevisiae
atgctaaatcagcacacaagttcagtaccggatgacgaacatctgcagatggcacaccaaaatagcagttcagaagtgagaaatgaggcagcggtcccagatcaacttttgactcctttacaaccgtataccattttattgaaagatggagaaacaatagctacgatgtatcctatacctgcgtatcctgatttattgccgctagggctcttaaatttccttctagatgaatttaacatggaagtggaaaagggagatagttttccttattacgagactttatcactagaagaattcaaaaatgtctggtttcataatgatggtcacgtttgtattatggtgttaggcgaaataccagaactggattatagtatggatactgaagcggacacaaatgataattttggaacagaaatagaaaccacgaagcacaccacccaatataagaaacgaaaagaacgtcgcaatttaaatctaagtatgcagtgggagaagcaatgtctaggcatatttgacctcaaaccagcataccctggacggtcagcgcatgtggtcacaggaacatttctggtcaatgctggtattcgtggaaaaggtattgggaaaacactaatggaaacattcatagaatggtcaaagaaattaggatttacgtcctcctttttcccgttaatttacggaacgaacgtaggaatcagaagaattttggaaggattgaactttaggcggattggaaagctgcctgaagccgggattctcaagggctttgatgtcccagtagattctttcatgtatggtaaagagttcacacatattacgaaaagtatagatttgttacgagatcctcaaaagagtatcgaaattgggaaatatgaacgattaaagcattttctggaaacaggcaagtatcctttacattgtgatagaaacgaaaaggctagattaagagtactttccaaaactcattcggtattgaatggcaagttgatgacaaaaggaaaagaaatcatttatgacacggatcaacaaatccagattgcattagagatacatttaatggaacatttaggcatcaacaaggtgacctccaaaattggtgaaaaataccattggagaggaatcaagagtactgtttcggaggtaatctctcggtgccaaaaatgcaagatgaggtacaaagacgggacaggggtaataattgaacaaaagagagcagttaagcaggcgcatatgctaccgacgcagcatatagaaactatcaacaatccaagaaaaagcaagaagcatgataatgcgttattgggacaggcaataaatttccctcaaaatattatttccagtacgctgaatgatgtggagggtgaacccactccgccagacactaatatcgtacaacccacattccagaacgccacgaatagtcccgcaacaacagctgaagccaacgaagcgaataaaagatccgagtttctttcctcaatacagagcacgccactattggacgacgaacagtcaatgaattccttcaatagattcgtggaggaagaaaactcaagaaaaagacgaaaatacttggatgttgcctccaacggaattgtaccccatttaacgaataacgaatcgcaggatcacgcgaaccccgtcaaccgtgatgaacgagatatgaaccattcagttcccgatttagatagaaatgaccatactataatgaacgatgctatgttgagcctcgaagataacgtcatggccgctctagaaatggtccaaaaggaacaacaacagaagataaatcatcgaggtgaagatgtgactggccaacaaatcgatttgaacaacagtgaaggtaatgagaattcagtcactaagattgttaacaacgaatctaatacatttacagagcacaattctaatatttattattaa

SEQ ID NO: 1682 - DNA, 2568 bp, Saccharomyces cerevisiae
atgggagatgagaagctttcacgccacacatctttgaagagggccagatcgctctccgaatccattaagggtctatttaagccttcagggatatcaggcagtaataatgctgcggctccttcatctcgtcccggtcaggaccaagcacattctcatcaaacagcaagaataataactagcaacgtatcttccccgtctatatcccccgtacatagccctgttctacaagcggctcctaagcatcacaaactgggcgtccctaatattgcaaaactctcgttgtcacctagtagggaaccatctttgaattcagaaaatgaaatgttttcacaagaatctttcataagtgaaaaagatgaagatgaagccaatttgttagagagagaggatcttcaaaataaaaaggaagagaaagctcgtgcaaaacatgtacgttccaaggaagcttatgtgcctcatcaccgctatacagttggtagcgatgaggttgaaagacaaccaagggaacggctgaaaaacttcccacaaaacgcaggttcttcaaaccctgcaaatagtaatgccaaccatgttttggatcaggaaaataacttttctattgatgctatgcttgattatgacgaagaatcaaaacttagaaggagaaacagtctgggcgtacgtaatcatagcaatcgcacaagaagtaggaagaacagtttgtccacaccaaggtcaccaccaatgaaaaatggaaatggtggaatgaattcaaatgccaccaacaatgttggtaatggtacaggaaatagaatatacatgaggggaagaaatcactcagactctatcagtgcttccagcttaccgaaatttcaagaaatcgaatgtaaatgtattttggatttaggtcatttcaaagtctttgaaaacggataccacgaacattctttgagagtgctgccaattattacaaacaataaaaatgtggatagtggcgatgaaaaggatgctgacgcttctgtaaacagcggcgatgatggtgacaatgacagtgaggcaaatatgcataaacaaaaatctgtgttttctttaagtggattattcaaatctcataaggatggaaaccaacaacagcagcaacagcagcaacaagaagaaaacggcgaacaaatcaatctagaaaaagcattttcaataataccatcccagagattcatcaaatcgcagactttaaagaaatcgagaacgagtaaccttaaaaatggcaataatgatgaattgatgaaaaacgatggtaaaaatattccgcaaatcgtgaatcctaacgctgctgtaggtgttgaagagttgaagctaatcaatgcattatcggaaaaaatacgaaagggccttaaaagtgaaaatacaaaaggcaacaatggcgaaggcagaagcaatagcaataaacaggaggattctgatgacacagagggcaaggcaggaacaaccaatgacgatacatctcataaaccttgttcacaaaaatacggaaaatctattggggtcgtcggtgcaggtgcatacggggtggtcaaaatttgcgcaaggtgcaagactgctaaagatgtcctaccatacagtacctactctaatggaaaaaaactattctttgccgtcaaagagctgaagcccaagccaggtgaccaaattgataaattttgcacgagattaacctctgagttcattattggacactcactgagccatccgcattttgaggcaaatgcgatgatagcaggaaatgtttcaagaaccactccaccaaaacatgtcttcaatgccccaaacattttgaaaattttggacctaatggaatatagcaattccttcgtagaagtgatggaattttgtgcttcaggtgatttatattcgttgctaacaaggaataacatctcaaatgaatcgaataacgggagttcaagattgatccaaactgttaaagaaggttctgggagtccgttgcacccattagaagcagactgttttatgaaacagcttttgaatggtgttcaatacatgcatgatcatggtatagcacactgtgatttgaaacccgaaaatatccttttccaacctaatgggttgttaaaaatttgtgattttggtactagttcagtttttcagactgcctgggagaaacacgtccacttccagagtggagccatgggttcagagccatatgtggcacctgaagaatttataagggatgcagaatacgatccgcgtctggtagattgttggagttgtggtattgtttactgtacaatggtcatgggacagtatctttggaaaatcgccattcctgaaaaggattctctttttaaatcatttctcagtgaaattaaagatgatggacagttttatctatttgaggaattaagacatgttagtagcgaactgaataggttgaggaaaattgcactatatagaacgttccaggtcgaccccacgaagagaatcaccattgaacaattactacaaagctcctggatgaggaaaacaaaatgctgtgtagtttatagacacttacataccaaggttagtaaataa

SEQ ID NO: 1683 - DNA, 1746 bp, Saccharomyces cerevisiae
atgacgatcatccataatcctaaatggtggaaagaagccaccgtctaccaaatttatcctgctagtttcaaggactccaacaatgacggatggggtgatttagctgggattacctccaaacttgactatgtcaaagaattaggtgtcgatgcgatatgggtgtgcccattttatgactctcctcaagaagatatgggttacgatattgccaactatgagaaggtttggccacgttacggtaccaatgaggattgtttccaaatgatagaagaagctcataagagaggtatcaaggttattgttgacctggttatcaaccactgttctgaagagcatgaatggttcaaggagagtagatcttctaaggctaatccaaagcgtgactggtttttctggagacctccaaagggttacgatgagaaaggtaatccaattcctcccaacaattggagatctttctttggtggatctgcttggagatatgacgaaaaaactggtgagttctttctgcatgtgtttgctcttggccaacctgatttcaattgggaaaatgaagagtgccgtaaagccatttatgactcctcagtgggctattggctacgtcacaacgttgatggctttcgtattgacgtaggcagcatgtattctaaggttgagggcctacccgatgctcctatcactgatcctacagttccttaccaaaaaggaactgaatttttcataaatgggccacgtatccatgagtatcataaagaaatgcataactacatgctctcgcaagttccagagggtaaagaaatcatgactgttggagaagttggtatcgggaatgaagacgacttcagagtttataccagtgccaaagaaggagaactaaatatgatgttcaacttcaagcacacctcagtaggtgaaaacccaaaatgcaagtacgaacttattccctttactttaaaagactttaagctggctcttgctgaaagctttctgtttatcgaaaacacagattgctggtcgaccatctatttggagaatcatgatcaacctcgtagcgtttcgcgttttggctcagattctcctaaatggcgtgagatttcgtccaagatgttggctactctcatcatttcattgactggtactgtttttatctaccaaggacaagaattgggtatgcccaacttcaaaaacagaaaaattgagcaaatcaaatgcgttgaaggtactggtacatatgccgccattaaacgtgattatggtgaagattctgaaaagatgaaaaagttttttgaagcattagctttgatctctagagatcatgggagaacaccattcccatggagtgctgatgagccttctgcaggtttctcgaaggatgccaaaccatggattgacatgaatgaatcatttagagacggaatcaacgcagaagctgagttaaaagataaaaactcagtcttctttttctggaaaaaggccttacaagttagaaaggagcacaaagatatccttgtttatggacataactttcagttcattgatcttgataatgacaagctattcatgtttacaaaggacacagataacaaaaaaatgtttgctgttttcaatttcagtagcgataatacggacttttcagttcctgataatgaggcctcctacaccatgttttttggcaactatgcaaactcaaatggtgattcccgcaccttgcagccatgggaaggaagactttacttgttgaagtaa

SEQ ID NO: 1684 - DNA, 1053 bp, Saccharomyces cerevisiae
atggatcaaaaggcgtcatattttatcaatgagaagctcttcactgaggtaaagcccgtcctttttacggatctaattcaccacttgaagatcggcccatccatggccaagaaattaatgtttgactattacaaacagaccaccaatgccaaatacaactgcgtagtgatatgctgctacaaagatcaaactattaaaattattcatgatctttccaacattccacagcaagattcaataattgattgtttcatctatgccttcaatcccatggacagcttcataccatattacgacattatcgatcaaaaggattgtttaaccattaaaaattcatacgaacttaaagtttctgaatcatcgaaaattatagagaggactaagacgttagaagagaaatctaaacctttggtaaggcctacagcaagatcaaagaccacgccagaagaaacaaccggaaggaaatccaaatctaaagacatgggtctcaggtctactgcactgctggctaagatgaaaaaggatagagatgacaaggaaacctctagacaaaatgagttacgtaaaaggaaagaggagaacttgcaaaaaataaataaacagaaccctgaaagagaagctcaaatgaaagagttaaataatctttttgtcgaagatgacttagatacagaggaagtaaatggagggtccaagcccaactcacctaaagaaactgacagcaacgataaggacaaaaacaacgatgatttagaagacttgttggaaacgacagcagaagattcacttatggatgtacctaaaatacagcaaacaaagccttctgaaacagaacattcaaaggaacctaaatctgaagaagagccctcctcttttattgatgaggatggatatattgtgacaaagagacccgcaacttcaacaccaccacgcaagccatcacccgtggtaaaaagggcattgtcgtcttcaaaaaagcaagaaacgccgtcatcgaataaaaggttaaaaaagcaaggaacattggaaagctttttcaaaagaaaggcaaaataa

SEQ ID NO: 1685 - DNA, 1725 bp, Saccharomyces cerevisiae
atgtcaattaggcctctcacgttaaacggtttagatgagccagaaacctcttttgaagaactgaatacaactctacctcgctttcaatcccatgaaacattaactttggaagaaaacgtgccaccattgagtacatcaacttatataccgcctccatcctcggtaggtacttctgacactggcacggtattttccaatagtaccagcgcgttttggtctaataagcaagcagacgatgatcaggacatggaggtagaccaggatgatgaatttctaaatgacttccaggaattccaaaataaaaaggatgattttgacgatgctattaaaacaaattttcatttgagaaatggatgtcgaactggccctttcaaaaacgacattttcgcagaagagtttgatagaaaactgagtttggaagataaaccaaggctaaagcaacctagatcaatgatggaattgaaaccaaaaagaaaactatcaaatagcgtcacttcaagaaacttaaggtctggtaattctgtaagatttaagaaatctatgcctaacttagctttagttaatccagctatcagagaagaagaagaggacgaagaacgagaaagagaagatcaacgagagtttaattacaagattgataacgatacgcaggacacaattttggcgaaattcagttcagatgatgaaggtgactttctgacaggatttgaagaattagagggtgaagcaattgatgaaacgatttcttcgaacgataaagaaagtgccgaccatccgcgtttcttaaagaagtcatcctcatctttgccattaaaaatatcacctgcacaatatgatatagtaaagcatgacgaattattaactccaggtcttcataggcgacaacgagattggaatacccagcaggaactggactcttttaaagaaaaacgatcagtaagacactgttctaatcaaaatgtacaactcaatggtccagctaaaatcaaaacaataaaacagcaaattgatcataatactccaatgaagaaaggttctatgatatataacccgaaaactatgaagtgggaaggaaatgaaaacgtcttaagcaaatttagtgatgtagacacggcaaacaggaaagctttattgataaaaaacaagctacaacgagatgcagattctaagaagcaaaaatattctgatctacagcatgcaagagccacttcgagaaatcaaaaggtcatcgggaacatgattttagatgaacaaaatttaagatgggttagtgtttcagaggaagaagcagacccttttgcaggcattcctgagataaacttaccaccagttggcaaaagtatgaaaaaacgtagctcctcaccatttttgcgttccaaaagccaagttaatacgccatttgtttcaaatgacaatgatggcgtttatcaaagtacggctgctcaagcaagactccgtaaataccattcaatgaggacacttaacggtacaacagaaactccagaaataagctctactttccatttgagttcaagagcattggaaaaattttaccacgaggagaacaggtggtgtaaaaagttagcctcatggtttataccccgagatgagaccattatcagtgttgatgaggaaacaatcatggatgaaagtacggtcaatagcaagagaaaatcctatatgtatgaaatcaggaacatggtaatcaattcgacaaaagattag

SEQ ID NO: 1686 - DNA, 330 bp, Saccharomyces cerevisiae
atgaagataaaaattgacattatacattttattaacgcccccccttttttttttttttttgttgatgcagaagcctcgcaacttaaagcttttcagttgtttcttcttggtcatattttttatacatatatacatacatatatttgtgattttgatgagttcgagactaaagaccttgcagagggaaagataggcgatttgatttccagactggagttctgttcaaatgcgataattgaatccttgccaaatacattccaatcctttgtcccggtcaaattcagtacggacaagcttcttgaagaatcgaaaggtcttctcgatgtttga

SEQ ID NO: 1687 - DNA, 372 bp, Saccharomyces cerevisiae
atgtcttggaggtactctatcttgaccgtagatggaagctttaaaattttcatcccttgggaaatattcctcacgtggaattttttgagcgctgcatggctaaattctaccgaatccaatacgtatatccactactcaacatgttggggcacaagtgattacacacttaatatctctgtcatagaagctactacagagaaattggttgacactagattattaacaacactcgagaatgcaaccgcttggattaactcaaactctattgatgaagacgaagatgatatgcctcatgccactaacgtagcagaccggcttgatgggttatcccttagcaagcgcgtatatagcatctgtcactacgaattttag

SEQ ID NO: 1688 - DNA, 1086 bp, Saccharomyces cerevisiae
atgatttctgctaattcattacttatttccactttgtgcgcttttgcgatcgcaacacctttgtcaaaaagagattcctgtaccctaacaggatcttctttgtcttcactctcaaccgtgaaaaaatgtagcagcatcgttattaaagacttaactgtcccagctggacagactttagatttaactgggttaagcagtggtactactgttacgtttgaaggcacaaccacatttcagtacaaggaatggagcggccctttaatttcaatctcagggtctaaaatcagcgttgttggtgcttcgggacataccattgatggtcaaggagcaaaatggtgggatggcttaggtgatagcggtaaagtcaaaccgaagtttgtaaagttggcgttgacgggaacatctaaggtcaccggattgaatattaaaaatgctccacaccaagtcttcagcatcaataaatgttcagatttaaccatcagcgacataacaattgatatcagagacggtgattcggctggtggtcataatacggatgggtttgatgttggtagttctagtaacgtcttaattcaaggatgtactgtttataatcaggatgactgtattgctgtgaattccggttcaactattaaatttatgaacaactactgctacaatggccatggtatttctgtaggttctgttggtggccgttctgataatacagtcaatggtttctgggctgaaaataaccatgttatcaactctgacaacgggttgagaataaaaaccgtagaaggtgcgacaggcacagtcactaatgtcaactttatcagtaataaaattagcggcataaaaagttatggtattgttatcgaaggcgattatttgaatagtaagactactggaactgctacaggtggcgttcccatttcgaatttagtaatgaaggatatcaccgggagcgtgaactccacagcgaagagggttaaaattttggtgaaaaacgctactaactggcaatggtctggggtgtcaattaccggtggttcttcctattctggatgttctggaatcccatctggatctggtgcaagctgttaa

SEQ ID NO: 1689 - DNA, 510 bp, Saccharomyces cerevisiae
atgtacattcctaaacattttgagtccatggaactctcaaggtacaaattatcaaaaaaacccccgctaggaacactattctcctctaaggctagcaggcaaggtttcttcggatggagaacttcttccaataaagatgaccccgattttggtatgtgcgcatcacatattccatttgtattcgtggagttcgataatggagagcataaacttattgcacatttagcacggaagaataaacatgtggaaatgctggaaagagttcaaaaatgcttagtggtatttcagagcgtcgattcatacatttctccggcgtggttcccaatgaagaaaaagacccataagttcgtaccaacatgggattttgccgctgtgcacgtttacggtacaccaaggattatccgcgacgataaagactggcttattaatatgttatcaactttgactgaccaagaagaagagaaaagacctgagggggaaaatgtacgaagtaaagtggagcgtttctga

SEQ ID NO: 1690 - DNA, 1707 bp, Saccharomyces cerevisiae
atgtttctggactattctggatatgaggctcttactgaaatcaactcttcctttggaaagtatgttcttctattgcaacaatttgaaggctgtcgaagtttgaaagatcggcttcaaatgcttaaggatctggggagggaatttatgatattcgagaacttgaatgtggaagatttcagagaatctaaaaatatgattcacagattttatactatggttatttctttaagacagattatggaaattgggcccttagtcaggcgtagccctgctgttttagttgtggaattcgattgtccggtagaggattgcctagatgaactggatccgttgcatccattgaacagggcctttatatttattcataaacaatggacctattatcatcaatattatatagttgaaaaggtaaaaaaggtgattcttgatatggccccggtaaaggaagatgattggagcatccttcacaaggttgtttattcagaaggttttgtcgaaagacgatataaaaagaagaaatacctcggtgatatttacattccacaaccattaatgaaaagcaataaaatcactactatctcaaatttttcccaacttaccaaaatttccaacgtcagagtttacagattcaacgctacagcagcgtgtgatccgcagaacttgaacaaaaaaaacttgagtatcaaagagcttaaagataaagaccttcctaatcttatttggactttagaaccagaaaaattctatgttgacatgagaccttacaaggaacacgaggaaaggaaaaaacggagagaagaagaagccaaggtgaggatgcaaggtgaggaacaggagaacattatgatagagagaaaaaaaatggatagtattgaagttgaagcgtcatcaggattgaaaaatatcataaaaacacctctcgctaatagggttgtcaatacttttaataactgcgctgctgtggtaataggctatgtaacagaagtggataaagtaaaggatgacaatgaagagaaaaataacgacagacctaaaattgcgaacgacggaatagctcaaaagtctagaagcgaaagtgaagataatgcaggaacaccgatggaaaacgcgtactttcaacctgaaccccaagataatgaccaaaacaacatatcttggaataccactatgaaagatattgatccaatttacatgagtgaaagatgtgctagagtttggagaaaggagcaacaaatgctaggattggagaaggctcagacatttgagaaaaaatattgtaaagatcagatggttatggacgaaaatcaggtcgaagaacctggtaagcactcggagagacatacaaaaaatcaggtagttagacctaggaccaaaatagcatcttccgccagtaaaaatgataatagtaataataaaaatagtaaatcatgcaaaaattgccataaagaggaagcgcacggtctagtgagagaataccttaagattaaactcaacatatcacctcatggagaaaggaatcagcgaacaaaggacaagagaaaatgtataatgaaatacaatgcgagcagtaacaacatcaacaaaatgcctggggagagtgaagtacttgggtcaactattttaacagatatccactttaaggatgtcgtaactgtgaaatttagggattttaaagccaaatttagaaaagtcaaaataaacgcttga

SEQ ID NO: 1691 - DNA, 753 bp, Saccharomyces cerevisiae
atgagtgacgacgattatatgaacagcgatgacgacaacgacgccgaaaaaagatacgtaaggccaattttcgtcagaaagcgcaggagagaagaagactacgttgcaactagcaaagacaacatccaccaccacccatgcgattggtccgcgaaaccatcgcaacgtcaaaacgaaaatgagcaaaaaagcaccatacggcttgtaccagtggcgatgaatacgccgaagtgtcaagagaaaaaaaagaaaagaaagggcgttggtacaactagtcatgaggctacgcttttcgagtacggtgaaagcatagcaggctacaagtgtgttacaaccgagagcgaaagagaccgcttgaaacgaagtcatgaaagcgaaagcagcagtgaaagcgaggtagacgttttcgcctttgaccaggcaaaaggtatcagctctaaggttgaagccgaagaacgctacgcgcgggccgttcgacagtattggcgcatgaccaaagacgagccggctaccttaccactgccaggcacacctaccctagcggctgtgagtttagatatgattgatgacaaaagcgtagaacaattttacacaatgagcagtgccttgatggatgcaaacagactagacttgattcgccgcgatagaatccggtggcacccggacaaacatcgttatcataagtccaaagtcacaaaactgtttcaggccattaacggcctgtgggagcaagaaaagaccgagaaaaggtaa

SEQ ID NO: 1692 - DNA, 3657 bp, Saccharomyces cerevisiae
atgataaaaaatggtacatgcccctattgggaacgtgatgatctttcggaatgtgctaggcgagaatatatcgagtttaaatttcctctatttatattgttgactggtatgatatacgcgttttgcaaagtctttcgagccttttatctaagggggaaaaatcatacaaatgaagcgccagaatttgaagaacaaggtaatggaaaccacgaatatgcaaggttctcagttttaagactaaaatctgcatgggaaagccgtagcttttgtaatgttaataatagatctactttcgacaaattcaaaaaatttatagagggtgccttcattgttttgcagcttactatccacctgtatattttatctagtatgccaatggataacaaaaagttctttcaccaaggttttctggttcaaatgtttctctggattttactgcttgttgttattacacttcgtttaatttcagcaagccagtcatttcggtgggttttagcatgtaagcgtgatttatgggctgtttcgttttactcatatgcatccctgtttactctttcgattttacctcttcgttccgtcttcattggaaagataaaagataaaattatggtcaaatatatcatttccgagactttcattgatttagcgcttttattattattatcaacgtcaagtatagaaggaactaggtactcatttttggttgaaaatgagaacaaaaagttgccaccggctcctaccgtctttggccttcttactttttctaggattgatcggcttatttggaaagcatacaaacactgccttggaaacgctgatatttgggatttggatattaataataagtctatagcaattttggcgaactttgaaatgtcttctaaaaaaggaaggctccttccaaacattatttgttattttaaggctgttttcatctcccaattatttctggcttttgtatctagttttttgaactttgtaccctcattgttgatgccaagaatactatcatacgttaatgacccaaagtcaaaatcatggaacttggtgtctttatacgtctcatctatgctcgtcagtaaaatcattgccacgacttgtagaggtcaaggattgtttttaggtgaaaagggtactatgcaactaagaacagttttgatatccaatatctattccaaaaccttaagaagaacaattctaaaagactcaacaacgtcacttcaaaaaaatgcgtcaacatcctttgaagaaaatcctgactcttctgaagcggaacctagaaaaaagtctagtaggaaagacaactctgtgaacaatgttatgtcaattgacgctttcaaggtttctgaagctatgaacactttttatctggcatgtgaagcagttttcatgacagttacggccctaatgatactatattccctactgggatggtccgcctttgctggtacctttgctcttcttgccatgattcctttgaatttttggtgtgcaactttttacgggaactatcaggccgatcaattaatcctaactgacaagcgtacctctgggattagtgaggctctgaactcaatacgtgtaataaagctactggcatgggaaaatctgttttatcaaaagattataaacgtaagagatggggaaataagactccttaaaaagaaggcaacaattttctttttgaaccatctcatttggttctttgggcccactttggtctctgcaataacattctcagtgtttattaaattccaaaatcagacacttactcctacaatagcatttacagctctttctttatttgcaatattgaggacacccatggaccaaattgcttcgactgtcagccttttgatacagtcttttatttctcttgaaagaatccaggattatcttaatgaatcagaaacaagaaaatatgagattttggaacaaagcaatactaaatttggctttgaagatgcaagcatggaatgggaagctgctgaaacaagttttaaacttaagaacatttctattgattttaagctgaatagtctcaacgcaattataggtccgactgggtcaggaaagtcttcgctattacttggactattgggagaattgaaccttctttctggaaaaatatacgtacctacagttgaatcccgcgacgacttagagattggtaaagacggaatgacgaattcaatggcatattgttctcaaactccgtggttgattagtggaacaattaaagataacgttgtttttggagaaatcttcaacaaacaaaaatttgatgatgtaatgaaatcctgttgtcttgacaaagatatcaaagcaatgacagctggcataagaacagacgtgggtgatggaggattttccttatctggcggacagcagcaaaggattgctttagccagagcaatttactcctcttccaggtatttgatccttgatgattgcttgagtgcagtagatcctgaaactgcactttatatatatgaagagtgtttatgcggccccatgatgaaaggaaggacctgcatcattacgagtcataatatttctttagttacgaaacgggctgactggcttgtgattttagatcgtggcgaggtgaaatcacagggtaaaccatcggacctcattaaatctaatgagtttttgagggaaagcataaacaatgattcaaaaaatacaactcacaatcaaattgacttgaaaagatcaacaacatcaaagaaaactaagaatggagatcccgagggagggaactcgcaagacgaagtgtgtgctgaagttgaaaattttgaggaaacaaaaatggaaggatcagttaaattttcagcttacaaatggttagcagactatttcgggggactgggagttgtttttgttttcacctcgtcctccatccttattcatggaatcacactgtctcagggcttttggctcagatactggctggacactggatcttcagggagtaagtctacctggctttatagaatagttgagggtcactctaacatctatttcttactgacttatattatcataggtcttgtttcttcatttttaacttctggtaaagtttggatagcaataatttcaggtaccaacgtcaccaagaaaatatttgcgaagcttctatccagtatcttatatgccaagttacgttttcataatgtcacgccgactggaagaataatgaacagatttagcaaggatatggatattattgatcaacaattgatccctaatttcgaaggactctcttatagcgtcgttgtttgtctgtggattatacttttaattggatatgttactcctcaatttctgttatttgctattcctttatgcgctctttattataccgtatgtacgttatatcttcgtgcatctagagagttgaagagaatagataacatcaatatctctccaatacaccagttattcgctgaagccatcaaaggagtaactacaattagagcattagcagatgagcgtaggtttatcactcaatctttggttgcaattgacagaagtaatgctccatttttttatctcaatatggccaccgagtggatcacatatagagtggatataattgggacacttgttctttttagttcttctgtaatgatcataatgaaggcctcatag

SEQ ID NO: 1693 - DNA, 1749 bp, Saccharomyces cerevisiae
atggaggaaactaagtactcttcgcagcaggagatagaaggagcatgtggttcagacgcttcattgaatgctagaggtagcaatgattctccaatgggactttccttgtacctctgcctggcttcgttaactcttgtactattcataactgcactggatattttgatagtgggaactattattgacgtggtcgcagaacagttcggaaactactccaaaacaggttggctcgttacaggctacagtttaccaaatgctattctgagtctcatttggggaagattcgcatctatcataggtttccagcatagtctcattttagcaatacttatttttgaagccggatccctaattgctgcccttgcctcttcaatgaatatgctcattttcggtagagttgttgctggtgttgggggaagcggactccaaacgctttgctttgttattggttgtacgatggttggtgaaaggtcacgtccattggtgatttccatcctaagttgtgcatttgctgtagctgctatcgttggtcctataatcggaggtgcctttacaacccatgttacctggaggtggtgcttctatatcaatcttcctatcggtggtcttgccattattatgtttttactcacctataaggccgagaataagggtatacttcaacaaattaaagatgctataggaacaatctcgagctttacttttagtaagttcagacaccaagttaattttaaaagacttatgaatggcataatcttcaagtttgacttctttggttttgccctctgctctgcagggctggtccttttcctactggggctaacctttggtggtaataaatatagttggaactctggccaagtcatcacatatttggttttgggtgtcttactttttattttttcattggtgtacgatttcttcctattcgataaattcaacccggaacctgataatatatcctacaggcctctccttctaagaagattggtagcaaaaccagccataataatagtaaacatggtaacatttctattatgtaccggttacaatgggcaaatgatatactctgtccagtttttccaacttatatttgcgtcgagtgcatggaaagccggtcttcacttgataccaatcgttattaccaacgttattgcggccattgcaagtggtgtgattaccaaaaagctcggtttagttaaaccactcttaatatttggaggcgttcttggggtaattggagcagggcttatgacacttatgacaaatacgtccacgaagtcaactcaaattggtgttttgctattaccggggttttcccttggatttgctctacaagcatcgctcatgagtgcacagcttcaaattaccaaagatcgtccagaagctgctatggactttattgaagtaacagctttcaatacattcatgaagtcattaggtacaactcttggtggtgtgctttcaaccactgttttttccgcctcctttcacaataaagtatcacgagctcatctagagccttacgaaggaaaaacggttgatgacatgattttgtatcgtcttcaaaactacgacggttctcattcgactattggaaacattttaagcgactccattaagaacgtattttggatggatctagggttttatgccttaggatttttgttttgtagtttttcatccaataagaaattaatcataccaaaaaaggacgatacaccagaagataatttagaagacaagtag

SEQ ID NO: 1694 - DNA, 1848 bp, Saccharomyces cerevisiae
atgagttctagtgttgttggtgcctcaagtaataaaaaaagtggaattaggcagtcctgtgagattattgagcgagaacgtcactcaaacgatgacacgtactctatgacatcgaccttttttaagctcaaagaaaacgaaattatgtctgcacagtttgattccttgaaatataaaattctactgataagtaccgcgtttgtatgtgggtttggaattagtttagactacacacttagatcgacctatacgggctatgcaacgaactcatattcagaacactccttactttcaactgtccaagttatcaatgctgttgtgagtgtcggatcccaagttgtctactctagactctctgaccacttcggaagactaaggctttttttagttgcaactattttttatataatgggaaccatcattcaatcacaggcgacccgtctcaccatgtatgcagcaggatcggttttctataactgtggatacgtcggaacaaatctgctcctgacattaatactctcagatttctcctccttgaaatggagaatgttttaccagtacgcctcatattggccatatatcataataccatggatttcaggcaatattatcacagcagcaaatcctcagaaaaactggtcctggaatattgcaatgtgggcttttatttacccactctctaccttgccaattatatttcttattctttatatgaagtacaaatcttcaaagactgctgagtggagatctctcaaagaacaggctagaaaggaaagaacgggcggattatttgagaatttggtgtttctattctggaaactcgatattgttggcatattattaataactgtgtcgctagggtgtattcttgttcctttgacgttggctaatgagacatcacaaaagtggcacaattcaaaaataattgccactttagtttcaggtggctgtttatttttcatttttttatattgggaggccaaatttgccaaatctcctcttctaccgttcaaattactaagtgatcgtggaatttgggcaccccttggtgttacttttttcaattttttcacctttttcatttcgtgcgactatctgtatcctgttttgctggtatcgatgaaagaatcgtccacttcggctgctcggatagtaaaccttcctgactttgttgctgctactgcatctccattctacagtttgttggtggcaaagacaaggaaactgaaactttctgtaatcggaggttgtgctgcatggatggtgtgcatgggccttttttacaaatacagaggaggatctgggtctcatgaaggtgttatcgctgcatctgttatcatgggtttgagcggtctcctatgcagcaattcagtgatcgtcatactgcaagccatgactacgcatagtaggatggctgtaataaccggcattcagtataccttttcaaagctaggcgctgctatcggtgcctccgtttctggtgccatatggacacaaaccatgcctaaccaactctacaagaaccttggaaacgatacattggcagaaatagcatatgcatcaccttatacattcattagtgattatccttggggctcaccggaaagagatgctgtggttgaatcttacagatatgttcaacgaataataatgacggttggcttggcatgtacggtaccgttctttacgtttacaatgttcatgagaaacccggaactaatagacaaggcgacacacgaagaattcactgaagatggtttggttgtcttgccagatgaggaaaatattttctctcaaatcaaggcactttttagacataatcgaagtaacaagaaatcaggatgttga

SEQ ID NO: 1695 - DNA, 1284 bp, Saccharomyces cerevisiae
atgggtttcatatcgtcaatactgtgctgctcttccgagacgacacaatccaattccaattctgcttatcgccaacaacagagcagttctctcaataaaaacagaagcgttaaacattccaacacgaaaagccgaacccgtggcgtacatcagacaaactctcctccttctaagacaaattcagccgctactttcagttccactgaacgatccaccggtaaatctgggataagcacgaacgataatgaaaaaaagaagccatcgtcgccgactgcagccgtcaccgccactactactaataatatgacaaaagtagagaagcgaattagtaaagatgatctttacgaggaaaaatacgaggttgacgaagatgaagagatcgacgatgaagataaccgtcgcagtcgtggcattgtacaggaaaaaggagatgctgtgaaagatacttccaggcagaaaaaacaacagcagcaacaacaacaacagtcacaaccacaaccacaaccccagtcacagtcacagtcacagtcgcagtcgcagtcgcagcagcgagggcctactgtacaagtatcgtctgaccatcttatccaagatatgaatttgagtagggtaagtagcagctctcaagccagtgaaacttccaacgatgccgacgacgaagacgatgaagatgaagaatatattgatctaacgcttttgcagcagggccagtatcatgcaccaggttacaacactctgctccccccacaagatgaaagtacaaagggcaagaaatgcctaatactggacctggatgaaaccttggtacactcttctttcaaatacttacgatctgcggattttgttttgtctgtggaaatagatgaccaagtacacaatgtctatgtcattaaaagacctggtgtggaagaatttttggaaagagtcggaaaattattcgaggttgtagtcttcacggctagtgtctctcgatacggtgatcctttgcttgatatattagacacagataaagtcattcatcacagattattcagagaggcttgctataactatgaaggaaactatataaaaaacttatcccagattggaaggccgttatcagatatcatcattctcgataactctccggcatcttatatttttcatccccaacatgcaataccgatttcgtcctggttctcagatactcatgataacgaattattagatattattcctcttttagaagacctttctgtgaaaacctcactggatgtgggcaaaattttggatgtaacaatataa

SEQ ID NO: 1696 - DNA, 2640 bp, Saccharomyces cerevisiae
atggaaatgaacatggatatggatatggatatggaactcgcatccatagtttcttctttaagcgccctgtcccatagtaacaacaacggcggtcaggccgccgcggccggcattgtgaacggcggtgctgctggatcacagcaaattggcggcttcagaaggtcgagtttcaccacggcaaatgaagtagattcagagatcttgctgcttcacggttccagtgaatcttcaccgatcttcaagaaaaccgccctatcagttggtactgctccgccattctccacgaactcgaaaaagttttttggtaacggcggcaattattaccagtacagatcaaccgacactgcctccctgtcatccgcatcgtacaataactatcatactcatcatactgcggctaatctcgggaaaaacaacaaggtcaaccatcttctgggccagtattcagcttccattgctggtcccgtttactacaatggcaatgacaacaacaactctggtggggaagggttttttgagaagttcggaaaatctttgattgacggtacaagggaactggaatctcaagatagacccgacgctgtcaatactcagtcccaattcatatcaaaaagcgtctctaacgccagcttagacacacagaatactttcgagcaaaatgtcgagtctgacaaaaacttcaacaaattgaataggaacactactaacagtggttcgctttaccactccagttcaaattcaggctcatctgcgtctttagagtccgaaaatgctcattaccccaagagaaatatctggaacgtagccaacacaccagtatttagacctagtaacaatccagccgctgttggggccacaaatgtcgcgcttcctaaccaacaagatgggcctgcaaataacaatttccccccctacatgaacggcttcccacccaatcagtttcatcagggccctcattaccaaaacttccccaactacttgatcggatctccttcaaatttcatctcccagatgatttcagtacagattccagcaaatgaagacaccgaagactcaaatggtaagaaaaagaagaaggcaaacagaccttcttctgtttcttcaccttcgtcccctccaaacaattctccgttcccgtttgcctaccccaacccaatgatgtttatgccacctccaccactctctgctccccagcaacaacagcaacagcaacaacaacaacaacaagaagaccaacaacagcaacagcaacaggagaatccttatatttactaccctactccaaatcctatacctgtcaaaatgcccaaggacgaaaaaaccttcaagaaaagaaataacaagaatcatcctgcaaataactccaacaacgccaacaaacaggcaaatccttatctagaaaattctatacccacaaagaatacctctaaaaagaatgcttcttccaaatctaatgagtcaacggccaacaaccataaatctcactctcattctcatcctcattctcaaagtctacagcaacagcagcaaacgtatcatcgatcgccgttgttagagcaactaagaaacagtagttctgacaaaaattcaaactcgaacatgtcactaaaagacatctttggccattccttagagttttgcaaagatcaacatggttcacggttcattcagcgcgagttggccacctcaccagcctcagaaaaggaggtcatattcaatgaaattcgcgatgacgccattgagctttcgaacgatgtatttggtaattacgtcattcagaagttttttgaatttggtagcaaaattcaaaaaaatactttggttgatcaatttaaaggtaacatgaaacagttatctctacaaatgtacgcatgtcgtgtaattcaaaaggcgttagaatatattgattccaatcaaagaattgagttagtcctggaattatctgactccgttttgcaaatgatcaaagatcagaacggtaatcacgtaattcaaaaggccatcgaaacaattcctatcgaaaaattaccttttatcttaagttctttaactggccacatttaccatctatctacccactcctacggctgtagggtcattcaaagattgttagaatttggttcgagcgaagatcaggaaagcattttaaacgaattgaaagatttcataccatatctaattcaagaccaatatggtaactatgtcattcaatatgttttgcaacaagatcagttcaccaataaggaaatggtcgatatcaaacaggaaatcatagaaactgtggccaataatgttgtcgaatactctaaacataaatttgcctccaacgtggtcgaaaaatctattctttatggctctaaaaatcagaaggatttaataatttctaagattttaccaagagacaaaaatcatgctttgaatctggaagacgattctccaatgattttaatgatcaaggatcaatttgccaactatgtgattcaaaaattagttaatgtctctgagggtgagggtaagaaattgatcgtcattgccattagagcatatttggataaactaaacaaatctaactccctaggaaatagacatttagccagtgttgagaaacttgcagcattggttgaaaatgcggaggtgtga

SEQ ID NO: 1697 - DNA, 1425 bp, Saccharomyces cerevisiae
atgtttagagtcaagatcatctctcagaaacgtacaaaaagtgtacagatgctagaaaacgatcaacttgatattttgggacaacaaccttcgctatacaaactatacactcaaatatgctctatctaccgtgtaccagatccttctgctcatgaccatatcgtaaataccttaacaagaggacttgaaacattggctaaaaatttccagtggctagcaggaaatgtcgtaaatgaaggtgctgacgaaggtaacactggtacctacagaattgtcccgtcagacaaaattccacttatcgtccaagatcttcgagaagatctgtctgccccaacaatggattcgcttgaaaaagctgactttcctatctacatgttagacgaaaagacttttgcgccttgcatgactatcaatccacctggaaacactataggtatggccgccaagagtgggcctgtatttgcagttcaagcaaactttatctccggcggcctcgtcttaactattgtcgggcagcacaatattatggatataacaggacaggaaagtatcatcaacttgctcaataaatcttgccaccaaaaacctttctctgatgaagaactgctcattggaaatatagataaaagcaaatctattcctttgtttgatgaaacttgggaacccgacaccacgctagttcatgaaatagtggaaacctctagaaatacaagtggagaggaaaaggaacagtcttgttcttcgaactctacttgggcttatgttgaattttctgctatctcattgcagaatctgaggattttggcaatgcagacatgtacttctggcacaaaatttgtctccactgatgatatcgtcactgctttcatctggaaatcagtttctcgagcccgtttatctcgacttaaaccagaaacgaaatcaaatttagggcgtgctgtggatgttagaaaacggctaggactccccgaaacgtatccagggttattagtcaacatgacctttaatacaggttccctgaaaagcttggatcataaaagtttgggcgttcttgcatcacagattcgcaggaagctagaccctaaagtcttcgatttggcctataatacatgcgcacttgctacgctccttagccgatgcccggacaagactaaggtttctatacctcaaccaattgatactttatctggaattatggtcagttcgtgggcaaaagtcagcctgtatgacgttgatttcaatctagggcttgggaagcccaagagtgtacgacggccgcgcttcatttcccttgagagcctaatatattttatgcctagatcctccagaggtgaaatggtggttgctctttgccttagagataaagattgggagtgcctgaatgcggataaagaatggacaaattatgctacacatataggatga

SEQ ID NO: 1698 - DNA, 300 bp, Saccharomyces cerevisiae
atgaagactgtctattacaaagaaatcacctaccagcagtatcttcaactgcaacctgaacaacaggaaaaatacctggctttatgtcaaaaagattttgaacaagagactgaaagaattgcatttgatcgtcaaggaggtgtgcctggtattgctaggaaatttgcacaagaagaagttgcttggttcgatcgcgttacaacatggtcatatatgaatgcttatattccgagctacagaagaagaagaaaccttttaaagattgatatgttaaagatgtctaatgctgaagaatactga

SEQ ID NO: 1699 - DNA, 426 bp, Saccharomyces cerevisiae
atgaacattaagactttgtgtcatccagaatataaaagaatctccgttgaatcgttattgaatccggtagaggagacaatagactgcgaaaaacctcactctcaaacaaaaatcaatactgctaaacccattagtgcatctttgtatgtcacaacgaataatactgctgttgttcagcacaatgtccaaaagaggaaaggcgtcaccaggagatgtccacagtgtgcggtgataaaaacttctccgcaatggagagagggtcctgatggagaggtgacattgtgtaatgcctgtggattattttatagaaaaatatttttggtttttggcaaggatctggcaaaacggtactttaacgaaataaaaggtgtgagcgtcaaacgaaaagttccaaagagcctctatggagttacaagaacgcgttaa

SEQ ID NO: 1700 - DNA, 3171 bp, Saccharomyces cerevisiae
atgttcatcaaacagtctgaaaaaaatacacctaaatgcctctacaaaaaaaaaggtaaggtaagagtgttattgaccggaagctgtaagaaactgaacacgtggaaaatgcacttatggccagtcagtccgccccaattgcttagaattccaccccgcaacgccgaattaggtgagggtactaaaatagatgattgcaatattcttcaatcaatgacactaccccaggccaatgttcttatcatgctaaccccaacaagagtgctcatttacaacttcaaaccaatggcactagtagctagccatgaacgaacaatggcttctcttaaggaatttggcgataacagatcaatgaaacgatcagctccatataatgatatcatcgaagggcttatttcaaaaaaggactcgcaatacttattgtggcaccagggaaagctgatattttacgtaatgactgataaaaacttccttttaacataccaaattttaaaaaactgcacaaatgaaataattttcaaagaatacggcatacccgtcatagagcctcttttaatgagtgaagaagaagcgaacagtgctgaatatgactataacaacgatgatgatactctcacggtatttgataaaaatagttcttcaagaattatacagaatggatttggcataactaaggaaaaagggtttttacactttctttctaatcaagaaaacattgatgaactccccgtgaaaaaactagaacttcgtttaaaagtagttcttaaatttgactatgaaatcatagacatgattggcatcaagacattttccaaagtcggggatgggcgttatgaagaagttttgatagttttattccctcatggattacaaatacttacaatatcggattttaaagttagcaagagctcgttggttgaagtgaagaagggatccaagacaattgtgtgtaataaacaattaatggttttatctcatgattccgtcgaaaagcagactattgtaagcattatagacattgaaaagcaagctgttgaagcaataccgttaacggacacaccagatgaacttttgacttgcctagaagttaatggatacctggtggtcgtttacaaagaaaaaataatctgctttgatacaagaattaaaaaagtaagccattcttggaaaccaccatttgtgataaaactttgcgataaaattaatgataaaatattacttttggtttctgaggatagtgttaacattcatttttacacagaatttgggaatctgctattcgctacatattttgacgaagatgattataatggtgataacaataatgacaacagcaaggataaaaatgagaaaaaggcggctgaatataaaatttctgattttgtatgcttggataaatcactaataacagtgtctcattccggaaaatatcaagtttggaaattatgggaagaaataaaacaaacacaatttgatttcagaaacccaaaatgttacgtattaaccaatacgaacaatgatgtaatcatatattcacctgtgacaagttcttcaatcaataatgataatttacaagtcataaaacttcctacaaagactttcaataatcatattgcttttgtaaaaattaattcttccttgaggttatttgctacttatgtgtcgaacaaaaacatactgcttatccacaatctagagaccaatatgtggtctagttttgctgaccaaaacgtgttggatttacattggctaggtgataattatttggtttgtcatatgaagaatgatgatggctcaacaaatctgaaatgtctgcagattccactgcaagaagcgaatccggacgtggaactatcagattatgtcatgtgggaatacaatgttccagagaatacgattgttttcagtttacatgttaatactttatcccggtataagttgttgaaaatgaaatccaagaatcacaatgcttctgaaaaacaacctgatgcattgcttaaaactgccgagattattttagttactgatacacagacaattgtcttcgatgtaatttctactgtacatccatgtggattaaacatcatcaaaaaattctaccagtatctcaaaattaacattccaattgatgttttacccaacaaaattgagtggataattaacatgaaggagggcttgttattttttgccgataggaaatttataaagcttggcaaagtggatggagggggctggcaaaccttaactttgttggataacatagaaaaaataatcgatgttatcagggacgaaatatttgtagttcaaggccataattacgtcgtatactctttggaagatttatgggatgataaaaagccactagtttccattccaatcgaagaagatttgtatccaatatcaaccaccccagaaacagctacaacacatacacttcactgcatttttaacgcgcgattttccaaattggtggtgaaacaccaaatatacctcgaccaattaatcttagccaaattagaagacaacacagatttggaggatatttcacacaattatcgttttttaaagccttacaaatttgcactcgaaaagattttgtctactaaaatactgcgaagcgactctttggatgatatcctgaaattaattaagatgtatgacaacaccgatcctgagcataatatttcaccaccaacccacagtggtatgttagaaattattagtaattgtttaaggaagatcgaaactaaatactggaaccatctattcactaatctaaagatgacaccaagagatttattagcactctgtatcgaagaaaatgaggctaaaatgcttggcgtacttctgttagtgtttttaaattacgatgagaaagatttgggagatgatctacattttaagaaatcagatttagggactgaggaaagcaaagctctaaatgataactctacaaaaaagtcagagaaatctgtcactaatttattgaaggatgaagaattaatgcttaaagtcttagagcttttggtgacaagtgctgcaaacgccacagacccaattaaagctaccgattcgtgggacatgtgtttccaattaatacgcttactcaaggaattagacagagaaaacaacacacaattggttcaaaaagcactcgagagattcaaataa

SEQ ID NO: 1701 - DNA, 2061 bp, Saccharomyces cerevisiae
atgaatttaaagtccatcgttagctggttcaaggaacatcttcccagttttgatgtcgacgtggacaagcattttagaactttaagagtccgcaaatattctcagatatgtcttttaatttctttcattataatatgtgttattatacccttaatgaattatttgttgctaactgacaaattcttcaaaatatgtcaccatttaaagcatcatgttttcaacagaagatcatgggttcacaaaacacatatgtatcacaaacagtcactacaactatgtttaatatgctttgttttcacctcgttttttgttatacaaggcgctaacggagatctgttagaaattactaagcgaatggggagaatttccgttgctttgatgccacctttactatttctaacgttgaggccatcaccgttacctcacacgttatacttagcattgttacctctccacaaatggatttccagaattgttgtgcttgaatctattctacacacgtggttctatctctattacatgtacattaatgatacgttatacgtgaaaatgagaaaactacccaacatttatggggttattgccctcggccttttcctactgattgccatcacctctgtgagatatgccagacgatggagctacagagttttttactatgttcactatgtaagcacatggcttattttggtgtttctacattatcacgctcgcccaggaatttcatattataccactttaaatgtgctcatattaacgggacaaatcgtctataggctccatatcaccaatgttacgagagttacgatagtacccatttcttcatcattgtctcttttggagttcccattaaccgatttacccaaaaagcccatcctaccaggagggcatctaaggatcaacatttaccatagaaattttttaaggaggtttttctcccatttgatacccttccaacatccttttactattgctagtattccaagtgataatttggtcaggttaattattagaaacgggcattttccattgcgtacaaatgaaaagtattacattacaggggcttttgaacctgagttgagtttcatttctaaacctactgttccttttaatattaccacgaaatcttccaagaatccatttcgaaacaattcttctgcactaataaattcgcctttaaattttctaattaaagcgcaaagagtgtttatgtgtgttggaggttcaggaatttcctttggcttaccactacttcgtattctaaacttcaacggtgtaaacgttaggctcctttgggtttctagagattataaggatctggaagtattgaaccacttcaaaaacaattttgaaggtatggagatatatattagtggcaccgaaggcaacgaacaggacatagaaattgattatattgactatcatgactgcgctgctgatattaatgatgaagtcaggagtatttcttcgagcggccgagtttcagaactgggagataattccatgttatcagatggaaatccccaacctacggagcccaatgagaacacagcccttctaagtaagaaatctaccttgagaaaccatcacccaccaaaaacaagtgatatacctgacatcaatgctgatgacgagatagattttacatatgcttttagcagatccaaatcaaggaaaaatactgcacaaggaactctaactacacattcttcgtttaacggatcgagcgttttcagacaaccaaagatcattgagccacctgcccaagatccttgtttagaggcggcgcctaaaaagatcagaattcccgcaggtgttaaagtgttctttggcaggcctacacttggagataaggattatgaatggtgtctgcaaaccgaatgtgatgcagagacggattctattcaatgttgcaggtgggcgaatcaaggcagagaccatgctgaatatttgtcacaagtatgggttctcgctgcaggccctagaggcttaattgaaagcaccaaaagatgggcgacagatggtggtttacactttcacggagaaagttttgcattataa

SEQ ID NO: 1702 - DNA, 2757 bp, Saccharomyces cerevisiae
atgataaaaacacgtatagaggaagttcagttacaattcctcacagggaataccgaacttacgcatttgaaagtctccaatgatcaacttatagtaacgacacaacggacaatttacagaataaatttacaagatccggccatcgtcaatcactttgactgtccattaagcaaggaactagaaactataatgaatgttcatgtttcaccaatgggtagtgtcattcttattcgaaccaactttggccggtatatgttgctaaaggatggcgaattcactcaattgaacaaaataaaaaatctcgacctcagctcgctacattggatcaacgaaaccacctttctgatgggaatcaagaagacgcccaagttgtaccgagttgaattgacaggaaaggatataaccacgaagctatggtatgaaaacaagaaactctctggtggaattgatggcattgcgtattgggagggctctctgctattaactataaaagacaacattttatactggagagacgtgacaaatatgaaatttcctttagtattaccagatgaatctgagcaatttgaaaggttaaaacatcatgcgataaagaaattcgattcgtacaatggactctttgcttgggtcacatccaatggaattgtctttggtgatttaaaagaaaagcaaatggaaaaagatcctgcttctaataattttggaaaattcctatcttcgtcgaaggttctactcaatttcgaactgcctgactaccagaatgataaagatcacctcatcaaggatatagttttgactgctttccacatcctgcttttgagaaaaaatacggtaacaatggtgagtcaattaaataacgacgtagtgtttcatgaaactataccgagacaccagttgactggctccaacactgatagtaatgagaaatttttaggcctagtaagagattcggtgaaagaaacgttttggtgtttctcaaacatcaacgtctttgaaattattatcgaaaatgagcctaattcggtatggaatttattagttcgggataacaaatttgacaaggccctatcgttgaaaggcttgacggtgagggaaatagaatctgtaaaactttcaaaggcaatgtaccttttccacactgctaaagattttcattccgcggctcaaactttgggaagcatgaaggacttgtcacactttggggaaatcgcattgaattttctccaaataaaagattacaacgatttgaacgtaatattgataaaacagttggataacgttccctggaaatcaactcaagtcgtcttgtcgagttggattatttggaattttatgaaacaattgaatgatattgaattaaagataaacacaactaagccagcttctactgatgaagacaatttgctaaactggaacctgaatctcaaggagaaatcgaatgaactaacgaaatttttggaaagccatctagaaaaacttgataatgaaaccgtttatcaaataatgtccaaacaaaaccggcaaaacgaattattgatttttgctagtctaatcaacgatatgaagtttttattatcattttggattgaccaaggaaattggtatgagtccttgaaaattctgcttacaataaataaccatgacctagtctataagtactctttgattctcttattgaattcaccagaggctactgtgtcaacgtggatgaaaatcaaagacttggatccaaataagttaattccaacaattttaaaatttttcacaaattggcaaaataattctaaactgattactaacatatcagaatatcctgaaaattactcactgacatatttgaaatggtgcgttagagaagtcccaaaaatgtgtaatccaatagtgtacaattctatcctttacatgatgattactgatccgagaaacgatatgatactagaaaatgatataatcaaattcatgaaatcaaacgaaaacaaatatgatcttaatttccagttacggttgtctttaaaattcaagaaaactaagacctcgattttccttttaacacgtttaaacttattcgaggatgccattgacttggcattgaaaaataacttgattgatgattgtaaggtaattgtgaatgacgagattcttatagaggattataaattaaggaaaagattatggctgaaaattgcaaaacacttattactttcaatgaaagacatagatataaagcaattaattcgaacgattttaaatgattccaacgaaattttaacgattaaggatcttttgccattttttaatgagtatactacaattgctaacttgaaagaagaactgatcaagtttttagagaatcacaacatgaaaatgaatgagatttcagaagacataataaactccaagaatttgaaggtggaaataaacacagaaatttctaaatttaatgagatttacaggatactagagccaggtaagtcttgtgatgaatgtggtaaatttctacagatcaaaaagttcattgttttcccctgtggccactgttttcactggaactgtataatcagggtaatactgaactcaaatgattataacttgaggcagaagacggaaaacttcttaaaggccaaaagtaagcataatttgaatgatttagaaaatatcattgtagagaaatgtggattgtgcagtgatatcaacatcaataaaattgatcagccaatatctattgatgaaacagaattagccaaatggaatgaatag

SEQ ID NO: 1703 - DNA, 1068 bp, Saccharomyces cerevisiae
atgtctactggaagcagtgatagaaaggatgacgtcaaattattggaactgctgaattctatagatgaacagtttttagtgccatacaaaaagccggaagacttgcgtaaaatctcctctactaccaaactacaaggttccaccccaactaaggaactagacaaattagcctctgtattgaaggcacattgcacaaaaataggtattgtttgcaagccaggaacttttgataacaatcataaagttgtgattaccgaaatccaaaattttagtaggccattattctacttactaagtttattccctttgttttacaataacaaggattgccccaaatactttacagaccaactggatgaaagtacgctacaattgctcgatggcttgagagatttcattgccgaattacaagaaagattgaaaaatgacgaaaatgcatctctagacaaagaaaggttaacctcagttggtaaaatattcaatgcgtgcgattctctctctaattgttccaaggctggaccttatgggatcctagcaaacatcttaaaagataatgtggccataatggacgatacaatgaatgaaataaaagagtggcttgaggaacccgatttttcagcaaactcggacgatatatttttggattttgaggattcagaatccgaatctgattcacagaaagaggaatttgaccaggaaaaggtctatgaaaatataaagttgtttttcgatgggtttacgaggaagataaagctaatcaaattacttgtatcaactttcaggaaaactctggtgtcaaaagattttactcctaagaggaatcaagcagaaactttagacagtatacatacatatctgaaggaaatacagttacttttggatgaagtggtatccactgtacaatttgagccgaagaactttaccaatgaggaggtaaaagaagaacaggctgcattagttgcagtaactaaaaaagttcttatccaaatgagtaaactatatgaaggtgatccaaaaagaaagaaatggattgacacatgggagataaaattcaatgaattgttttag

SEQ ID NO: 1704 - DNA, 2655 bp, Saccharomyces cerevisiae
atgaaaatcttattcgagttcattcaagacaagcttgacattgatctacagaccaacagtacttacaaagaaaatttaaaatgtggtcacttcaatggcctcgatgaaattctaactacgtgtttcgcactaccaaattcaagaaaaatagcattaccatgccttcctggtgacttaagccacaaagcagtcattgatcactgcatcatttacctgttgacgggcgaattatacaacaacgtactaacatttggctataaaatagctagaaatgaagatgtcaacaatagtcttttttgccattctgcaaatgttaacgttacgttactgaaaggcgctgcttggaaaatgttccacagtttggtcggtacatacgcattcgttgatttattgatcaattatacagtaattcaatttaatgggcagtttttcactcaaatcgtgggtaacagatgtaacgaacctcatctgccgcccaaatgggctcaacgatcatcctcatcatccgcaactgctgcgcaaatcaaacaacttacagaaccagtgacaaataaacaattcttacacaagctcaatataaattcctcttctttttttccttatagcaagatccttccttcatcatcatctatcaaaaagctaactgacttgagagaagctatttttcccacaaatttggttaaaattcctcagagactaaaggtacgaattaatttgacgctgcaaaagctattaaagagacataagcgtttgaattacgtttctattttgaatagtatttgcccaccattggaagggaccgtattggacttgtcgcatttgagtaggcaatcaccaaaggaacgagtcttgaaatttatcattgttattttacagaagttattaccccaagaaatgtttggctcaaagaaaaataaaggaaaaattatcaagaatctaaatcttttattaagtttacccttaaatggctatttaccatttgatagtttgttgaaaaagttaagattaaaggattttcggtggttgttcatttctgatatttggttcaccaagcacaattttgaaaacttgaatcaattggcgatttgtttcatttcctggctatttagacaactaattcccaaaattatacagacttttttttactgcaccgaaatatcttctacagtgacaattgtttactttagacatgatacttggaataaacttatcaccccttttatcgtagaatattttaagacgtacttagtcgaaaacaacgtatgtagaaaccataatagttacacgttgtccaatttcaatcatagcaaaatgaggattataccaaaaaaaagtaataatgagttcaggattattgccatcccatgcagaggggcagacgaagaagaattcacaatttataaggagaatcacaaaaatgctatccagcccactcaaaaaattttagaatacctaagaaacaaaaggccgactagttttactaaaatatattctccaacgcaaatagctgaccgtatcaaagaatttaagcagagacttttaaagaaatttaataatgtcttaccagagctttatttcatgaaatttgatgtcaaatcttgctatgattccataccaaggatggaatgtatgaggatactcaaggatgcgctaaaaaatgaaaatgggtttttcgttagatctcaatatttcttcaataccaatacaggtgtattgaagttatttaatgttgttaacgctagcagagtaccaaaaccttatgagctatacatagataatgtgaggacggttcatttatcaaatcaggatgttataaacgttgtagagatggaaatatttaaaacagctttgtgggttgaagataagtgctacattagagaagatggtctttttcagggctctagtttatctgctccgatcgttgatttggtgtatgacgatcttctggagttttatagcgagtttaaagccagtcctagccaggacacattaattttaaaactggctgacgatttccttataatatcaacagaccaacagcaagtgatcaatatcaaaaagcttgccatgggcggatttcaaaaatataatgcgaaagccaatagagacaaaattttagccgtaagctcccaatcagatgatgatacggttattcaattttgtgcaatgcacatatttgttaaagaattggaagtttggaaacattcaagcacaatgaataatttccatatccgttcgaaatctagtaaagggatatttcgaagtttaatagcgctgtttaacactagaatctcttataaaacaattgacacaaatttaaattcaacaaacaccgttctcatgcaaattgatcatgttgtaaagaacatttcggaatgttataaatctgcttttaaggatctatcaattaatgttacgcaaaatatgcaatttcattcgttcttacaacgcatcattgaaatgacagtcagcggttgtccaattacgaaatgtgatcctttaatcgagtatgaggtacgattcaccatattgaatggatttttggaaagcctatcttcaaacacatcaaaatttaaagataatatcattcttttgagaaaggaaattcaacacttgcaagcatatatatatatatatatacatatagttaattag

SEQ ID NO: 1705 - DNA, 795 bp, Saccharomyces cerevisiae
atggcaagagatatcacatttttgaccgtatttttagaaagttgtggcgctgtaaataatgatgaggcaggaaaattgttatctgcttggacttcaaccgtacgcattgagggaccggaatcaaccgactctaattcattatatattccactgctaccacctggaatgttgaaaattaaactgaattttaaaatgaacgatcgattagttacggaagagcaagagttgtttacaaaattgcgcgagattgtaggttcaagtattcgcttttgggaggaacaactgttttatcaagttcaagatgtaagcaccatagaaaaccacgtcattctcagtttaaaatgtacaattttaacggatgctcagataagtacgttcataagcaaacccagagagcttcatacgcatgccaaaggatatcctgaaatctattacctttccgagttatcaacaactgtcaattttttttctaaagagggaaactatgtcgaaataagccaggttattcctcattttaatgaatatttttcctctttaatagtgtctcaattggaatttgaatacccgatggtcttctccatgatttcaaggctccgattgaagtggcaacaaagttcgctcgctccgatatcctacgccctaacgagcaattcagtacttcttccaataatgcttaacatgattgcccaagacaaatcttcaacaaccgcgtatcaaattctgtgtcgaagaagaggtcctccaattcagaattttcaaattttttccttaccggctgtaacgtacaataagtag

SEQ ID NO: 1706 - DNA, 1434 bp, Saccharomyces cerevisiae
atgtttcgaaggggagataattcaaattttaacgtacaaaatagcttctttcttcctttggaatacgaatataccgtaaaagataatgtaccttcaaaaaaaaagagtagtataggtttttttccattagatgattctttattcacatcaaaaaacaattcagggcaccataaaagcgaacagctccatcgcggtaatgcagaaactatcagaagccagtttggaactgacgcagttccgataaggatcgatgagaaagaaggaaagtgggatagaattcaagatgataattcttctaatttaaactaccaaattaacaacagtaatgacccagcttcgagtggtaaatatacccagagtattgactgtaaccatatagcggagtcaaaattttcaaaaaaaaatggaaacattgatagtcttcgttcaaactcagcaacttttatgctaaatactgcagatgaagacgtgatagaatttagttttgacgataatgtcccttatgctgagttattatctggtgccacccttgaaaaatgttcgttgactctaaatgaaataaacaaaaaactattcaatacgctctatgactttcgagtaagcaaagataatcccgaagaaaatttggtagaactaatacttccgaactgcgtggtgttattaaacttttttgaagacattgaactcttggccgactcttctgatgaggctttcgaaaaatctactttcattaacacaattgagttcattgtgcacgatatttgggtcgaaacgttgataaagaacataaacttattacaaatgtttgatgcagatttgaaatgctacaatgacaagtacataatttgcaagctaaagggtcagtatccctccacaaatatagtggacataatgtgccgtttgaagcatttttccaattctattttggaaactttcaaattcggaatcgagctaaaagaacaagatcaatgccacaatagaaacactattatcaactacgttcttttcagtagagtattttcaacgattgttttagagattcaaaaatgctttatcttgatcgttaagttcatgtattctgtcaattttttagaaaaattttccgatgaagtatttttgtcatttattgaaattctcataaaaattgtctttgagcaccagattccgcagttatttttgggaattgatgaaattattcaactctggttaaagaacaatgaaggaaaacggcaacaactcttgagcgcttggtgcaacggaactgttcaagatatgaagcaaagccaacaaagagagtcctcaaacgcagaatctgaatcaatcacttcaagtacagaagaggacgaagaaggcctccaattcaataaatgggatgtgattgaaccatttattgataatatcaaggctttgaatcaatcaaaatcccatatgtga

SEQ ID NO: 1707 - DNA, 399 bp, Saccharomyces cerevisiae
atggattgcccctcaaacgttgtgttattgttgctgcaattagttttgcagcgccaacaaactctagctcatcgagataagtcggttgatttgcaaacgctgttaaaagatcccgtcattgataatgacgtactagtagagttcaagacacacaagttggtgcaattatatggccctcaatactgccgcgacatatctctgagagggctcaaaacaatggttacagatatcttcgcaaacggaatcccaaaaaatgcgcaatcttcagggaatgatcaaccagtgactgtagtggacctggccaattactactacatgcagagaatcaatgagctacagaatacagaacttcctcaattgaaagaggcattgctgacaaggctggagcacatgatctaa

SEQ ID NO: 1708 - DNA, 840 bp, Saccharomyces cerevisiae
atgcagggcacttttaaaaggttttaccatcccacgcttacgcggatgtccttcttggataaattcctcaagcctatgatggcaacggcttccccaaaggaataccagatcaaacaactggtcaagccaataggcttaacacaagcaccaaggaaaagcaccaaatactcccaggggaactctttgagggatatgtttgattcggaaaagacaaaccacagagttaaagagttggccgttgaattcagcaaatctggactttatgacgtgcaagtcttccaaaagacaaaggggaaattgtttatagctccagtttcatattggaaagaagataaagctttgttttttcctcatttgataggaacggcaatggatggtacgaaacaacagaatatcgaggatatgttaaggggtaaaaccagtatagtgaggttatttagtacagcatctggcgataagttgagtagttcatacttccaaggaatcgtagacgataacaaaaaaactgactacttgactgaagctgatgcgcgtttaagtttaaatgacagtaacgtccaaatcatcgaggtcaatcttgtagaaaacgctgtgaaaagtgctctagtgaaaacgcttgctcgttgggccaatcgcgttccatcctggcgccagccattttatttcgaatgttctagaggccaatggccattttccgtcagggaagagctcttttgcaataatgtcttttctggatacgtctttcttgtggaccagcagttaaaaattaggtgggcagcttgcggggaggctactccatctgaaaaggaagcattgtggaagtttgccaaacgtctgtga

SEQ ID NO: 1709 - DNA, 339 bp, Saccharomyces cerevisiae
atgtatctcagtgcccagcttatgagaactgtcacagcctcccacttgaccctcagagccctctccactccccccctctttcaacatcgccagatagccgccgttgaatggtgcgggacaacccggcctggcctggccaggcaaaaaaggacgcagcacgcctcgagcgttatttccaaatcgggcgtactatcagccaagcccagctcggtatttttagcgcttctcgcaggaaaattggctgagaagtatatatacgcgagaatgttgctcttccatgtctcagtagtcaatgagtgtccagtggtgtttcattctggaccagttgtttggaagtag

SEQ ID NO: 1710 - DNA, 567 bp, Saccharomyces cerevisiae
atgagtgatactacggaagtccctaggcaatcatctgagaacgaccaggataataacttggaaagaaccaactcattaaaaagtccggacgtgaccaacaatataccaagtcttttcaaattagccgccgaatggcaaatcaacaatccacaggaaaccttccaaaaccatatcctggaaaatgatgtactcaagaaaattaatgaaatcactcatttgatccgggaatcgtacaaagacctctccagtcaagatgggatgatgtccaaacaacaacaggaaaagatggattgggatttgttttgtactgttcctgtaaacattattgagcaatatacaaaagacatggacgaaatatatgaaaaaatggaaaggctagcaaaacaacaacgtctttggtgtgaatccgcttttcaaatagacgtggaaagatgtggtgactccattctcaatgctgaaacgtggatgaagaagaaagagcgccatttagagtacaaaaatattgaaatggaaagatccgcaaatgaaattaaggaaactattcaaagactaacagatgatagatga

SEQ ID NO: 1711 - DNA, 873 bp, Saccharomyces cerevisiae
atgtcagtttaccatttaccaacgctgttgaacccgctggttaatgctatatttaactgtcccgaaccagaaagatccccattgaaaaagcttttcgctaatttaaaaacccgtaggtttatcctcctagcacctccttcagaataccttttgaattaccacgatgtcaagagcaaactgccgttacatgacctctgttataatgcagagtttattaactcttacatattgttaatgactgaaaactcttacataaatacgaattcaagggacagtcattatgaaacgttagatggtaagaccgttgttattcaatggaagaataatgtgatccatgccttaaatggatttcatataaggcgaagactaaagattctagagacaaaaatattacccaattttaatgactactttgaaggggcggctgattttatcatactattcatagatcaacctttaaattgcgaatttgtacctaacgactacttacagtgttttcacaattatgagaaaataccaaaaaatgcacatgctatgccaaatctgtcgatagattcttttcagcaagaaagatcgtcattcgagaatatattgcacattcatcctgctcgattaacacagcttggccaattgttttcgagttacagaacgctcgctcctggtgatgatccatctagaagtatttttgaaagcatcgtgcaacaagcatttgatggaatgaaatcggattcacttttcaagaacttttctaatctttacgatcttatacacgactattttgaactaaatctttacgatgatatatggtctaggcttactacacatttcaaaggccacgaagtagacactgaaaaaataaatatttttcagtga

SEQ ID NO: 1712 - DNA, 1059 bp, Saccharomyces cerevisiae
atggaatcaagtttacaaaaattgaaattccaggatattgacataaatcttattcctactgcgaagtggaccacaaaattacagtatattctatacacctggtgtcagtcgatactacatgtggccatgtttttttctgatatatacacgtgtattaaattactggcatttaacacatggtcgaacaatatcatccaaccattcttggaattccgtatttcaaaatggttgtttagcggatgcatattatgctcctcattaatattaatttgggagttggtaattggattgagagtgtataggaagaaagagattacatcgaactacatgaatggcattagcagattaataaattgcttgttcaatttcaaaaagtatcaaattttcgaactaatagtgctgactgatgagaaaaaattcagtaagtggttattcttttcatattttgaaatcagtggatgtttgaggctattgttcggtgactctccaaggcaaataatcaacggattaactttgtggtcagttttactgacagtttcgaatgagaccagtagcggaacccatagtactcaaagcctaggtaatttagatgacctaaatggaataataaacaagataaaacatattgctaagacaaattacgaagaaagtgtgatcttgtccttcatgttgttctcgtttatcatatgggtaattttaataagcaaattaattctaagcataataatattcatcatttttatacgtccgagatttttgtctagtaaaaggaaggttaaggggtatgaattgaaactacgaaagtatgtgtctaaagtcattgacgagaatttaagtagaactgtctacgaattgggaatattgatagatgatgaggaagaagggaccatatgtggtgacaacaaaacgcaaaaaaaattcgattatgatagtcctgattatggcgacgaaagcacaataccgagttactactgctactcggatgtagaaacgtacgaaagagtatatacgcccataaaggcatatttcccccagaaatacaaacataaatacatataa

SEQ ID NO: 1713 - DNA, 1110 bp, Saccharomyces cerevisiae
atgttattccctaaacgtctgattgtgtggggtgttctattgattttaagtttatcacaatttgtcctctacctgccagccacaacatgtacgaactctaagggacttaggttatgcgctccacagtttactataactgtgattggaggatccagtactgcaaatgagtttattgcaagtgtaagagaatttctgcgattgatttcgtacctgacaattgacatgggttggtcgaatgaattcactgatccaagtgtgtatgaggatgaaaatttggtggacacatttcagcctgataaggtttttgagctcaattattttggattttgtaaacggagtaataaaagcaaagtttattgtacctctaatgagaattatggcatggacgtacttgaagtacttgtcagagacgtcgggattcaattaggtaacatttccactacacgatcgaatgaaaccaaaaaattcggagactctctcgtattgacctaccgtttggcattgacatctattcgtgattttttgaaacacgacaagcacacaggaaatgccctatcaaaggctttgattggcagtcctgatccaaatgtaaaaggcgtgtcaccaacaaaaaactatctgaaaggcgtcaacctggcatttatactgatgatgttcaacggcatggttttttactttgcagtgttggaaataatagtcggattcctcagtatctgcgtagtgtcagcctttgggggagcacttagtgttgggaaacgacaccgcttatttcctatgcttttgaagtcatcaagttcaatattagttgttattgctacattgacaatattatgtaacatcgtatatttgattgcactgaaaacattagaacctgaagaggtaacagacgtaggatctgacaacgctgctgtacacactacaggctgggaactgttaaaagtaaacgtgggaagtgggttcattatggggctcgccaggtatgccatccagtgggtcctattggtactcgcatttcttgcagcaaatcattacaaagctaagcccaaaaagtctgataagtatacagaagacacatctaactccccttctccagacttgatggagaagtaa

SEQ ID NO: 1714 - DNA, 1545 bp, Saccharomyces cerevisiae
atgaacgaagttacttgttccataactggtgacaacccaattcataagatcaacaatggattaggcttgaaatggaataatctgggtaaattctctgattttcagactaacgatagcgccgcgcgagatgctagaacaatagattacatctttaccaattgtcaaaccggcagcagtattggtaagatagattttcgggccgcactaccggcagataaatctcaacatagtggtgtcagcgaaaaagaattttcaagacttgagaaccagtggtcaaaggaattctcttgtttccccaagaataaaaatgctgatgtgaccaagcccagtagaaacaaacatgagaaacgctccgctaatttgcacaataggtactttgcacaatattatagtacggcatatcagcaaaatcgtatatatccttgtcgaatatcttacaatgaacactcatctgtttctaatggctgggaatttcagttcaaatcaatcgaaaatcagttactaaatgagctaaagatagaaaacaatgtagaagaaaaaactgttggttatgaatatgtggcagaatacgaagaaacaattgatttcatgcatatgctgtcatccgtaccacaaacatatcaattcctaaaatcaaacatctacataacggaacgggacccatataaaataggatgtgtactaatggacaacggttccaatttgaacgaagtagtaatggcctttgaagcagccatttcacaagatccaagccatataaatgcatggttgaagttaggtatagttaattttgaaaatgaaagcgaaagcaatggagagcttgctttgcgaaattgcttaaatttggatccaaataatacaattgcattggaaaacttagcaattcaccatataaatcaacaaaatgaatcagagtcattgaaactttttcacaaatggattctttcaaaattttcgaaggttttccaaccttctgcgggggaaaacaaagatagcattaataaaattccgaaaaaggcccatttggcgcatattctagaatccctgttgaatatgggtatagaaaaaaaagatcagtatgatatatattcagtattatcaatcttatattattcggatcagaaaataaagcaatctcagaaatgcttagagtttttactactggaaaagcccaataatggaacaatatggaatagatatggtgctattttggccaatactaagtcgtatcactctgcgataaatgcgtacaataaatgcaaacaactaagaccgaattttacaagggttcgttataatttagcgatcgcctacatgaataagggtgactatgtaaaagcaagcaaaatgctaatcgaagttatactgttacgaagtaaaggatatgaacacaacaaagcaaaaatgcaaaacaaatttatgcaaaatttaaaaaatgctctcatcgcttcaaaaaattttgattcacttgatctaataaatggttctcataatacagaatcgttaatatcaaccttaaaagctatttataacaaaatggattag

SEQ ID NO: 1715 - DNA, 615 bp, Saccharomyces cerevisiae
atgaatagcggtggtagtgatagtttcgattatcttcttcaattaacaaaagctttaagtgcagagtgtcgggctaacagacaagagaccgatcgaatagaactattgttaaagcgccttgccaaacagtcaggaatatcttatgataatttgagcaaaaacataattccagattcatggaaagataatgcatctcaaaaagcatctccccccactgaggcacagaagcttatcagcgaaaattttaaactcatatacgagattgaaaaacaagagtacttcaatacaaaggctgttgcgctaattaacaacataaatgagcatttctcatatattaaaaattttatcgacgaacagaatgcaataagagaacgaaatattgccacattttcatcagagaagcttgatgaaaggaacaaaagtcttcaacaaaattacgagtcattgaagacagaaaatgaagaaacaaaaaaaaaattgcattcaattatcaaacagtttgaaaaacttttgaaggaagtggattgggatcgtatatctaaagattccagagattacagccgctttaaaaaacagttggaatacctgcaagacacgtaccaggtactgaaatag

SEQ ID NO: 1716 - DNA, 2697 bp, Saccharomyces cerevisiae
atgttcaaatacaaccgctcactctgtagcagcgctttgatagcaaagtctcagattcgtttttatagattgaagcgggcgccattgaattatgcctcccatatacctgaagttcttaataagaccatcatagggccagacgaaccagaaaaatgtctcattttgaaaggaaaaacatcagaggaaatcgaaaataatcttctcagtaataagaaatttcaggagatcaatcctcttgatactatccaggaaacgttcattcaatatctgaaattttgtaatgaaactaactttaaaagaagtaacaagaatttaaacagattaaaaaaaaccttagaaagcaaggactctaatagcaccgtaaaaattaatgcagttttcaattatttgctcgaagagtgtgatttagaaatcaaaagattgaacacgaccggccaaacccaggtatacaatgaagagaaaggaaatgaagatgacttagagcaatccataatgaacgatattttccgatcagcacaagaacaatttgaagatcaagagggccatataccgttaaggagtacatcatttttactggagattttgaaaagttttaatgaacggtttaatggcataatcaaaccgaaagagtcaataacagaaatggtcacattcagccaacttgctcaagcttttgaagttgttaaattgataccagtgcaagaaatgaaggagaaagggatttacttggtcggaaatttactttatggcacagggaaagttcgtttagatcctataaatgagtcattctatattgaatccctactagtttttggaaactataaggctgcatacagtttatttattaccaataaagacaaagtaaacgagcgctggtggaatgaactaggattaatgatcacattaaggtctaaccacttgagaaacttcaggaaacttttagccgagacagatgcaaagtactcaacaaagtattcttatttgagcccaagagttaccaaattgagcatacgaaaatatttgtcgattggcaatgttactgaagctaatatactgactgatcgatttattaagttagtggaagaagttggaataatcagaatgaaagatgagcaggaggaacttcccacgggagttaaaaattttcagaatgagaaacatgcaactgagttcttaaatgaactagaaataccatcggatcatgattatatcagcattgttgatttccatctttataagagaaatattcccatggcggctcaacttatcagcaagtacatggaaatacctggaacgacacaagaagatgccgcatttctacttgttaaaaccaagctaaatatgttgaaagattttgaaaagctacgaaacatttttgctcaaaataaagattatgtagtgcctgagaataatgtgaaaatgttgcaagaggcatttgagagcgttattactaagtataacactaattctccaatatacaatgaattgctgtttgagaatgtttcggccttaacaaaaagtattgtattaactgattttctggaagagttcattactaaacaggcttctggacagtggatggaattaaacagtgtgtcacgttccagaaagtttaatggcttgttgaacatacttctcggtacaggtgaagaagaaaaagcatataatatcttaaaaaaactagaagaagcctcaaagaaatcaaaaacagatccagatttactctataatcagttttattcggaagttaatgcatatcattacgctaaatttgttgaattttatagtcttcaaattcaaaatatgaaggcacaaaatacgccctcatttagaaaaaaggaatttaagcagaaagtgaagtcacttttaaaaagaatgcaggagtcagaggttatcccaaatgctgtttttttgagagaaatactcaatttttatgatagcatgtatgactttaattcaagttttgagatcatcaatccgctacttgaatccaaacaacaggtgagctctgagtcttcattatccacctcaaacccttgccgattttacaaccgtcgcatcataacaaaaccgctgtaccacaagatttggtctgtgtattgccattattatcatgttttacaaaataattctaggattttatcgaaaaagtcgtccattgtaaagaaattaataaaaaggcagataaagattcacccaacttgtcacccaagagtattgttccaaatgacggcagaaaatggtgaaattttgccagacaaaactttttctaaattaattgtgtccacgttcatgaaaagcggggatttagaagcaatacctgccatattaacgtttctaacgaaaaaatttgacttgaatattgattacgatttgagtatgtatattctaaagggtttgaaaagacaatatttacgagatattagtaacatcagtaaagatgcttgtgagtacaagttacggaaggcggagctaatgaataatgagtcaatcttaaaaaacattccacagggtacaaatcaagagaatacaatatcccatttgatcagggagattttgatctttataaaatggaaggaaaaaagtgattgttctactttcttgatggtagaagatgcttttaaagaattaggaacagagtttactttactcgaagaattaatagaagatgtaaataagttaaagataaaagcctaa

SEQ ID NO: 1717 - DNA, 1473 bp, Saccharomyces cerevisiae
atgaatgcggaccatcacctgcaacagcagcagcaacagcgacaacagcatcaacaacaacagcatcaacaacaacagcatcagcatcagcatcaacagcagcagcacacgatattacaaaatgtgtcgaacactaacaatatcggcagcgattcgctggcgtcacagcctttcaacacgactactgtttcctctaacaaggacgacgttatggtgaactctggggcaagagaacttccaatgcccttacatcagcagcagtatatatacccttactatcagtatacaagtaataacagtaacaacaataatgtgacggctggtaacaatatgtctgcgtcgccgattgtccataacaacagcaacaacagcaacaacagcaatatttctgcttctgattacactgtcgcaaacaacagtactagcaataataacaataataataataataacaacaataataacaataatattcacccaaaccagtttactgcggccgcaaatatgaactcaaatgctgcagcggctgcttattactccttccccactgcgaatatgccaataccgcaacaggatcaacaatatatgttcaatcctgcttcatacataagccattactattcagcagttaacagcaataacaatggtaataacgccgctaacaatggcagcaacaactcttctcactcagccccagccccggcccccggtccaccccatcaccatcaccatcatagtaatacacacaacaacctcaacaatggtggtgctgtaaatacaaacaacgctcctcagcaccatccaacgataataacggatcaatttcaattccaactacaacaaaacccttctccaaatttgaatctcaatattaacccggcacaacctctgcatctacctcctggttggaaaataaacactatgccgcaaccacgtcctacgacagcacctaaccatccccctgcgccggtgccttcttcgaaccctgtggcctcgaacttggttcctgccccatcatcagaccataaatatatccatcaatgccaattttgtgagaagtctttcaaaagaaaatcatggttgaaaaggcacctattgtcacactcgcaacaaagacattttctatgcccttggtgcttaagcaggcagaagagaaaagataatcttttacagcatatgaaactcaagcatacaaattatttattagacgaactcaagaaaaacaacatcatctttaactacaacaattcttcctcctctaataataacaacgacaataataataataataacagcaatagcgctagcggcagtggcggtgccggtgccgcggcggcagcagcaacagctcccgaaaatgaagatggaaacggttacgatacaaacatcaagactttaatcaatgatggtgtactgaataaggacgacgttaaacgtgttttgaataaccttattgttagtcacaacaaatag

SEQ ID NO: 1718 - DNA, 789 bp, Saccharomyces cerevisiae
atgtgtggcatttttggctattgcaattttttaattgagaagacaagaggagaaatcatcgacactttaatcgaagggttacaggcattggagtacaaggaatatgactccagtggaatttcgatccaaggtgatgagctggagtctctcaatatttataagcaaaccggtaaaataagcagtttgaaggaagaaatcgacctttacaatcttaataagaacctgccctttatttcgcattgtggcattgcccatactaggcgggcaacacatggagggctaagacgtgcaaattgtcatccacataactcagatccatctaatgaatttgttgtggtacacaacggggttattaccaacttcgctaatttgaaagccttattgatggcaaagggctatgtgttcaaaagtgacactgataccgaatgtattcctaaactgtacaaacacatttatgatacaagcattgaactcgggtacaacctcgatttccatgtattaacaaatttagtacttaaagaattggaaggctcttatggtctgctatgcacttcttctcattttcccgatgaagtggttgccgcaagaaagggttccccgttagttattggtgttaaaggtaaaactgacatggacgtaaactttgtcgaggtggaatatttggatcaagaagaagactacttgaagcttaatactcaaaccaagagttctggtaatgtcttggctgccgcacctgtaaaatataacacttgtttaaggaagtcaccccccttcgttcacaatacctga

SEQ ID NO: 1719 - DNA, 1437 bp, Saccharomyces cerevisiae
atgccttctttcaatcctgttagattcttagagttaccaattgacattagaaaagaagtttacttccatttagatggtaatttttgcggagcacatccctacccaatagatatattatacaaatctaatgatgtggagcttccaggaaaaccaagttataaaaggtctaagagatctaagaaattattgagatacatgtatcctgtttttgccacgtatttgaacattttcgaatactctccgcaactcattgaaaaatggcttgagtatgcattttggttgcgctatgattgcctggttttggactgtttcaaagtaaaccatctttatgacggaacgcttatagatgcattagaatggacgtaccttgataatgaacttcgactggcctacttcaataaggccagtatgttagaagtttggtatacttttaaagagtacaagaagtgggtgatagacagtgttgcttttgacgagcttgacttacttaatgtaagtaatattcaattcaacattgataatctaactccacaactagtagacaaatgcttatcaattttagaacagaaagatttattcgcaacaatcggggaggtacaatttggacaagatgaagaagtaggagaagagaaagatgttgatgttagtggagctaattctgacgaaaactcctcacctagctccacaattaaaaacaagaaaaggtcagcatccaaaagatcacattcagataatggcaatgtgggagcaacgcacaaccaactaacaagtatttctgttataagaacaataagaagtatggaatccatgaagagcctgcggaagatcactgtgagaggagagaaattatatgagttgctaataaattttcatgggttcagagacaatcctggtaaaacgattagttacatagtgaaacgtaggataaatgaaatacgcctatcacgcatgaatcaaatttccagaaccggactagctgactttacaagatgggacaacttgcaaaagcttgtattaagtagagtagcttacatcgacctgaatagcattgtctttcccaaaaattttaaatctctgacaatgaaacgtgtaagtaaaatcaagtggtggaacatcgaggaaaatatactaaaggaactaaaagtcgataagagaacttttaaatcgttgtacataaaggaagatgatagtaaattcacaaaattttttaatttacgacacacaagaataaaagagcttgacaaaagtgaaattaatcaaataacataccttcgatgtcaagcaatagtttggctatcttttcggactttgaaccatatcaagctacaaaatgtatctgaagtttttaacaatatcatcgtacctagagcattgttcgatagtaaacgagtagagatttatcgatgtgaaaaaatctctcaggttttggtaatataa

SEQ ID NO: 1720 - DNA, 1032 bp, Saccharomyces cerevisiae
atgaaaatgcccagtattattcagattcagtttgtagccctaaaaaggcttttggtagaaaccaaagaacagatgtgcttcgcagtgaaaagtatatttcagagagtatttgcgtgggttatgtcattaagcttgttttcatggttttatgtaaatcttcagaatattttgataaaagcattaagggtagggccagtgcctgaacatgtctcctttatcatggatggtaaccggagatatgccaagtcaagaaggctaccagtaaaaaaaggccatgaagctggtgggttaacgttactaacactactgtatatctgcaaaagattgggtgtaaaatgtgtttccgcctatgcattttctattgaaaattttaatagaccaaaagaagaagtagatacgctaatgaatttgtttacggtaaagcttgatgaattcgcaaaaagagccaaggactataaggatcccttatacggatctaaaataagaatagtaggtgatcaatctttactatctccagaaatgagaaaaaaaattaaaaaagtggaagaaatcacacaggatggagacgatttcactttatttatatgttttccttacacttcaagaaatgatatgttacatactattcgtgattcagttgaagaccatttggaaaataaatcaccaaggattaatataagaaaatttactaataaaatgtacatgggtttccattccaataaatgtgaattattaatcagaacaagtgggcataggaggctctcagactatatgctatggcaagtacatgaaaatgccaccattgaatttagtgatacgttgtggccaaattttagcttctttgctatgtacctgatgattctcaaatggtccttcttttccaccattcaaaaatataatgagaagaatcactcattgtttgaaaaaatacatgaaagcgttccttcaatatttaaaaaaaagaaaacagctatgtctttgtacaactttccaaacccccccatttcagtttcggttacaggagatgaataa

SEQ ID NO: 1721 - DNA, 642 bp, Saccharomyces cerevisiae
atgtcacaaaaggataacctactcgacaatccggttgaatttttaaaagaggtcagagaaagttttgatattcagcaagatgttgatgccatgaaaagaatccgacacgatcttgatgttataaaagaggaaagcgaagcaagaattagtaaagagcattcaaaggtttctgagtcgaacaagaaattgaatgcggaaagaataaatgttgctaaattggagggagacttagaatatactaacgaagagagcaatgagtttggtagtaaagacgaactagttaaacttctgaaagatttggacggattggaacgtaatattgtgtcacttcgaagtgaattggacgaaaagatgaaattgtacctcaaagatagtgaaataatatccacaccgaacggttccaaaataaaagcaaaagtaattgaacctgagctggaagaacaaagtgcggtcaccccggaagcaaacgaaaatattctaaaattgaagctatacagatctttaggagttattttggatttagaaaatgatcaagtccttattaacagaaaaaatgatgggaatattgatattttacccttggacaataacctcagcgatttctataagaccaaatacatctgggaaagattaggaaagtga

SEQ ID NO: 1722 - DNA, 1287 bp, Saccharomyces cerevisiae
atgtacgagtactgctcagttgtaataaagaaatactccaagtatacaattccctccttcgctccaaatggttttcaatcaatgcttgagcctcctcagatagacaagtggcaacacctttccgctaactgcactctccaatttcgggttcttctaatggactctagacaaattctgatcaatgtggttctcaataattcaacacttctcgaaaatattcgcctgccgctgggggataatcaagatttaatacaattttcatgtaaaagccccataatctcttgtaaatatatctccgaagaattcggacccagaatgttaaggaggtttcagatgaatttgccaaatgacgttgagttcaacaggactgtagtttctttaaagaaccttaattttgttttaaggacagctaggacatcaatagcccagagtacaataacaagccaggtgcaaggcaataataacggtacaaaggtctgtttcacagaaggtccaaaagttagtagctacacaaatccgaacacgcaatttcaaactcaaaacatgattatggatttcagtcaacgttatcaggaagaatctgaaagagagtcaaataatcgttcaaatataactttaccacacgacagcattcaaatagctcaacaaatatggccaaacacggatttaaatgtagtacaatcttcacaagacctcaacactccaatggctacgcaaactgttttgggtcgtcctgagtcgctaattgtacagccattggaggtttctcaatctccaccaaacactaccaactgccttcctaatgcagaaaacaaaaagaaaaaagtcgacaccacttctgattttacttcaagaaaggagattgctctgtgtaaaactggtttattagaaactattcatataccaaaggaaagggaaagtcagatgcaaagcgtcactggtttagatgcaacaccaacgattatatggagccccgggaaagacaacacggcgaagaaaaataccagtaataagaaaaatattgatgataaactaacaaacccccaaaaatctggaaatacacatacccctgatagaaataaagaagtgctacctaacggcacacttaatgaaacgaggaaagaagcatcgccaagcgaaggattaacgataagagttaaaaacgttaatcggaatgcgtcaagaaaaatatctaagcggctaatcaaggaaaagttgaaagacgaagaattcatgaaatgggttaataaggttgaaacggttctcaataaaatgttcgaaaagtga

SEQ ID NO: 1723 - DNA, 1986 bp, Saccharomyces cerevisiae
atgtcaaggaaatctatagtgcaaataagaagatctgaagtaaagcggaaacgaagtagcaccgctagcagtacaagtgaggggaaaactcttcataagaacacacatacatcctctaaaaggcagagaactttgacagaattcaacatcccaacttcatcgaacttacctgtccgttccagttcatattcattctcaaggttcagttgttcaacatccaataagaatacagagccagtaattattaacgatgacgatcacaatagcatttgccttgaagacactgcaaaggtcgaaatcaccatagacacagacgaggaagaactagttagcttgcatgataacgaagtcagcgcaatagaaaataggaccgaagatcgaatagtaacggaattggaggagcaagtaaatgttaaagtctctacagaagttattcaatgtcctatttgtctagaaaacctttctcatttagaattgtacgaaagagagacacactgtgatacttgcataggcagtgacccgagcaatatgggaacacctaaaaagaatatcaggagctttatttctaatccatcatctcctgcaaaaacgaagagggatatagctacgtcaaaaaaaccaacaagagtaaaacttgttttaccaagtttcaagataattaagttcaataatggccacgaaatagttgtggatggtttcaattataaggccagcgagactatctctcagtactttctttctcattttcattctgatcactatattggactcaaaaaatcttggaacaatcctgatgagaatccgatcaagaaaacactttactgttctaagatcactgcaatattagtaaatttaaaattcaaaattccaatggatgaaatccaaattttacccatgaataaacgcttttggataacagataccatttcagtagttacgttggacgctaaccattgtcccggtgcaataataatgcttttccaggagtttctggcaaattcgtatgataagcctataagacaaattcttcacacgggggattttcgaagcaacgccaaaatgattgagacaattcagaagtggttggccgagacagcgaatgaaactattgaccaagtttatttagatacaacatatatgactatgggatacaactttccttcacaacattctgtgtgcgagactgtggctgattttacattacggcttataaaacatggtaaaaacaaaacatttggagattcacaaaggaacctttttcactttcagagaaagaaaacattgacaactcatcgttacagggtcctatttcttgtgggaacatatactattggaaaagagaagctagccatcaagatatgtgaatttttgaaaacaaaattatttgttatgccgaattccgttaaattttcaatgatgctaacagttttacaaaacaacgaaaatcaaaatgacatgtgggacgaaagcttactcaccagcaatttacatgaatcatccgtacatttggtacctataagagtgttgaaaagtcaagaaaccatagaagcttacttgaaaagtttaaaagaattggaaacagactatgtgaaagacattgaagatgttgtcgggtttatacctaccgggtggagtcacaattttggtttaaaatatcaaaagaaaaacgatgatgatgagaatgaaatgagtggcaatacagaatattgcttagaactaatgaagaatgatcgagataatgatgatgagaatgggtttgaaatctcgagtatattgaggcaatacaaaaagtacaacaaatttcaagtttttaacgtaccatattctgaacacagtagttttaacgatttagtgaaatttggttgtaaattgaagtgttctgaagtcattcccactgtgaatctaaacaatttatggaaagtgaggtatatgacgaattggtttcaatgttgggaaaacgttaggaaaacgcgggcggctaaataa

SEQ ID NO: 1724 - DNA, 453 bp, Saccharomyces cerevisiae
atgggcaatttcattataacagaaaggaagaaagcaaaggaggaaagaagcaatccacaaacagatagcatggatgatttgttaattcgtagactaacagatcgaaacgacaaggaggcccatttaaatgagttgtttcaagataatagtggcgccattggtggcaacattgtcagccatgacgatgctttattgaatacactggcaattctacaaaaagaactgaaaagtaaggagcaagaaatacgaagattgaaagaagttattgcgttgaaaaataagaatacggaaaggttgaatgacgaattgattagtggaaccattgaaaataatgttttacaacaaaaactctcggatctgaaaaaagaacattcccagctagttgcgagatggctaaaaaagacagagaaagagacagaagccatgaacagcgaaatagatggaacgaaatga

SEQ ID NO: 1725 - DNA, 2163 bp, Saccharomyces cerevisiae
atgaattcgaatgaagatatacatgaagaacgcattgaagttccacgaactccccatcaaacccagccagagaaagactctgatcgcatcgctctcagggatgaaatatcagtaccagaaggcgatgaaaaagcatattcggatgagaaagtagaaatggcaaccacaaatgcatccagtaactttggctcaaatgaaagtgcaaaagacggcgaatcaatcggcgccttttcaaatccccatgaggctctgatgcagtcaaaattgagagaagaatcccagagtaaaaccatactaccatccgatgacctcagccagcaattagaaaccgaagaatccaaagttgaagaggctctaaaaagaataacctcacccccattaccaccgagggctgactgcatagaagaatctgcatctgctcttaaatcctcattgcctccagtgctagcaggaaataaaaatgatcaagccccccttgaccgaccacagttacctccgaggcaggtagttaatgcggaaactcttcatttgaaggcgccccatggtaatgcgactccctccaaatcaccaacgagtgctgtaggtaattcttcttcatcgacccctccaaccttaccaccacgccgtatagaagatcctttagacttggctgctcaaaaacatttcctagcgagtacatttaagagaaatatgctcttttataaaagtgaagataactctatcaaatgtgatttggataaaaatatactaaatttaaaagaagattcaaaaaaaattaacaacaatgaaattcctgaagaggttagttcattttggttaaaggttatcggcgactatcaaaatatcttaataaacgatatcgaaaccttacatttccaactatctcgaggtataccagccgcttatcgattggtagtctggcagttagtaagttatgcaaaatcgaaatcctttgaccctatatatgaaacgtatctaacggaaatggcaccttttgacgtccaggaatttgaaaatcagctaaaaatgatggacgaagttccctctgaatacgtaaaacgcataagtaatgtgttaaaggcttatttactttttgacccagagtgtgagttttctaccgacattgcttatattatcaatatgattcttgacgtttgcgaggaggaggcaaatgcatttggtctacttgtacgcctaatgaaagtttacggtttaagactcttgttcttaccaagtgcttctgagatcgatattctttgctataaatttgatagacttgtagaagaattttatcctgaaattcacaaccacatggttgaaaaaggcgtccgttcttccatgtttttgcccggtttcttcacgacactgtttcaaaagaaacttcccactgaaattcaaccacgtatcggtgatatggtatttttagaaggtattgactctattatgagaattttagccacacttttatctaattcccgagaccatctgttaaaaatgggttttgatgatatgctggagctattgaaatcaggtctgttagatgcttatattaagcagaatgatggtacacgcggtgacactcttctctcaaatgaatgtatggataaattactacaagactctatgatgaaagtagcaataaccccaaagactatgaagaaatattcttctgaatatgaggaaattcacagattggacaatgaaaaagaagtgcaatataagtctatcacggaaaaaaatttacatttacaaaagcatgttcgtaaattagaaaacgactacacatctttaaatagagagcatgtgacaattgcgaacgagttagtgaaaaatcggcttaatatcgagtctgtattaaatgaaaataatggttacaaacttcaaattttagatttgaagaaaaagttggattcagaaaaaaagaagcaagttttaggtgtatatgtgcccaatgatttaaagaaagatttggaagagacaatgaaaaagaatacccaagtaatggacgaaaatttgaaattgcaggataggatttcagaactagaaaggcttattgaagaaataaaaactgcaaacaaaaatggtacgttattcgaatattctaattctaaaaataatcctttgggagccggctggtcaggatttaaaaaggtttttaaatag

SEQ ID NO: 1726 - DNA, 318 bp, Saccharomyces cerevisiae
atgttgatgccaaagcaagaaagaaacaaaattcaccaatacttgtttcaagaaggtgttgtcgtcgctaagaaggatttcaaccaagctaagcacgaagaaattgataccaagaacttgtatgttatcaaggctttgcaatccttgacttctaagggttacgttaagactcaattctcatggcaatactactattacactttgactgaagaaggtgttgaatacttgagagaatacttgaacttgcctgaacacattgtcccaggtacctacattcaagaaagaaacccatcccaaagacctcaaagaagatactaa

SEQ ID NO: 1727 - DNA, 1101 bp, Saccharomyces cerevisiae
atgtctgaaaaatcagctagcaataacaaagctgaattcaaaaggcagtcatcgccattcagagaaatcatctctgcggatcacccaatttataaacctgctaagggaaggtactggctgtatgtggcgctaccatgcccatgggcacaaagaaccttgatcaccagggccctgaaagggctagcgcctataatcgggtgcagtgtagcgcattggcacctggatgacaaaggctggcgattccttgaagaaggagatgggaaaaccaatgaaaggcactggtttgacattgcaggcggaattagctcagtaaatttaaataccagtactcctgtggctaacatacccaataacgcgcatcggttgttggtcgacggaacagatgaaccgcattacgggtacaagagactaagcgacttctatttcaaaacaaagccagactataagggaagattcaccgtacctgttctttgggacttggaaacatgcactatagtaaacaatgaaagcagtgatatcatcggaattatgaattccgctgcgtttgatgagtttgtcggcgaagaataccgtcaagtccgtctggtacctcggtctctagaggcacagattacagagttcaactcttgggtgtacgataaaatcaacaacggtgtatacaaggccggttttgcagaatgtgcagaggtatacgagagggaggtaacaagcctttttcaatatcttgacaaattggaaaatcttctggacaagaagtacacagatttggaggcggagtatggtaagaacaacaaggacaagatactagatcgctactttgccatcggagacactctgaccgaggcggacgtgagactctacccaacgatagtaaggttcgacgtggtataccatcaacacttcaaatgcaatctggccaccatcagagatgattattcccgtatacacacgtggctcaagaatatatactggcgccacgaagccttccagcgcacaacggactttacccacataaaactcggatatactcgctcgcagccacgggtcaacccgattgggatcaccccactggggcccaagcctgatatccgacctccatga

SEQ ID NO: 1728 - DNA, 1335 bp, Saccharomyces cerevisiae
atggagtatggacatcacgctagaccagattcaaaacgaccattggatgaaggatcaccagcagccgcaggattaacttctaagaaggcgaacgaagctttaacaagaaatagagaattaacaactgtattagtcaaaaatttgcctaagagctataatcaaaacaaagtctataagtacttcaaacattgtgggcccattatacacgttgatgttgcggattcgctgaagaagaactttcgttttgcacgtattgaatttgccaggtatgatggagccctcgctgcaataaccaaaacacacaaagttgtaggtcagaatgaaattatagtatctcatttaacagaatgcacattatggatgacgaatttccccccaagttatactcaaagaaatattagagatctattgcaagatattaacgttgttgcactcagtatacggcttcccagtttacgattcaatacaagcagaaggttcgcttacatcgatgttacttctaaagaggatgcaagatattgtgtagaaaaattgaatggactcaaaatagaaggttatactttagttactaaagtttccaatccgctggaaaagtcgaaacggaccgattctgccacactagaggggcgagagattatgatacgaaacctaagtacagaattgctcgacgaaaaccttctgagggaatcttttgagggatttggttccattgaaaaaatcaacatacctgctggacagaaagagcacagtttcaataactgttgtgcatttatggtttttgaaaataaagattctgctgaaagggcacttcaaatgaatagaagtttgttaggtaatagggaaatttccgtttccttggctgataaaaaaccattcttagaaagaaacgaagtcaaaagacttctcgcatcgcgtaacagcaaagaactagaaacactaatatgcttatttccactttcagataaggtgtcaccaagcttaatctgccaatttcttcaggaagaaatacacatcaatgaaaaagatattaggaaaatacttctcgttagcgacttcaatggcgccattattatatttagagatagtaagtttgcagcaaaaatgctaatgatactaaatggatctcaatttcagggaaaggtgatacgttcaggtactattaatgacatgaaaagatattataacaatcaacagaatcacagcatgaaacacgtcaaacctagttgtataaacatgatggaaaaaggaccaaatcttcaagtaaagaaaaaaattcctgacaaacaagagcagatgtccaacgacgattttcgcaagatgtttctaggtgagtag

SEQ ID NO: 1729 - DNA, 939 bp, Saccharomyces cerevisiae
atggataattgtaatgcctgggacaaattattgtctcagaatgaatccacaatcaacagcacagagactgctacgataacagcaatcatatattccccatcaagtaaaacactgcatcaatttataaatatctgttttccagagggaagcaattcaatactggataccactttgattaattacgccaccataggatggaccaacgacttaaaggaaaattattctgtcgatgtttacacgctaataagaaacactgacgatgcactagatcttctaaagccgtttttacaagaacatagttcgaaggttcgctggctcatattattagattggacactgaacgaccaaaagttgtggctgaatgaactatcctacgcattcaataaaattaagcaactgaatgacgataatgaattttctgtatggtgcttaaacagtggcgaaatattaaacttacaaagacacactacagtatggcagtcagtacatattgacttcattttgcaaacgttaagatcgttttgctattttaatgatagctcactattctatatatgcgaagaccataccgaagagaaacgagaggaagcacaaaggcttaaataccaagagcttctaaagcatttttgtgaagatagagatatgaaagatcatattgaaatggtcaaacgcagtgagatattaataccgaaggggtgcgattctattggattgataaaaacagtagacgaaagatttgagcctactgaggtgaaagagcaacactttttggcccgatatatggactttataccaacaattgataaaatcagagaagataggaaaacaacctctggtatcgaccttgataaactatatcctttagaagttttcaaagttaatattcaagaggaattaggcaaaatgttcgcaaaatatagggaaaattcgaggatttag

SEQ ID NO: 1730 - DNA, 3423 bp, Saccharomyces cerevisiae
atgggttcatctggttcaaaatcgaccacagccactaccacatcgcatagtagcacgactactactagtagcacaaccagtacaactacgcctactaccactagcacgacaagcacgacaagcactaaagttacaactagcccagaaattattgtcagtagttctagcacattagtttcttctgttgtacccgagtttacttctagctcgtcgctctcctctgatacaattgcctcaattctatcatcggagtcattggtttccattttttcttctctttcttacacatcatccgatatttctagtacatcagtcaacgatgtcgaatcatcaacctctggcccctcaaactcatacagtgcgctttcctccacaaatgcacaactgtccagctccactacagagactgactccataagtagtagtgctattcaaacatcttccccgcaaaccagttcatcaaatggaggtggttcctcttcggagccattgggaaagtcctctgtccttgaaactactgcttcatcttctgatacaactgcagtcacatcctccacatttaccacgcttactgacgtttcatcttctccaaagataagttcctcaggatcggctgtcacttcagttggtactacttccgatgcctcaaaggaagtttttagttcaagcacgtccgatgtttcttccctactatcaagtacttccagccccgcaagctctactatttctgaaaccctaccattttcctctacaattttatccatcacttccagcccagtaagttcagaagctccatcggcaacgtctagcgtaattagttcagaagcttcatgggcaacgtctagctcagtgagctcggaagctccattggcaacgtctagcgtagtgagttcagaagctccatcgtcaacgtctagcgtagtgagttcagaagctccatcgtcaacatctagctcagtgagttccgaaatttcgtcaacaacatctagctcagtaagttcagaagctccattggcaacgtctagcgtagtgagttcagaagctccatcgtcaacatctagctcagtgagttccgaaatttcgtcaacaacatctagctcagtaagttcggaagctccattggcaacgtctagcgtagtgagttcagaagctccatcgtcaacatctagctcagtgagttcagaagctccatcgtcaacatctagctcagtgagttcagaagctccatcgtcaacgtctagctcagtgagttcggaaatttcgtcaacaaaatctagcgtaatgagttcagaagtttcatcggcaacgtctagcctagtgagttcggaagctccatcggcaatttccagcttagcaagttctagactgtttagctctaaaaatacatcagttacttctactttggttgctacagaagcttcgtcagtaacttctagcctaagaccttctagtgagacattagcaagcaattcaatcattgaaagctctttgtcgacgggttacaattcgaccgtttctaccacaacatccgccgcatctagtacacttggatctaaggtttcgtcaagtaattccagaatggccacttccaaaacctcatctacttcctccgacttgagtaagtctagtgtaatattcggcaatagttctaccgttacaacctctccatcagcgtctatcagtttaaccgcatctccacttccatcggtctggtctgatatcacctcttcggaagcttcatcaatttcctctaacctggctagctccagtgcgccatctgacaataattccaccattgcaagtgcctcgctgattgtcaccaaaacaaaaaactcagtcgtttcatcaattgtctctagtataacttcttctgaaactacaaacgaatccaatttggccacatctagtacatcgcttttgagtaataaagctactgcccgttctttatcaacatccaacgctacaagtgcttctaacgttccaacaggcacatttagctccatgagctctcatacttcggtgataactcccggcttttccaccagtagtgcgtcactcgcaattaattcaactgtcgttagctcatcattggcaggttatagtttctcgacacctgaaagctctccaactacttccactttggttacttcagaggctccttcaaccgtttccagtatgaccacaagtgccccatttataaataattctacctctgctagaccttcgccaagtacagctagtttcattactgaatccacttcaagcatttccagcgtgccattagcgagtggcgacgtcacttcctcattagcggcccacaatttaactactttcagtgctccttcaacatccagtgcacaacttgtaagcaaatcaactacctctagctccatcctggtcacacccagaatcgacaggtctggaaattcctcaactgcctctagaattgcaacatcactccctaacaaaactacatttgtttcttccctaagttcaacatccgctcatgccagaaatatctttaattcaactgttctagctactgctaaacaaattgaaactttaacttcaacagtcaattgcagcaaccctactcctaattacaacataaccaaaacagtaatcgtaagtagggagactactgccataggaactgttacaagttgttcgggtggttgcaccaagaatagaaagtcaaccacacttattactataacagatattgatgcttctactgttactacttgcccagaaaaagaagtaacatcgaccacaagtggagatgaggcagaacataccactagcactaaaataagtaatttcgaaacgtccacgttttcggaaagttttaaggatatgaagacttctcaggaaactaaaaaagctaaaccaggatcagaaacggtgaggagctcgtcatcttttgtcgaaaaaacctcaccaacaacaaaggcttctccatcaacttccccatcagaaagtaaagctgcaggaaatacatccgttgcaacgaatgcttcaccatcaacttccccatcagaaagtcaaggtacaggaagcacatctgtagagggagcaaaaagcaagtcaactaaaaattcagaaggagtatcaaccactaaagcgaaaaacacatcaactgttgcgaaatcttcaactgaaagtccgatcgggaggggtgaaactacccttgaaacgataattgtctcgagccaaaagtcgctattaacatcacaactaagttcatccactgaaaaggtaaacagatctaccaccaaacctacggcagcgattcatggaacatcctcatccgctaaacaaagcacaacatatactgtcagcacggcaaaagaaaataccggtgcatccctgaacattaacatgaaagcttttgttattggcgctattgctttggtagcttag

SEQ ID NO: 1731 - DNA, 1917 bp, Saccharomyces cerevisiae
atgaatcaacctcaaattggcacttacaatgtaggtacacagttaacagttgggtcacatcaggttgagatcattaaatatctaacaagcggtgggttcgctcaagtatattccgcgttaatcaacccacctgacccacattctaattcaagcgttgcatgcttaaaaagagtcattgttccagacaaacctagtctaaacactttaagagctgaagtagatgctatgaggttgctgaaaaacaataggtatgttgtatcttacattgattctcatgcagctaaggcaatgttacataatggttcgtatgaagtattcgtcttaatggaatattgtgaaagaggtggtctcattgattttatgaacacaaggctacaaaacaggcttcatgaatttgaaattttgcaaataatgagccaagttactcaaggagttgccgctatgcatgctttgcaacctccgttaattcaccgtgatataaagatagaaaatgttcttatctcagccaataatgagtacaagctttgtgactttggttctgtatgcggtattataaggcctcctaggaattcacaagagctatcatatgttcagcaagacattttgaaaaacacaactgcacagtaccggtcgccagagatgattgatacatttcgcggtctgccgatagatgaaaagtcggatatatgggcgctgggtatttttctatataagctttgctattacacaacaccgtttgaaaagggcggtgatcttgccatattaagcggaaagtttgaatttccattgtatccgaactacagtgaacagttgaaaggcttaatacgtgatatattggttcaagatccgcgccataggcctaacgtttatcaactactgaagaggatatcaattatgcaaaatgttccgtgtccaataaatgacatacaagtggttcaggcgcccagtagccatttgaatttgaccgaacttcatcagctttcggcaacacaaaatattctaagcttgaactctcccacaaccatggaaaatacgatgccgaacgctacatttcaaatcagcatggctgataatactacaacagcacaaatgcatcctaatagaaaaccatcacaaatagcatatgacgctagcttcagtaattccgccaaaggttctcaaccactttttgacaaatcacagaatatgtaccacgcattggatcctccacttgttgaaccgctagcgagtagtgtttcaaataatgacaacgaactcaaggcaaattccgcaaccaagttaaagcaggcaattgtctctgaagcacatacttttaggcagaataattcaatagactttccactacaaaacataataccccagtacgaagattcttcttcctcttcagatgaatcttattctggagacgtagatgaattaaagaaaactcgatctctaggttcttattccacacgcggtaacataaaaaaaaaccaatccgtaaaggaatctcttacttcatcaagcctaccaggcactagcttcaccccaacgtctacaaaggtaaatttgaaacacgaaaattcaccttttaagtcgacattcgttaatacgattgataattccaaagacgatcttaacaaaccatcttatgaagatttggacgtatctaagcagaatttgaagaactccattcaacagcgtatgatcgataaactcaactcttctgaggagtcattcaacgctaggaaaatgtccaaggtcaagctgcatgagaaaggggagatagataagccaacaatgctgaaatcaagtggcccgatttcaaaagacaaaaaaacaaaacctaccccaccacctaagccttcacatttaaagcctaaacctcctccaaaaccactgctcctcgcgggacgaaagttatccttggataagtga

SEQ ID NO: 1732 - DNA, 855 bp, Saccharomyces cerevisiae
atgctttactccagagaatcaaggacaaccgtccttttccttgcgttggttacctccctaaccgtactttgtcactcggtcgatgtaacaactgtatttactacgtcaacaatcaccgaaatcacaactgtgactgccgcaccgcaaccacaaaacaaagcggaaaccgctttgaatactgctactaacataattcaaaccatgcagtttcttttcaactgcgcaccatttaagtggaagggtcctttgaaaataacttcttgtgcgctgaactttattgtcctactactcaccgcttggggctatcttctgaagtatctgcaggaaaataagctgaatagcgatgctgatatggaaaaaatggtaggactgggatttggggaaatggtcggcagaatcttcggaaagggtgtcgggaaagcttttactaaaatggatatcactcagaaactagtgtacccgttcgaaggaagcaaccggcagaaatgtctactcatgaccgtcggagaaaactcgatagtgccattccacgatttgtttacagagatatgctttgaccagtacactctggactcgctatcccaccacaaccatgggagtatttcgattttagatgctggatcagtgagcgccttggggttcgcggatatttcatcgaaaatgccctctgtaagcgaactatacacactttttggagattatacgatagaagtactgggcggcatcactaaactggcttcaactcttaacagagaggactggcagggggaaagaaacgggttcgcggttttatcgagagaccggcctaaccagacgttactaagcgtccatatgtactcttcaagcttgctatag

SEQ ID NO: 1733 - DNA, 663 bp, Saccharomyces cerevisiae
atggataaacatacagcagctattccaacattaactatcaaagtagtcttactcggagaatctgctgtcgggaagtcctcaatagtcctcaggtttgtatctgacgattttaaagagagcaaagaacctactattggtgccgcatttttaacaaagagaattacaagggatggcaaggtcattaaatttgaaatatgggatacggcaggccaggagagatttgctcctttagcgcctatgtactacagaaatgctcaagctgctttggtagtttttgatgttactaatgaagggtctttttataaggctcaaaactgggtcgaagaactacacgagaaggtaggacatgatatcgttattgccttggtggggaacaaaatggatttgctgaataatgatgacgagaatgaaaatagggctatgaaagcaccagctgtacaaaatctctgtgaaagagagaacctcttatatttcgaagcaagcgctaagactggtgagaatatttaccagatatttcaaacattaggcgaaaaagtaccatgtcctgaacaaaatacacgacaaagctctactcatgatcgcacaattaccgataatcaacgaatcgatctcgaatcaacgactgtagaaagtactagggagactgggggttgtaactgctaa

SEQ ID NO: 1734 - DNA, 2541 bp, Saccharomyces cerevisiae
atggaactagagcccactctttttggtataatagaggcattggctcctcaattattgtcgcagagtcatttgcagacatttgtatctgatgtagtcaatttactgcgatcatccaccaaatcggcaactcaattaggccctttaattgatttttacaaattacaatcactagattcgcctgaaacaacaattatgtggcataaaattgagaaatttctcgatgctttatttggaatccagaacaccgatgatatggtaaagtacctctctgtctttcaatctttgcttccatcaaattacagagcaaaaattgtccaaaaatcatctgggctcaatatggagaaccttgctaaccatgaacatttacttagcccagtgcgggctccaagtatatatacagaagcttcatttgaaaacatggaccgattttctgaaagaaggtccatggtatcttcgcctaatcgttacgttccctcttcaacctacagttctgttactttgagacagttgtcaaatccttattatgtgaacactatacccgaggaagatatcctaaaatacgtatcatatacattattagctacgacatcggcactatttccgtttgatcatgagcaaatacaaattccgtctaagatacccaattttgagagtggacttttacatttaatatttgaagcgggtttattatatcaaagtttgggttataaagtggagaagtttaggatgttgaatatatctccaatgaaaaaagcattgattatagaaatttcagaagaattacaaaactacacagcatttgtgaacaatctggtctcttcagggacagtagtgtcattgaaatcgttatatcgtgaaatatatgaaaatataataaggcttcgaatatactgtaggtttacagaacaccttgaagaattgagcggagatacattcttgattgaattaaatattttcaaatcccacggagatcttactataagaaaaatagcaacgaatttgtttaattcaatgatttctctttattatgagtatttaatgaattggttgactaaaggtctactccgagctacttatggagaattcttcattgctgaaaacactgatacaaatggtacagacgatgattttatttaccacattcctatagagttcaaccaagaaagagttccggccttcataccgaaagagttggcatataaaatattcatgatcggcaaatcgtatatcttcctagaaaagtactgtaaagaggttcaatggacaaacgaattttctaaaaagtatcatgtcctgtaccagagcaattcttatcggggaatatcaacgaacttttttgaaattataaatgatcaatattctgaaattgttaatcatactaatcaaattctaaatcagaagtttcattacagagacgtggtatttgcgttaaagaatattcttctcatgggtaaatctgattttatggatgctcttatagaaaaggccaatgatattctcgcgacaccatcggattcattgccaaattataagttaacaagggttttacaggaagccgtgcagctttcttccttaagacatttaatgaatagtccccgtaatagttctgtcattaatggattggatgcgagggtactcgatcttggacatggatccgtgggttgggatgtttttactttagattacatcctctacccccctttgagtttagtattaaacgtaaatcgtccttttggcaggaaagagtatctacgaattttcaattttttatggagatttaaaaagaacaattatttctatcaaaaggaaatgttgaagagtaatgatataatcagatcattcaagaaaatcagaggttacaacccgctcatccgtgatattatcaataaactttctagaatcagtatacttagaactcaattccagcaattcaactcgaagatggaatcttattatttgaactgcattatagaggaaaattttaaagaaatgacccggaaactgcaacgcacagagaataaaagccaaaaccaattcgacttaattagattaaataatggcaccatagaattaaatgggattttaaccccaaaagctgaagtactaacaaagtcttcaagcagtaaaccccaaaaacacgcaatcgaaaagacgctgaatattgatgaattagaaagtgtacataacacgttcttgacgaatattctttctcataagctttttgcaactaacacaagtgaaataagcgttggtgattattctgggcaaccatacccaacttcattggttttacttttaaattcggtttacgagttcgtcaaagtttattgtaatttgaacgacattggatacgaaatcttcattaaaatgaatctcaatgatcacgaagcatctaacggattattgggaaaatttaatacgaatttaaaggaaattgttagccagtataaaaattttaaagacagactgtatatttttagggcagatttaaagaacgatggcgatgaagagcttttcttattgagcaaatcgctccgttaa

SEQ ID NO: 1735 - DNA, 897 bp, Saccharomyces cerevisiae
atgatgaataaagtagatcaaatcatcggttacaaaaagtacgaagtgaaactaccaaaagatcgacaagtaaagaaaaataaatcaaaaggtggaaatgttgatcaaatagatactaagagggaaaaggataaaatgagagcttttggtgaagaaaggaaaaagttcttagataaaatggctaaaaacaaaaaaaaaaatacaagtagaaaagatagagagaagccaaaagaagtagaaaaagaaaactacaaaagagaagacaaaaggctaaaagaacagaaaaaattatcactggcaaaagaatttcgtttcaaagaaccgaattcagaagccattaatcagaacacagcagctgaaaatggtaaacctaaaccacagactggactagattttgacatagaccatcaaaccgtgtccaagatcatgatagatcaggctattcaaacatctagtcctcttaatgtccaactcacggaacttttcaatgataacgtcctcgacgtctcgaaagatagtcagtttgtccttcaagacatggagttcacctcctgggaacgacgctggtcaaactgcagcacgaccagtaatgcgactacggtctcatcagttcctgatcccaaatataatatcaactacaacgacataacctccttcaattcagtagcgctaattaccgaagatcttaacatatctgcatcatctaatggtctgcatgagagaggtaaaaagctactgcagcaagagatggaatactcaaacaaggtcaaaaatgtcaccatcgggcttgaaagattgtgtatggatgaaaaaccagtcccagatgcaggaataaccatgcaacaagcgtcgcgctggtcagaattccccacttgttgcgatcaagctgctatttag

SEQ ID NO: 1736 - DNA, 903 bp, Saccharomyces cerevisiae
atgcgtttgtttgaaaatagtaaagatatggaaaaccggaagagattgttacgtgccaagaaggctgccggcaataacaattgttttgaatgcaagagtgtcaatccacaatttgtttcttgcagcttcggcatatttatatgtgttaattgcgcaaaccttttgagggggatgggtacgaacatattttgtgtaaagtcaataacaatggataattttgaagaaaaggatgtcagaagagtagagaaaagcggaaataacagattcggttccttcttgtccaaaaatggtattttgcagaacgggattccattgcgtgaaaaatatgataatttgtttgctaaaagttacaagaggaggctggccaatgaagtgcgcagtaatgatattaatcggaacatgtatttgggattcaataatttccagcagtatacaaacggtgcgacgagccaaataagagataggacgttgagggaaatatctaataacagcaatgcttcggaaggggcggaatttgtactacctgagaaggtgttaggctctgacaattttcaagactgcgaaagatttcccgcttgtttgagttccgaaagaaacctggacgagaataacgttacaagtgctacgagtacgttaacaattgaaaaatttcaaaatgaccccataggaaccatttctagaagttggcagttgctttcagatgcattatacaaatcatacgaagactttaaaggctcggttgttcagccaacgattgaaaacattcaacaaaggaatttgccgaatgatatcaagagatcattcgtgcactttaacgagaagttgcatgaaacgccccatttaccctcgccagttttttcttgttttactgggggagacattctccctccagaattcaattag

SEQ ID NO: 1737 - DNA, 813 bp, Saccharomyces cerevisiae
atgagtaaccaacacagccctcagccattttgtttggacaccaaattggtgaaactattagaagagctccaggagggaaagcaattcaacaataaaaacatattcccggaaaaagcattatatttgaagctcgctcttgattattctttcttcagaaagaatttactagagttttgcgtccaccttgacaagataaaaggagtcattagaccaaactatgacactatatatattttgtgcctgttggaggtggatctcctcaatctggtatttaccgacaatatattggaaatatgtttgcccaggtttgtttcaagggaggacttgagggtttttaataatactttttacacatatcacgataaccgcctacgtattctccaagaagacttttctcaattgttcaaaaaaatcaaaactaaggcttctgtactatgttttacagttgaggaaatttttctgacaaaccaagaaattttacctcaaaactcaacagtggcagaactgcaaaagagcactaataaagtacagacaaatgggccgcaacggcacgatttcatagtcactctagaaataaaactgaacaaaacacaaatcactttcctcattggagctaaaggaacgagaattgaaagcttgagggaaaaatcaggcgccagcataaaaataatacctattagtgataaaatgactgcacatgaaaggaaccaccctgaatctgttcaacaaacaatactaatttcgggtgacttatactcaattgcattagccgtcaccagtatagagtctgcattaattactttggatttatag

SEQ ID NO: 1738 - DNA, 1281 bp, Saccharomyces cerevisiae
atgacaggagaaaaaatacttcattcgcagttgttaaccaacagcgacatgtctagcgggaatgtccaccatacgaaaccgatgatgtacaacgtaaccctgccttcctacaacagcagtagtataggtccagtcgataatttgaaaataaacgagagacctggctctcatgatcattccatgagaagtgaaatgtcatccaaaaactccggaagcgattttatgccacaatctatttcacgttccgaaggtagtgtctaccaggtcaagatagatcgtggtgactccccgaatacagaaggattcgactttaaagttaatgcaagagatctgctgttacttcgaatgtcctgggatatcctcctcagggagtatttaacacctaaagaattaaaagtttttcaagcacttctgtattccaataaacatattacttcaacagaaagaccctatttgaatactgctcctgacggtatgatttccaaaactattgaccctactgccaggccacgtaaaacaaaacaaagggacaatgataacaaggttgatactgcactattttgttcacagttttatgacaatttgattgcaatggatcccttgttagaagaatattttccatcattaaaacatcaagcagtttcgttctgtaaggtccttgattctgctattgacaaccttgaaaacgttcatgtcctagatgattatattgtgaaattaggaaaacgccattccagaattctcggcatcaaaaccgttggtttcgaagtaatgggaaaagcatttatgactacattgcaggacaggtttggatcttttctcacactggaactcaaaaatctatggggacaactttactcatatttggcaaattgtatgattactgcagggaaggacccaatggaaaagattcaaccagatttttcgtataatggtgactctgtggttttaaatttttccattcccaaacttgcgatgcatgatataagtacagttaacaagctacaaatggtgaaaactaaaaacgctactatacctcataatataacacaagtaccgacaaataaaattcctacagaaatactcttagacaattcttctactccaataaaaagcgaccgtgaatcgacgcctccaatctcaccaaagggctctggaagtacaaaaccaagcatcggtagcagtaccgtcgtggaaagtaataccaagaaaaataattatgatgaaaaaatccatttattgcaaaaaactgctcagcagaagaactgctcgattatgtaa

SEQ ID NO: 1739 - DNA, 1629 bp, Saccharomyces cerevisiae
atgaatagcagtctgcaagttggcatcggaattgatgtaggttcatcaagtgctagaataggtgtatataattactacaatgatgcgctgttagaaatggcgcaggaaccagtcccatactaccaggattcttcaaagaagtcatggaaattctggcaaaaatcaactgaaataattaaagcccttcaaaagtgtcttcagaaactgaacattagagaatatgaggtaaagtcatgtggtgtttctgcaacgtgttcattagctattttcgaaagggatcgcacaagtaacatgctgataccgtatccaaatgaagataatgtcatattttggatggactcttctgccgtaaacgaatgtcaatggctaaatatgcaatgtccacaacagcttttggattatttgggaggaaaatttgtacccgaaatgggcgtccccaaattgaagtactttttagatgaatactctcatttacgagacaaacattttcatatctttgatcttcatcaatacattgcttatgaactgagccgcttgtatgaatggaacattgaaggacttttgggaagagaaaatcttaatggtataggcaatgatggagaggtatctggctggtcatcttcattttacaaaaacattataaatttaccatctaatgtaagcattggaaccactagtcttgttgccaataagcacatttcgacaactgtagttcgcagttgtattgacagttatgcaagttggttcgcagttgcttctcctcatttggaaacatcattgtttatgatagccgggacttctagctgctacatgtatggtactaccatctctgatactagaattcctggagtatggggaccttttgatactatacttgacaacaggggtgatttttctgtttatgctgcgggccagtcgtgtactggtaaattaattgaacatttatttgagagtcatccatgtgccaggaaaattctgaaagatggtgctgatatctatcaagtactcgaacaaaccattcgtgacattgagaagaacaatggtctctcaattcatattcttacgaaagatatgtttttctacggtgattacgagggaaataggactccttttgcagatccacggataaagggttctttcattggcgagtccaccgatacatcaatgttgaatcttacatataaatatatttgtatcttggaatttttatcatttcagacaaaattgataattgatacatttcaaaatgaaaattcaaatatacatatcaaagagttaaggatatctggtagtcaagcgaaaaatgaaagactattatcattgatttccttggttaacaacggtgtagcaataattaaacctaaagagaatgtcgatatgatgggtatcaaaggtgcttacgtgcttgctaagtctgcaaaggaaaagaaacaactagctgacgttataacagagagagatattagtaatgatagcgaaaaattcgaatctcttgctgaataccgacttggaaacgatagcatattactaagaaaattgctttgcgttaaatatcatatacacttagatatggctaagcaacagaagcgttatcacaaactcgtcgacgaagtatttcagcacctctaa

SEQ ID NO: 1740 - DNA, 597 bp, Saccharomyces cerevisiae
atggtgagaaatcgttttataagaaaaatgaaaaaaaacttgtttaaatcaaatcacttatcatatttgaagagtaaatggaaagtaaagatcactggacaaataaaaatggattttgataatttactaaacctagaagaacagtattaccaagaaggttttctggagggccagaatgagaatataaagcagagctttctagaaggtaaacagtatggtttacaagtgggattccaaagatttacgctcctgggacaaatggaaggtttgtgtgatgttatagaatcgtatggattgcatagtccaacactagaaaagaatatacataccattcgtactttaatgaaaggtttgaaaatgaataacgatgatgaaagtgtgatggaatttgagagggtgttaataaaattgaaaaataagtttagaaccattctaataactcttcatcgattagttaaagataaaagaacccccaccgtgacatttgaagtctttgaagacgtttcaagggccattgccggagaaattagaggttttgtagaaaatgaagacatcgcaaagaataagacaaaacaaaatcaggctcaatcctggtaa

SEQ ID NO: 1741 - DNA, 1623 bp, Saccharomyces cerevisiae
atgactgctcagattccgtatcaacatagctcgggatacatctctcattttcacaataatgagcttgatgcaggcaggggaagggattataatgtaaccattaagtatctagatgataaagaagaaaatatagaaggccaagcagcaaagattagtcacaatgcgagtctgcatattcccgttttattgtgcttggtaatctcgcttggtggctttatttttggatgggacattggaaccatcggtggaatgacaaatatggttagctttcaagaaaaatttggcacaactaatattatccatgacgatgaaacaatttttgtatctactaagaaacttactgatctgcaaataggcctaattatcagtatttttaacatcagttgtggcgtaggggctttaactctgtcaaaaatcggtgattggattggtaggaaaggtggtatatggtttgccttagtagtgtactgcatcggtataaccattcaaattctctcctatggaaggtggtattttttgacattgggaagagccgtaacgggaatcggtgtgggagtaaccactgtcttggtgccaatgtttctctccgagaattctccactaaaaatcagaggctccatggtatctacgtatcaattgattgtaacatttggcatactaatgggaaacattttaaatttcatatgcgaaagatgttataaagatcctacacaaaatatagcctggcaattgccattgttcttgggatacatttgggcaattataattggaatgtcacttgtttacgttcctgaatctccacagtacttggcaaaaatcaaaaatgatgtgccctctgctaaatactcttttgcgaggatgaatggcatccctgcgacggatagcatggtaattgaattcatcgatgatttgctggaaaataactataataatgaggaaactaacaacgaatcaaaaaagcaaagcttagttaaaagaaacacatttgaatttattatgggaaagccaaagttatggttgagactgattattggtatgatgataatggcatttcaacagctgtccggaataaattatttcttttattacggaacgtctgttttcaaaggtgtcgggattaaggatccttatattacttcaatcatactgtcaagtgttaacttcctttctacgatattaggcatatattacgtggagaaatggggccacaagacatgtttattatatggttcaacaaatttattattttatatgatgacatatgctactgtggggacatttggaagagaaacggacttctcaaatattgttttaattatcgtgacttgttgttttattttttggtttgcaataacattgggcccagttacatttgtactagtgtccgaattgttccctctaagaacgagggccatatcaatggctatttgcacatttatcaattggatgttcaatttcttaatatcacttttaacaccaatgattgtatccaaaattgatttcaaactaggatacatatttgctgcttgcctattagcgttgataatattcagttggatactagttcctgaaacgaggaaaaagaatgagcaagagatcaataaaatatttgaaccggagtag

SEQ ID NO: 1742 - DNA, 441 bp, Saccharomyces cerevisiae
atgatagatttatacaattactctaacttagaaggtttactagacggattaacggacttgaatcgaattccgaaggaatactccgcagtattggagccatattttcagaatatagcaagaaatgcacatttaaagtctagagctctaaaaatttgtcgttctaatttccataaatggaacgaagaaggtgcgaagacagtcaatccggaaattataagaagatgccttaacctgtggtatgttttgaagggcaaggaatataaaaagttgaaggatcctccgcctgctgataatatcattaaggatgagattgatgtctcatatgttaagaatttgaatgtagtcaggttggaatttgacgaatttggtaaactcataagtaatccattagagaatttgatcttggaagaggtcgaagtgaatgatttcatacaagaataa

SEQ ID NO: 1743 - DNA, 1929 bp, Saccharomyces cerevisiae
atggacaagaagaaggatctactggagaacgaacaatttctccgcatccaaaagctcaacgctgccgatgcgggcaaaagacaatctataacagtggacgacgagggcgaactatatgggttagacacctccggcaactcaccagccaatgaacacacagctaccacaattacacagaatcacagcgtggtggcctcaaacggagacgtcgcattcatcccaggaactgctaccgaaggcaatacagagattgtaactgaagaagtgattgagaccgatgataacatgttcaagacccatgtgaagactttaagctccaaagagaaggcacggtataggcaagggtcctctaactttatatcgtatttcgatgatatgtcatttgaacacaggcccagtatattagatgggtcagttaacgagcccttcaagaccaaattcgtgggacctactttagaaaaggagatcagaagaagggagaaagagctaatggccatgcgcaaaaatttacaccaccgcaagtcctccccagatgctgtcgactcagtagggaaaaatgatggcgccgccccaactactgttccaactgccgccacctcagaaacggtggtcaccgttgaaaccaccataatttcatccaatttctccgggttgtacgtggcgttttggatggctattgcatttggtgctgtcaaggctttaatagactattattaccagcataatggtagcttcaaggattcggagatcttgaaatttatgactacgaatttgttcactgtggcatccgtagatcttttgatgtatttgagcacttattttgtcgttggaatacaatacttatgcaagtggggggtcttgaaatggggcactaccggctggatcttcacctcaatttacgagtttttgtttgttatcttctacatgtatttaacagaaaacatcctaaaactacactggctgtccaagatcttcctttttttgcattctttagttttattgatgaaaatgcattctttcgccttctacaatggctatctatggggtataaaggaagaactacaattttccaaaagcgctcttgccaaatacaaggattctataaatgatccaaaagttattggtgctcttgagaaaagctgtgagttttgtagttttgaattgagctctcagtctttaagcgaccaaactcaaaaattccccaacaatatcagtgcaaaaagctttttttggttcaccatgtttccaaccctaatttaccaaattgaatatccaagaactaaggaaatcagatggagctacgtattagaaaagatctgcgccatcttcggtaccattttcttaatgatgatagatgctcaaatcttgatgtatcctgtagcaatgagagcattggctgtgcgcaattctgaatggactggtatattggatagattattgaaatgggttggattgctcgttgatatcgtcccagggtttatcgtgatgtacatcttggacttctatttgatttgggatgccattttgaactgtgtggctgaattgacaagatttggcgacagatatttctacggtgactggtggaattgtgttagttgggcagacttcagtagaatttggaacatcccagtgcataagtttttgttaagacatgtttaccatagttcaatgagttcattcaaattgaacaagagtcaagcaactttgatgacctttttcttaagttccgtcgttcatgaattagcaatgtacgttatcttcaagaaattgaggttttacttgttcttcttccaaatgctgcaaatgccattagtagctttaacaaatactaaattcatgaggaacagaaccataatcggaaatgttattttctggctcggtatctgcatgggaccaagtgtcatgtgtacgttgtacttgacattctaa

SEQ ID NO: 1744 - DNA, 2682 bp, Saccharomyces cerevisiae
atggctggacaccatcacgaacatgaacaagagcgcgaccacgagcaagaacacgaacacgattcccttcaacggcctactactggatcagaaaggactagaagtatatccttttcgaagttgcttacgcggtcatggaaaaggaatgcgagttcatcgaacaacatgagtgtgtctagcgtgaatctgtattcggatccagagaactcgagagaatcagatcacaataatagtggctcagagggccagtcttcacgattttctaaattgaaaagtatgttccaatccggcaatagcagcaaaaatgccagtgcccataacagcagccaaagcagtcttgaaggtgactcggcgtcatcttcatctaagttaagatacgttaaaccaatgacttctgttgccaatgcttctccggcatctccaccactttctcccacgatcccggaaacggatgttcttcaaacaccaaagatggtacatatagatcaacatgaacatgagcgtgaacactcgaattgcgggtctccaataatgctttcatcatcctctttcagtcctactgttgccaggactgggacgggtaggagaagatcaccgtctactccgataatgcccagtcagaactcgaataactctagtagcacctctgctatcagaccaaataattatcgtcaccattcaggatctcaggggttttcttccaacaatccattcagagaaagggcaggtacggtacgcagtagtaacccatattttgcataccaaggtctaccaactcatgccatgtcttctcacgacctcgatgaaggattccaaccatatgcaaatggcagcggcattcactttttgtccacccccacctcgaagacaaattctttgacaaacaccaaaaatttaagtaatttatcactaaacgagattaaggaaaatgaagaagtgcaagaattcaataacgaggatttcttctttcacgatattccgaaagatttatcgctcaaagatacgctgaatggctcacccagtagaggtagttccaagagccccacgattactcaaacgttcccttcaatcattgtcggatttgacaatgagtacgaggaagataacaacaatgataaacatgatgaaaaggaagaacaacaaacgacaaccgacaataaaacgagaaatctttcacctaccaaacaaaatggtaaagctacccatccaaggataaaaatacctttaagaagagcagcttcagaaccaaacgggttgcaactcgcatctgccacatcgccgacatcttcttcagcaaggaaaacatcagggtccagtaatataaacgacaaaatcccaggccaatcagtgcctcctccaaactcatttttccctcaagaaccctctccaaagatttctgattttccagaacctaggaggtcccgacgtttgagaactaaatctttcagcaataaatttcaagatatcatggtgggaccacagtcttttgagaaaataagattgctgggccaaggtgatgtaggtaaagttttcttagtaagagagaaaaagacgaatagagtgtatgctttgaaagtcttgagtaaagacgaaatgataaaaagaaataaaatcaaacgtgttctgacagaacaagagattcttgccaccagcaatcatcccttcatcgtcacactataccattcgttccaatctgaagactatttgtatctctgtatggaatactgtatgggcggggagtttttcagagctttacaaacaaggaaaaccaaatgtatatgtgaagacgatgccaggttttatgccagtgaagtgacagcagcactagaatatttacatctgttgggttttatctatagagatttaaaaccagagaatattttgctgcatcaatcaggccatatcatgctttctgacttcgacttgtctattcaggctaaagattccaaggttcctgttgtcaagggttccgctcaatcaacccttgttgataccaaaatatgctcagatgggtttagaaccaattcctttgtcggaactgaagaatatattgcccctgaagtcataagaggtaatggccacaccgctgcggtcgattggtggacgctagggattttgatctatgaaatgttatttggtttcactccattcaaaggcgataacacaaatgaaacttttacgaatattttgaaaaatgaggtcagttttcccaataacaatgaaatctccagaacttgtaaggatttgatcaaaaaattactgacaaaaaatgaatctaaaagactgggttgcaaaatgggcgctgccgacgtgaagaaacacccctttttcaagaaagtccaatggtctttgctgagaaatcaagaaccgcctctgataccagtgttatctgaggatggatatgattttgctaaattatcatctaataagaagagacagactagtcaagacagccataaacatctcgatgagcaagagaaaaatatgtttgaagaacgagttgaatacgacgatgaagtctctgaagatgatccattccatgacttcaattcaatgagtttgatggaacaggataacaattcaatgatttatggtaataccaattcttatgggaaaattgcatacactccaaactccaacagatcgaggagtaatagtcatcgaaccttttttaagagataa

SEQ ID NO: 1745 - DNA, 984 bp, Saccharomyces cerevisiae
atgtcaattgcacaagataggggtatcgttttcaagcttctatcaatttatcgagcagcggctggtatcttcatggcgttggcacaattaattgtcatattttttggatattgcgattttaaaattaaagggtatcgcattgcctcttacaatgcaccgacatttgcctccagtttcataattcttgcagtatgccttttattagttgtcgttctggaaaatcctgaggttaaagttacaaattcggaaaatagccttttcagtgctctgaaacaattttttagagtcgaaagaaaaaaactcatctcctgcttgattttactatggagcatgttcctatcgtcatttattatgagcgaagtagtttattttatgccactattcctgacgctccacgttaactgggacaccaagtttcaaggcatagcgtttatggtcgcatctatacttggtgtgactggaagctatttcgctccaaagttaataaacgtcgggtgctcctgcggcagagccaaagatggcggattagaagagtcagatacaactggaagtgagaccgttgaggtaaagaaaaaagattcgctgtacagcggtcaagtttttctgtccatctttgcattgtttgtttcattgctgggacaagcttttatgattggagcatccgaagccttgaagcataaatcaatgccacccacaaattctggtatatttttttcagctgggatgtcgattacattgttagggtacaactttttggcttcgagcattccagcccttttttccatgtacatcgaccccaaactcaaggtccagttgatgccttcaattggagcaatctctgggattggtaaactggtggcaccgattgtattagcagctctttatggcacaagattggggctttcaattgcggttggatttggtatgattttggtagctgtttcaattccaccgcttatttggctcaggaaaaaaaggtgttag

SEQ ID NO: 1746 - DNA, 1824 bp, Saccharomyces cerevisiae
atggacagatctaaggacgctagaaagagatctattagtttggcctgtactgtgtgtaggaaacgaaagttgaagtgcgatgggaacaagccatgtggaagatgtataaggctaaatacaccaaaagaatgcatttataatattgataaaaggaaagacaagagaaaaatcaaaaacgggtcgaaggtttttttattcaagaataatactatcgataacgggaataactctatactagagaacaaaggactaaatgaagacctttcttctcatatatatgagaaagaagcgccaaaattcgattcagatattgatatatcaagatttggcacaaatgatgctgtgatttttaataatgacgggtgggacacttctcttccgatcgattttgatttcgatgagtttaacactgagacaacagatttcgatgactttttaaaactattaggcgataattcaccttcaaaggaacaaaaaagtctttcctattcacctactgctacaggcttaagcggtgtggttaaagaaactgagagcgaagataacgctcctacgaggtctcggctaatcgatgtcttgtttgagaacaagcttcactccgtaccaggaatatcaaaatggcatctatatgagctggaatcccaatacccaaatttggaatgtacagaaggaaatagtgatgaaaagtttttactttcaactgtattgtgcctggggtcgttgaccatacgaaaaagggaactattgaatcattcgaacatagacaatcgtccacttttgccggagaatagtatttcaaaactgaccactgatgcttttaagtactataatgctgcgaaaacgcttgttcccgacttgttatctcatcccacaatcgatggattttgcggcctcgttctaatggcaaatttcatgacgatgatgatatccttagagcaccaattatatttgagtataaatgctttacaacttgctgtggctttaaacttgaacaacaatacaaaatgcaaggaattacttgagtcgaacagcgacggaattggtgtgatcttgcttttttggaacatttggtgttcttcttgcatgttggcaacaattcatggaaaaaatccttttatcactttggaacaaattacaacacctctgccgtgtgaaatatccccccgcaataaaactaataaacttttgatagatttcatgcaaatcagaatcaagctagccactctacaaagtaagatttttcaacggctatatacttccagcaccgcaaacgaggtaccattcgtaaacttagaaagagaatttgaggaggtttcactccagattaccaggttaaaaggctttccgatattcgaagaacatcttttttacaggagcagagtcttaatgttagagctatcatgtttaagagctcaagcttcttttctattatatcgtccgtatctgatcactggagaatccttacaagcagtaaccatggcaaaatcaataattcacgaaatatggagtcaatacactaaacagtttcccgataacgaaaaggaaaggcatgaacgtttggattggaatttttgttatcctttaagaacagcgtcactgacattatgtatttcatgtattatactcctaaggtataagcaggtggtgcagttccttaaaggtactgaactatttgaatacattctagcattggaaatattgcaagatttagttcaggtacttcctattgaacaaaaccttattgatataatcaaatatccgatcagtccagtacagctgagtggtgatagctttgtcgaattttggggtcgcatactttactaa

SEQ ID NO: 1747 - DNA, 873 bp, Saccharomyces cerevisiae
atgtcaaatatcattgcaagatttcacaagattcaagttcaagacggtgtaaaggtttggtaccgtgaggccggtgcagcaggtaaccccacaattttattgctacatgggttccctacatcttccaacatgttcaggaacctcattcccttactagctggacagtttcacatcattgctccggatcttcctgggttcggatttacggaaacgccagaaaactacaagttcagctttgattccctttgtgaaagtataggatatttgttagatactttgagtattgaaaaatttgccatgtatatatttgattatggatctccggtaggttttcggttagccttgaagtttccctccagaattactggcattgttactcaaaacggtaatgcttacgaagagggtctcgatgaccgcttttggggtccgttgaaggaatattggaagtcatatcaaagtgatccggtatttgttaaatcccttatcccgtaccttgaagatccagctaatgtcatatgccagtaccatgatggagtaccagctatcgaatctgttgatcccgccgcttatacgcttgatattgcgctaattcagcgtaccggccagaccgatattcaattgagattatttttcgattatcagaataatataaagttgtacccagcctttcaaaagttcttgagagattcaaagattcctgtgctagttgcatggggtgcgaatgatactatttttagcgttgccggggctgaagcttatcggaaagacgttgataatttaaaggttgtttactatgatactggccattttgcgcttgaaactcacgtagttgctattgccgaagaaatcatcagtatgtttgcagaaaattaa

SEQ ID NO: 1748 - DNA, 1311 bp, Saccharomyces cerevisiae
atgatattactccaagtcatatgcacgatttggacatgtctctttattccgttactcaatgcagaggaattcgtccccaaagtaacggagactctttcagaatattcatttagtctagagagctttgacgattccaacagtttaatcagattagataatcaagtcgtgtggataagttccgattctggagaaaattgggaagcggtcaaagaaattgaagggcatattctcgaattaattgttgatcctttgcatggacaggacagggcttttgtttcgatacatttatcacccaaattttacgtcaccgatgatcgtggaaaatcatggagggctctgactatacccgtctctgaaaactgtcgtttgggtacttcttgctctatagctacccatccgacagataaaaagtaccttattgcagattgcccttgctttataaacgacaatggttatatccaaatacaaaatgaaacttactttaccaacgatggggaatccttttacaatatcgaaccttccttgaaaaagaaagaagatgaccatataacaagttcaagctgcaactttgtcaaatctagcaaggattctgatattgagggtaacgacgcttcgatactatgtttgttctcgaaccatggttacgatagcgatcgtcacttaagtgccgcatatacacaattagccttaagtactgatggaggtaaaactttcaaaaaatttgatgagtttaatgataaaattatttatcaatacaagatattaaaatcacatataatcgtttcgacacaagatgatagatacaatgaaatgtcacccatggacatctggatatccaatgatgcgtctacttttcaaaaggcacgtctacctgctcaagtacggcacgtccatatgtatggaatttatgaagattctattggaagaataatcattcctatatctacgatattcacagatgaaaaaaacgaccaaccagctccctcagaaattttaatatcagattctcaagggttgaaatttttacctgttgaatggacaataaatcctcactttggttatattgatattgcttctcctcatttcttagaaggaacaataattggctcgtttcatccttcctttgactactctcataacaaaggaaaatataataaaaagatagccagatatgaaactaaaatatctgttgataacggcctcacatggtcaaatttgaaagtggttgacgaggaaaatgcagattcattcccttgtgatatcactaggcctgaaagatgttcgctccagaaccctttttatagtatctaa

SEQ ID NO: 1749 - DNA, 1470 bp, Saccharomyces cerevisiae
atgcaagaatcaaaagaaccacaaaataaatttgaaggttgtcaaagaatatcttcatcttcatccacactctttggaggaacctccttcgaggaaccgagatgtggaacatcccaaggaaaggaagaagacgctttcgcatgcaataatggagatcactgctcgagcataacgaatgttcaggaagatgactttgtccttccagaactattgccgtcattcgaaatgtatgaaaatttgctcagcaatatacctcaatctagtttcgatacatactttccggagaatccacctttttatgaggttgcttcccgaaatcagagtattccttcggaaggtgagtctgggaatgatatgcggattcttaccggtgatatcgttggcccagataatcatgaagtgactgttgatggccgccggtttgcttccggccctgctgagtctcaaattcgtaattatgatgatactaaaggtatcccagttgagaatatatacgcattgcctaggattaaaacccccatagcgactgaattgtacgtcacaaagacggctccaaaatttggacagcttcctaaacacgagagcatgctaagggaatacacctctggggatataattcacggttatttcactgtagaaaacaaatcaaccaaacctataaaattcgatatgttttatttaactttggaaggtacgacaagttcaaaaacacagtcaccctttggaatccaaaaaacgacagaaagaattttgagaatggtagatatggcagcgagttggtcatataatcatgaagacgtgaacacgggggaagacctttgtggattttttgactccattgataaaacaagctttggattaccgaatagcaggatactaaatccaggtgataaacgtaagaaatttttcacttttaaaattccgaaccagttattagacgtaacctgtaagcacggtcacttctctcactctcttttgccccctacattagggtttgatagaccatcgagttctcatccagagctttctactctaaaattttcggagagtttaggttatggtcgtttgtcagaaagaggttcctcactatggttaaacgacagttctagtggcagcttaataaattactcaataaatgctatgatagtaggcaaagacgtagcttctgggcgtgtttgtttaatgagtgaaaaaaagtatagcataaggatagttccatttggctttcaaaacaatccaattagtagggagaagtgcctcaaagacttagaggatttcgatattgaaattgcaaacaggcttggaatgatcgaaaaagtcttttctaaaatagagcgagcgattcccattcataaggaggacatacaggaggcgaatcgctctgatcaactatcacccctaagaggtaagtatgaatggaacgcggtagctggaaatactgaaaacggaacacttaaaaagaaacactag

SEQ ID NO: 1750 - DNA, 4002 bp, Saccharomyces cerevisiae
atggaatgcgtttcagtagaaggtttggattcttcttttttggagggccaaacctttggcgatattttgtgtttaccatggacaattatcaagggtatccgtgagcggaagaatcgcaataagatgaagatcattttgaagaatgtcagtttgctggctaaatcaggagagatggtccttgtcctaggaagaccaggcgctggctgtacatcatttttaaagagcgctgctggtgagaccagtcagtttgcaggtggtgtaacaacaggacatatatcgtacgatggtatccctcagaaagaaatgatgcaacattacaagccagatgtaatctataatggtgagcaagatgttcatttcccacatttgacagtaaaacaaactctagattttgctatttcctgtaagatgcccgcaaaaagagtcaataatgtaacgaaagaagagtatattactgccaatagagaattctatgctaaaatttttggtttgacgcatactttcgataccaaagttggtaacgatttcatcagcggtgtatctggaggtgagcgtaaacgcgtttccattgctgaagcattagcagcgaaaggttcaatttactgctgggataatgctacaagaggtcttgactcttctaccgcgctagaatttgcacgagctattcgtactatgacaaatctgttaggtacaacggcccttgttacggtttaccaagccagtgaaaacatttatgaaacttttgataaagtcactgttctatacgctggaagacaaatattttgcggcaaaactactgaagcaaaagattattttgaaaacatgggttacttgtgtccaccgagacaatcgactgctgaatatttgaccgcaattactgatcctaatggtctgcacgaaataaagcctggctttgagtatcaagtacctcataccgctgatgaattcgaaaaatactggcttgattccccagaatatgcccgcctaaaaggtgaaattcagaagtacaaacatgaagtgaatactgaatggaccaaaaaaacatacaatgagtctatggcacaagaaaagtcgaaaggtacaagaaaaaaatcttattatacggtctcttattgggagcaaattagactttgcactattagaggttttctaaggatttacggtgataagtcatacaccgttatcaacacatgcgctgctatagcacaggcttttatcactgggtcattgttctaccaagcaccttcttcaactctaggggccttttctagaagtggcgttctgtttttttccctcttatattattctttgatgggtttagctaatattagtttcgagcacaggccaatattgcaaaaacacaaggtctattcactatatcatccctcagctgaagcgttagcaagtacgatttcttcttttccattcagaatgattggtctaacatttttcataatcatcctgtacttcttagccggtttgcatagaagcgccggtgctttttttactatgtatttgttattgacaatgtgttcagaagctattacaagtttgtttcagatggtttcatctttatgcgatacattgtcccaggccaactccattgccggtgttgtgatgttatctattgccatgtattcgacgtacatgatacaattaccttcaatgcatccatggtttaagtggatttcgtacattctacccattagatatgcatttgaatcgatgttaaatgcagaatttcatggaagacatatggattgtggtggcactttggttccttctggacctgggtttgaaaacatcttgccagaaaatcaagtgtgtgcttttgttggttcaaggcctggccaatcttgggtcctaggtgatgattatttgagggcccaatatcaatatgagtacaaaaatacttggagaaacttcggcatcatgtggtgtttcttaattggctacatcgtcttgagggcggttttcactgagtacaaaagtcctgtcaaaagtggtggtgatgctctggtcgtcaagaagggcacaaagaatgctatacaaagatcatggagcagcaaaaatgacgaagagaaccttaatgcctctatagcaacacaggatatgaaagagatagcttcaagtaacgacgatagcacaagtgcagactttgaaggtttggaatctaccggggtgtttatttggaaaaatgtttctttcacaattcctcattctagcggacaacgtaaacttctggacagcgtaagcggttactgtgttcctggtactttgacagcattaataggtgagtccggcgctggtaagaccacattattaaacactttggctcaaaggaacgtgggaacgattactggtgatatgttagttgatggtctcccaatggacgctagtttcaaaaggcgtaccggttatgttcaacagcaagatcttcatgttgctgaacttactgtcaaagaatcgctacaatttagtgctcgtatgcgtcggccacagtctattcctgacgctgaaaagatggaatatgttgaaaaaattatatctattcttgaaatgcaggagttctcagaagctcttgtcggcgaaattggttacggcttgaatgttgaacagagaaagaaactatcaattggcgttgagctagttggcaagccggatctgttattgtttttggacgaaccgacctctggcttggattcccaatccgcgtgggccgtcgtcaaaatgttaaaaagattagctctagcaggtcaatcaattttatgtactattcatcaaccatcagctactctttttgaacagtttgacagattattgcttttgggaaaaggcggtcaaacaatttattttggtgaaataggtaaaaattcaagttctgtcattaagtatttcgaaaagaacggagccaggaaatgtcaacaaaatgaaaatccggcagagtatattttagaagccataggagctggggccaccgcttctgttcaacagaactggcctgatatatggcaaaaatctcacgagtatgcaaacattaacgaaaaaataaatgacatgattaaggacttatcttctacaactttgcataaaacagctacaagggcctctaagtatgcaacatcgtattcctaccaattccatcatgtgctgaaaagatccagtttaacattttggagaaacttgaactacatcatggccaaaatgatgttattgatgatcagtggcttgttcattggttttacctttttccatgtgggtgtaaatgctattggattacaaaatagcttatttgcctgtttcatggctatcgttatatcagctcctgcaacaaaccaaatacaggagcgtgctaccgttgctaaggagctatatgaagttcgtgagtccaaatctaatatgtttcattggtctttacttttgattacccattatttaaatgaattgccttaccatttattgttttcaacaatttttttcgtttcatcatatttccctctgggtgtctttaccgaagcctctaggtcaagtgttttttatctgaactatgccatactttttcaactttactatattggtcttgctttaatgattctgtacatgtctccaaatctacaatctgccaatgttattgtaggttttatactttcgtttttgctctctttctgcggtgctgtccaacctgcctctttaatgcctggtttctggacattcatgtggaaactatccccttacacgtattttttgcaaaatttagttggattattgatgcatgacaaacccgtaagatgttcaaagaaagagttgtctcttttcaaccccccggtaggccaaacatgtggtgaatttaccaaaccgttttttgaatttgggactgggtatattgcaaatccagatgcaacagcagattgcgcctattgtcagtacaaagtaggtgatgaatacttggcgcgcataaatgctagctttagttacttatggagaaacttcggtttcatttag

SEQ ID NO: 1751 - DNA, 1029 bp, Saccharomyces cerevisiae
atgtcaaatagtaacggtgataataagtatggtgtcattacaattggtgatgagaaaaagttccaagctaccattgcgccacttggtgcaactttggtagacctgaaggtaaacggccaatcagtcgttcaaggttattcaaacgtacaagactatttaacagatggtaacatgatgggcgctacagttggtcgttatgccaaccgtatcgccaagggtgttttcagcctggatgatggtcctcacaagttaactgttaacaattgtggtaacacaaatcacagcagtatcagttccttaaatcttaagcagtacaaggcgtcccctgttgagaatccttccaagggcgtttacgttgttgaatttaaattgttggatgatcacacacagcccaaccctaacgagtttccaggtgacttggaagtcacagtgaagtacactttgaatgttgcagaaatgactttagacatggaataccaagcacagttagttcgtggtgatgctactccaattaatatgaccaaccactcgtattttaacttgaacaaagtcaagagtgagaagtccattcgtggtacagaagttaaggtctgctcgaacaaatcgcttgaagttacagagggggcattgcttccaactggtaagatcattgaaaggaacattgctacttttgattcaactaagcccaccgttttgcatgaagatactccggtctttgattgcactttcattattgacgctaacaaggatttgaagactacagattctgtgagtgtcaacaaattggttcctgtttttaaggcctatcatcccgaatctcacatcaaatttgaggtttcgacgacagaaccaaccgttcatttgtacaccggtgataatttatgtggcaaatttgtgccaaggtctggatttgccgttcagcaaggtagatacgttgatgctatcaaccgtgatgagtggagaggttgtgttcttctgaagcgcggcgaggtatacacttcaaagactcagtacaaattcgatatttag

SEQ ID NO: 1752 - DNA, 1137 bp, Saccharomyces cerevisiae
atgacaattaacacaaagaacatagttgttgttggtgctggtgtgtttggtgtgtctgtggcaaatcacttgtacagggaactgggtgggacatacgcaataaagctcgtcacagcatctaattatgtgtattttctaccctcagctgtccgtttgacggtttcaaaggattataccaagtcgatcctgccgttaaaaaatgttcttgatagtggtattgaagttatcaaagatacggctgccagctttgatgataaggaggtagttttggggtcagacagggccataaagtttgatatcttggttcttgcaactggctcaaagtgggctgatccaattggttcaacttataccttcggggataactataaagagtattttgaaagagaggcttctcgaatctcagatgcagatcacatactttttcttggcggtggctttgttaattgtgaactagctggtgaattgttattcaagtatttggaggagatcaggtctggcaaaaagcgtatttccattattcataattccgataagctactgccggactctgggttatacaacgataccctaagaaaaaatgtgacagactatctctcaaaaaatggtattacgttgtacttgaacacagtaggggcttctttagacacctcgccgaaacgtatttttctaggtgagggctcatctaaatatatagatgctgatttgatttacagaggcgttggtatttctccaaatgtgccggtcaacagtatttcagacctttgtgacaagaaagggttcattcaagttgaaaaaaacttcagggtaaaagctgttgaggcaggaaacgtttttgccattggtgatgtaacgaattttagatatcacggattggttaaaagagataattgggttgatgttttgacccgaaatgttataagttctttacaagaaggaacagaggctagtctcgttgatgcagattgtcttgagacaggacatgccccaagtggtgtctcccttgggccaaatgcagggtttggccaatttccactaccgttacttgggacgattaatattccatcgtttttaatttctagagcaaagtcgaagaatcttttctccgacaaaatggaacctttattcaaaaaatag

SEQ ID NO: 1753 - DNA, 192 bp, Saccharomyces cerevisiae
atgatgtgtattataaattctgagtcttttcatggttctcagaaaagatcgggcgtgtggtctagtggtatgattctcgctttgggcgacttcctgattaacagggggacaaagcatgcgagaggccctgggttcaattcccagctcgcccccttttttactattgaaaagtattcggtcagacgtagctga

SEQ ID NO: 1754 - DNA, 2145 bp, Saccharomyces cerevisiae
atgacagaaattattgatttagacttggtcgatgactttatcaagaaacctatggtcaaacaacagaaaaaccagtcttcaaagcctagggtaaaaagaaggggtcagttgacctttgatgatttcagaaacatcaaaattgtagaagaacctgttgtactttctcacaatagttcaattgacgaatcactggatgctgctacccaaaatactaaaaagcgggagaaatatgaaggtacctgtgatgaagaaatgaaaactaaagaaatggaggcaaatatggcaagcaaatattctaatatcaaaacacattcgaacgacactaacaaggtagagtcgatcagtgaacacactacttctaataatagaccattgaatacattaaactggtcaccaaatattcctttacgatattctgactttgcaaagtttatgagtgatgagacggtaacggaaagcaattgggcgcctcccctttgcacccctctcccatatgcaggcgatgttatgaagatcctttcttttatcgtcaaatttaaatgggtgttcagcgacgatctactgaacctgtcatttcaagatgtggagataggactagaattaaaggtggctggccattctgcgaagaatattcgaatttgtcaggataaaatgaatctactattttgcagtcttttgaggttattattctgctccgagaaaagagcagacaaccaaactcatagaaatttcacgctaaaaagatttcttagtttgaaaaatccatatggaaaactggttggcaaactcagaagcttaatccaggagtggggcttaccaaaagaatggcgtggtaatagtgatattttatctactctaaattttaatggaggtggtttgttgacgatggaaccattagatagaataatattattgagatgcatgatcgattggaattgtagctactccgcacttttccataatgaaattcaaaggctcactcacttgaaaggcgatacagggttcaaccatcaaacttttcacgccagcaggtttgctatgtgcggggccaataacatattagatagttgtgaagttttatgctctttgatgagtcaaaagttggaaaatcgaaagaaaaggaagcccagcgacaaaggaaaactgagtaagatcaatagtcagatgaaatttctaaagggtgttcggaaatcattgagcgaaaaagtaactacagacagattacgagctgcagttaaaataaatgaagaatggggtgaatattttgcaaacgaatttacacacacaccaattgatgatcccaccgtagacgaaatttacaagttaaggacatcagagtttatgatagcgagaattccacgagttggagatttctacttaccaccattctggattggcaacgaatgcagttcagtaaacactagttacagtttcaatgacatgtcaacttatcttaattacttcgtaaaattcaaagaggagggtacaaaaatactgcctgcaaaaaccgcacaaaatgaaaacaagtgtcaacttaaacttatatataggaacactcctgcatgtatccgtaatttacagttcaatgatgttcactttgccgaggtgccgcattggtttgaagttgcaggagactcgaattctttgagcaacttcattgagtatttggaaagtttatcatcacttactgaaaatgacaccgatgatacaaaaaagggtatagacaatctaattgagtttttgaaaattttcagtatattcataaatgagactattcagcgcataactgctgcccctacaggcagtactgaaggacgtcatttgcgaacaagctctcagagaagaaccacggtgcattactcgagtgatgtaaatggtgacgtttccgaggaaagtgaaaatgaagttgacattgacgttagcgatgactatgattcagaatatctgagtgaggagaatacattgacaagaaaaggtgaagataggacagataaatcttttgggaaaagagaattacacaatggcgctaaagattgtgataggaattgtgatgatatagagatcttctcagaacccgttaggcaactacaagataattctcgggaaaaaagaagcttgaggcgtaatgccagaaaaggtctatag

SEQ ID NO: 1755 - DNA, 519 bp, Saccharomyces cerevisiae
atgtcaaaactatcgtcttatcctcatgccgccgattttataaatatggaagaaccgccaaaatctaaagagtttttcgatgatctttgtgccgtccctaatttactcaaaagacgttttccaaactctcgaagatcgacgcattattgtgaggctttaaattattctaggaaaaagcttcctgttgtgttgtctaaaatgacactgcaagagttgaggcacaatatgtcaacattttttttgcaggaaaaggatcaaataaatatttatgacacctgtaaggtgatagacatgggggaccgtgtcttgctcgaaactatgcctccacagccaagagatttatttgaaaaattgcatgcaagtaaaacaaatttagtagttcagacagcagctttggatgaacccctacttacagtaaaagcagagctacagtcatcttcctttccacaaaaatcaagcctatttctgtatgaggattataaaaaatttatttatcaacaactagatatgtttagttaa

SEQ ID NO: 1756 - DNA, 1071 bp, Saccharomyces cerevisiae
atgtcgactagaccccaacctgattggtattaccatagacatccatatgcctctacgccactggcagaaggggaggaaccacaattactccccatccaagaccaagggaaccataagaaatcaaaaatttggatggcatacaaggctccgatagttcgatggtacaagaatgctatgcttgttaaagacaatttttggaaagacctagagtcgtcgcaccagatcatctggtatccgtataaaggaattagcgaatccgtgggaaactcggattatttgcatctatttttcctaatatttggatactacctgctgaatctcctgcttattgttgcgtttacgtcaatccttgcgtggtccttgttagtgtgcatctatttgccctttctcggactctttgcgttacctctggcttatatgcaaactattctgatttccacaacgctatgtaattctatggtgaagggtaccgatttcgttcttttcacacgtatttatggagtgacgttcgcaagaaagggattaacagagttgagtgaagcctgtgaaacgataagtttcacgccctttgtctacagaaggtcacatcgtttgggtggcctcttttcgaaacggttttacctcgtctctttgccgcagtttttcatttttttcttctggtacatcttcatagcctttatgtttcttttattgttgctcgttccaatagtgggtccaattacaatcaatatgctaccatttagccccggaatgggattttactattttgagccttattttgttgacgtgctacatttggattcgcgcaaactttccaaagtttactacaagggctttgccaagtggctcctttactcgatatccagcggtttattagagtctattcccattctgggtgggttgttcattggaacaaacgcagtaggtgcttcgctttggatagttaaagagataaaagaccgggaccagccagccgtacctccttcccctcctgcggaaccagaagagcctactgtaggatcctatgcacctccaatccaacaatctatagctcacattaatccgccatga

SEQ ID NO: 1757 - DNA, 2136 bp, Saccharomyces cerevisiae
atgagccactttttcgccgatcatgatgctcctctgagcatgctttctgttaaaacagaatactttcctcaattgactgataaggaacaaaaatatgcgcatttcatgtcaaaggcctcccatgcgggttcaagggttgtaatgagacaagtttctcatgagagtgagccaatttttgacctaatccttgccattcattcaaagctaaacggcaagtacccagaggacgatattacgcagaagcagcaaacgggtttgtatttggaatacgtttctcaattcttatctaatttgggtaatttcaaatcgtttggtgacactaagtttattcctcgttgtgaggtaaaattcttcaaacagcttttggagctggccaagattaatccgtgttcttctccgctcactttatctcctgttgacgttaaccatgaattcacatctcatcatcttttttccaccatcaatgagctaattgatattggtatttaccatgtggaagagaaggcggctctcttagggtttccctctcaaggttatacttcagcctattatctgggtttacctgtgacacctgaagatatggctcttttgaaagagcagttgtttgctgaacttgccatcttgcctgaaaacacaagaatcaacaaagttggtgaaaacagtttccaaatctgggttgcctctgagaatgtgaaaaaccagataacagaaacctaccccagtggacagatcacattatccaatgctgtaaccaaagtagaattcatttttggtgatcattcacgtgaaatgcgtttagtagcatcgtatttaaaggaagctcaaaaattcgcggctaatgatactcaaaaagcaatgcttcaggaatacatcaaccactttgtcactggctcttctcaagcacataaagaagcacaaaaactttgggtcaaagatatatctcccgtcattgaaacaaatatcggttttatcgaaacatatagagaaccctcgggcataattggagaatttgaatcgttggttgcaattcaaaacaaagaacgtactgctaaattttccagcttggttaacaacgcagaagaattcatttccttactaccatggtctaaagattacgaaaaaccgattttcaatccaccagatttcacctctctagaagtattaacgtttactggatcgggtataccagcgggcatcaatattccaaactatgatgatgttcggcttaaaattgggttcaagaatgtttctttggggaatatcttaagcgcggctgccaaaagctcatccaagcatccgccaagttttatatcgcaagaagatcgcccaatttttgaaaaatatcaaagtgattcttttgaagtccaagtaggcatccatgaattattaggacatggttcaggaaagttgttgacagaatttacagacggctttaattttgataaggaaaaccctcctttaggtttggatgggaaaccggtgagcacatactacaaagttggtgaaacttggggttccaaatttggacagttagctggcccatttgaagaatgtcgtgcggaagtaattgccatgtttttgcttactaataagaagattcttgatatttttggtttccatgatgtcgaatctcaagataaagtgatctacgctggatatctacaaatggcccgtgcgggtctcctagctttagaatactggaatccaaaaactggtaagtggggacaaccacacatgcaagcaagattttctatcatgaaaacatttatgaagcactctacagataagaatttcttaaagttggagatgaacagcacgaatgatgattttgccatcaagttggataaatctctcattaaaacagcgggacatgaatgtgtgaaagactatttaaagcatttgcatgtttacaaatgttcaggcgatgtggaacagggaagtaagtactttattgatagatcaacggtgacaccggatttggcgtctttaagagacatcgtcttatctaagagattgccaaggagacaattcatacaatcgaattcttatattgacgacaataacaaggtaaccctgaaagaatatgatgaaaccccacagggtatgctccaatctttccttgatagagaattatga

SEQ ID NO: 1758 - DNA, 1356 bp, Saccharomyces cerevisiae
atgagtaggaatcaagatgtgttccccattttggatctacaggaactagttatatgtttgcaaagctgtgattttgcgctagccacacaggaaaatatctctaggcccacctcagactacatggtaaccctttacaaacaaatcatcgagaacttcatgggtatttctgtagagtcgttgctgaatagtagtaaccaagaaacaggggatggtcacttacaggaagagaacgagaacatttatttggacacgttaaatgttttggtattgaacaaaatctgctttaagttctttgagaacataggtgttcaagatttcaatatgacagatttgtacaagcccgaagcccaacggacacagcgcttactgagtgctgtggtgaattacgctcgttttagggaggaacgaatgttcgactgtaattcttttattcttcaaatggaatcgttgctgggtcagcttcgctccaaattcgatgattataacttgattcagcaacagctaaagcaatacgaggacgtagatggggataatatacctgatgagcaagagctccaaaagctggaagagcaaaataaggagctggaaattcagttgaagaaattgaccaagatccaagaaacgttatccatagattataatgactataagatctccaagcagtcaatctttaaagatctggaagctctgagtttccaaatagtggaattagagtccaatcgagataaactgatcaaaatatccaatacagacatggaagagttatccgagggaatcaaagagctaaatgatctgttgatacaaaggaaaaagacgttagacgacttaaccgcacaacagaaaaacttgcaagatacagtgacgacgttcgaaaccataattagtgagctctatgatgtgctgagaataatttccagcgaggtgcaagagtctaatcgaactgaaacggaacttgtgggattaaagcaaaatttaatcaacaataagctgaaattgatgaatgtattggaaacaggtattatgtataaattagaaatcttacaagaacagttagatttgcaactcaagaatttggaaaagctatcgcaagatactaaagaagagtcgcgcctaaatgatactaaattgatggatctacaaatcaaatatgaaaatgaaatcaaacctaagattgacaaaacggacattttcattcaagaggaactgatcagtggtaaaatcaataaattaaatgatgaaattaaacaattacaaaaagatttcgaagttgaagttaaagaaattgagattgaatattctttattatctggtcatattaataaatacatgaatgaaatgctcgaatatatgcaatag

SEQ ID NO: 1759 - DNA, 1059 bp, Saccharomyces cerevisiae
atgagtaaggataataggttagcaagtattttgctgcagcctgtagcatcatcctctggaaattgtactgaattccatgactcaaagttgcatactctgcaagaggaacttaatttcttgccactagaaggagttgcgtcgaatgtttgcccgccgatgtttagaggtcataagaactacgtgtttgtgttatattgtttgaatcaagtcgatctcgttacgaatttgcaggattctacaaaacgttactacccactgcaaatatttaaagattgtcaattgagttctttggttcagaaggatttttcacactatttccaactcagcaggcaaaaggaaggggaagatcggaacgatagtgataccaccttggttaatgtcgtcaattctggagtatcccgccatagaagtcaattactaaagatgtgtattatacctagaatttgttcctttgacaaatccaactccaaaacctacaagctaattcaggaatatgttaatcgctttgaaaccgttttaacaaaatttggcccagaaaaagatttcaccaaagtttacgctaactggtcaaaactcattgagtcgtttaatgagcttattttacatgacctgttggtgaaatggcaacaatggtctgaattaactcagccaaatgccacggtccatcagaacattccgaatgttctcagggaactcgtaataaaattaacacaaaggtactttacattccaaccttcatacagttgttcgattgatgaattcacaacaattttacttaataaaaatgctttgagtctcttggacgttttcagaaaacccagaaaatataaactgaattttggtttatggctagattgtcaaaacggtattttaatttttacaaatggtattgtgcagatggcagatgaaattacaagtgagagggtgaaatcctttgtcaggccagcacatctcttggtattggaagaccattcaaatgatgaagcagtcaagaaactaatgtttttcactttttcagcgatattacaatgctttacagatgagattctgaattgttaa

SEQ ID NO: 1760 - DNA, 327 bp, Saccharomyces cerevisiae
atgaatactaataagatagcacaagacgaagtccaagataaggttttgcaaagagcagaactagcacattctgtatggaacttaaggttcaacctcagtaaagttgccaaacggattcgcatggaaacaaaggtatttccagagataaagataaatgacgcgcaatcacagttagagcgatctaggtgtagaatatttagccctgacctggaggaagaacatgtgcccttgattcaaggctttaaatgtttggattcaccccctcccgttccaccaagctcatcgcagggggaggatgaagagaacacggtagattcgcaatactag

SEQ ID NO: 1761 - DNA, 2088 bp, Saccharomyces cerevisiae
atgaagaatctgaccactataaagcaaacgaacaagaatgtcaaacaagaaagacgtaaaaagtacgctgatttggcgattcaaggcacaaataactcctcaattgcttctaaaagatcggtagagttattgtatttgccaaaactgagttcggctaataatttccaaatggataagaataataaactgttggaatattttaaattctttgttcctaagaaaattaaaagatctccctgtattaacagaggttattggttgaggttatttgccatcaggtcaagattgaactccatcattgaacaaacgccacaggataaaaagatagttgttgttaaccttggttgtgggtacgatccattaccatttcaactattagacaccaataacatacaaagtcaacaatatcatgaccgagtttcctttattgatattgattactctgatttattgaaaattaaaattgagttgatcaaaactatacccgagctttcgaaaattattggtctttctgaagataaagattatgttgatgatagtaatgttgattttttgactactccaaagtatctcgcccgaccatgcgacttgaacgattctaagatgttcagcacattgctaaatgagtgtcaattatacgatccaaacgttgtcaaagtatttgttgctgaagtatcactggcgtatatgaagccggagcgttctgatagtataatcgaggcaacttctaagatggagaatagtcattttattattcttgagcagttgattccaaagggaccttttgaacccttttctaagcagatgctagctcatttcaagagaaatgattctccgttacagtctgtattaaagtataatactatcgagtcacaggttcaacgattcaataagttaggtttcgcttacgttaacgtgggtgatatgtttcaactgtgggaaagcgcagatgaggcaaccaagaaggaacttttaaaggtagagccttttgatgaactagaggagttccatttattttgtcatcattatgttttatgccacgctacgaactataaagaattcgcatttactcaagggtttttgtttgacagatcaatatctgagataaacctaactgtggatgaagactatcagcttctagaatgcgagtgccccatcaatagaaaatttggcgatgtagatgtcgctggaaatgatgtgttttacatgggaggtagtaacccatacagagtaaacgaaatattacagttgagtatacactacgacaaaatagacatgaagaatattgaagtaagcagcagcgaggttcctgtagcaagaatgtgtcacacttttacaactatttctagaaataaccagctactgcttattggaggtagaaaggcaccacaccaaggtctctctgataattggatatttgatatgaaaacaagagagtggtcgatgatcaagagtttatcacacacgagattcagacatagtgcatgtagcttaccggatggaaacgtcctgatccttggtggggttacagaaggacctgccatgctgctatacaatgtcaccgaagaaatcttcaaagacgtaactccaaaagatgaattcttccaaaattcgctagtatcagcgggtctagaatttgatccggtttccaaacaaggcataatattgggtggtggatttatggatcaaacaactgtctcggacaaggcaattattttcaaatatgatgcggaaaatgctactgaaccaattacggtgattaagaagctccagcaccccttatttcaacgttatggatcccagataaaatacattactccaagaaagctattaatagtcggtggaacaagtccttccgggctatttgaccggaccaactctataatcagccttgatccgctgagtgagacgctaacatcaattcccatatcaagacgcatatgggaagatcactcactaatgcttgctggatttagtttggtgtccacttctatgggcaccatacatatcattggaggcggtgccacttgctacggctttggatcagtgactaatgtaggtcttaagctcatagcaatcgcgaaataa

SEQ ID NO: 1762 - DNA, 432 bp, Saccharomyces cerevisiae
atggctaggcatttcggtatggccctcgccccatgggatgtcatgggaggtggaagatttcagagtaaaaaagcaatggaggaacggaggaagaatggagagtgtattcgttctttcgttggcgcctccgaacaaacagatgcagaaatcaagattagtgaagcattagccaaggttgctgaggaacatggcactgagtctgttactgctattgctattgcctatgttcgctctaaggcgaaaaatgtttttccgtcggttgaaggaggaaaaattgaggatctcaaagagaacattaaggctctcagtatcgatctaacgccggacaatataaaatacttggaaaatgtagttccttttgacatcggatttcctaacacttttatcgtgttaaattccttgactcaaaaatatggtacgaataatgtttag

SEQ ID NO: 1763 - DNA, 225 bp, Saccharomyces cerevisiae
atgtggagatcttatcttgtttttctcttctttatgacaccaaggatacaaacatattgtcctgtaccggtactaaggtcaatggcagtattaaatattatctctccgcttataatttttgtcagtcctattaaaaagcaagacagtttacacagcagcgcttgttacgcaaatttgacgttagtggaaaagctgcaactttggcattctatgtcaaacgattag

SEQ ID NO: 1764 - DNA, 2148 bp, Saccharomyces cerevisiae
atgctacggtttactcatcgaggccttccctccagcactcgttttagaaacattttcgtaaggttaaatcacatttatgtaccatggttctatgccatagacgtacccaactccaaaccctatttacccacatatcaaactttacactcacccaaaaagtttaagccgttctccgttgatgattctaatcgtttggaaaaggccagtaagcgtcaagaacgcaggcctgttttagtcaacgaagattacctgtttaaagtcgacctctctcacatggaattgtcccctacctattgggaaggccctacttatcaagtacgaagaggtgtgtggttcgactcttcaaatcaacctttgtccagtgatcttacctccgaaattgaagggttgtataagcagctcaaattcgacgacagtaatgatgatccgaccacgacacctcctgcagaatcgcaagatatatttaggctcaaaggtaaatacccagtcgataaagaaaacgaaggagagcaaaaaaatggatccagcaataaagatgagaacgaatctactttcaagtttattttgtttgccaataaacaaactgcatttttactatcggatttagatggaggaaaactgcaattagcctttctaaggtctaatctggctcaatccttaccgattaatgctacaatgattacaagatcatacaaatattcatcctccgcaactactaaacagacatccacatcttttaaggcagcaaaaacgcctcaaacggaagtagcagatggtagtaacagttccaaatcgaggagcattgaaacaaagttagaaaagaaagtttcaaacctcttcaatttatcggactttttacagttgttcaatggtaatgctagtaaagatcaagatgatgcacagagcttggaaaagcaaatggaaacagactataacaatgcagataacagtcaaggcgctaatgctagtagcaaaatagaagatggcaaaaattcgggcgcaagcgatagacaaattagaagtaacagaagagatgtggataacttgatactatgcgttcacggtataggtcagactttgggtaagaagtacgaatacgtaaatttcgcacacacggtaaatctacttaggtctaatatgaaaaaaatctacaataattctgagaaactacaatcattaaacacagcacctgattataaaagcaactgtaacgttcaagtgctacccatcacctggaggcactcgataagtttccaaacggatgctaaggaggaaaatatagaaaatcctgacctaccgactttgtcacaagtcacagtaaatggagtgttacccttgaggaagctactggctgacggtctactagatattttgttgtatgtcgaaccatactaccaagatatgattctacaacaagtaacctctcaattgaacaaaacatatcggatttttaaagaatttaatccagagtttgatgggaaagtccatttagtgggccattcgttgggtagtatgatattatttgatattctatccaaacaaaaaaaatatgaattagaatttcaagtagacaacctgttctttattggctcaccaattggattgttaaagttaattcaaagaacaaaaattggtgaccgtcccgaatttcccaatgacttggagagaaaattaaccgtacagagaccgcaatgtaaggacatttataatgtttaccacgtctgtgatcccatttcttataggatggaacctcttgttagtaaagaaatggctcattacgaacaaacttatttaccacattgtagtgaagcttatggactaacttctaaagttttggaatttggcgaaaacatatggaaagatttgccaggtactgatgaaaataatttgcagtccaaaaaaacttctccagaaaaaaaagaggtcaagttatcagaaaatcttacgagaatgcttacaggtttgaattacaccggacgtctagattatgctatgtctccaagtctgctagaagtggattttatatcagctataaaatcacatgtttcttatttcgaagaaccggatattgcagcgtttatcctaaaagaaattttaagtaaacatgaaaatgcatcagaaatatatgtaaaaagaaagactggttga

SEQ ID NO: 1765 - DNA, 1860 bp, Saccharomyces cerevisiae
atgatcataagattgcatttttactacctcctcactttagtttaccatttaggacttgtaggtgcgtatgaaaaagcagcaagaaagagaattcaacctcccgatttgatacctggtcctccgggacataaacttggtgatgaaagaccaccgcattacgaccaccggccaccttataaaaaacacatcgacaacattccagcttacaatctgactgatttgatagatgataaactactaaataaatatgaaaactcatgcacggtaaatgtattgacaggtggcttcatctctctagcaagtaattcgtggcacttacgtgcttataattacactttaaattacccatcctttttgatccgatgcgataatggcagtgcaaatcctaatttctctcatgtcttacaagactttgtttatgacatcaacaacaaattcaacgttcaagatgacagtagtaaatacatcggaaaagacccatttcccttaggaatgataatgatcacctttgcttctgggtgtatctgtgtggcaacatggatgctatttttggttgtcttattactgccatccgataatcataatagaagaaataaagttgtacatgtttacgtccttttctctgcgattataagaactgtatttctaaacgagactatagccgtcatatttgacagccaatatcacgatgactaccaggatgcgagccaatttgaatcgttcatcgtagaaactgcaccatataaaatatgtgaattagttgcaaatattttgagtgatataaactggatttatattgttcactacttacagtccaattatggaaaaccaacttggaattggatcccatttaaaatgaaaaaggggacacatatcataattaccgtgggttgcttcctctcactagccgataacattttattcgcaaaccttctttggagaaagaaccttgtagttttgaaggtattttacaagctaatcgaattactgatttacacaattttcatctccattatttgttacttcacatggcataattttgcttacatacttttaccgaaaactgctgaaattaatacggacggtaagtgtaaaacgaaattgagaattctttgggaaaattatcacgaaactataccattattggcgtataatattcttatatttattttattctatttcaccacaatttttttcgctgctttcaccaaacatgttagaggttggacatttaactttgttcatcttttgaaagttttaataacagtgaacgtttggggcttaattggagtattggaaaagagggagctgcacataagcaaaaaaacagtccttggacgaaaaattaacaatagggacaaatttttcgccaatccaacagtcaattattacggagaagatttaggcaagcatttaagcgccataacgttaaacagggatttaaacactactaaaagtaacactacttcccacgattcatcaagtttagtaggatccccttcacccacctggaaatctccaatcgaaagaataagggacagaagaagaagacataagataatgaaaagtgagaataaatttgggcaaaatcccagttttggaagtaaatcgaatggcaaacctaatactaaaacgacattatccaaatatcgacagctattaaggaagcctaggcgaaaaaccaattcatatgaaccaaaaaatggcattggacagaataaagaaggctcaactgttagaccaggagccgacaaacatattagagattccaattatctagctacagacatcagtgacaacgaaagtatggaaaccgaacttcgaaccaaccacatttataattacgaaaatagtgattaa

SEQ ID NO: 1766 - DNA, 1065 bp, Saccharomyces cerevisiae
atggtaccgaaccttcgttttaatatcacgatgattgtcatttggggtatactactgacaatacatgtcgtacagttactgatgcgccaatactggttttcaatcgcttttatatgcacaggtattttggaagttcttggatttatagggaggacgtggtcgcattctaatgtcgccgatatggacgcttttcttttgaacatgatttgtttgactattgcaccagttttcacaatgggtggtatttattatcaacttgcaaagcttatagaagtatacggccacaggttctctttattgccctctccaatggcgtattcttttattttcatatgttccgatatcgtatcgcttgtggtgcaagctgtaggcggtggcctgtgtggtgtggcggtcacagatggaacgtccacaacaaccggcaatcatgttttcattgctggtttggccattcaagttgcatcgatggccatctttcttatgttatggtttcacttccttttccgtatatatatatcggtaagatgggaacacataaattctagacctatctcattgagcctcttaaagatatcgcaaacagaagttgattatttatacagggaaaagttccattttttgagactcgaacctaaacgttgggtttttcattattttaatctggcaataaccgttgcggtactaaccatttttacccgttgttgttaccgtttggctgaattagttgtcggttgggatggctatctgatcacacacgagtggtattttattatcttagatgcattaatgatggccatcgctacggtcactttgaccatcttccaccctggatttgcgtttaaaggtagaagcacctcgattccaatcacaccgggccatgttgatcctgaaactttaccacatactgacgatgttgaagatatcttagatacttcggattcaaaacaatttgatattgaaaaggaggaattccaagcaagcatgaaatacccgattagcaccttcaaacaattcatgtccaaaatagctaacttgttttcctctaaaaagaaggctaaactttag

SEQ ID NO: 1767 - DNA, 816 bp, Saccharomyces cerevisiae
atgagcagtcgtgtgtgctaccatattaatggtccctttttcataatcaaattaattgatccaaaacatttgaactctttaactttcgaggattttgtatacattgcactattactgcataaggcaaacgatattgattctgttttgtttactgttctacaaagctcaggcaagtatttctcctcgggaggtaagttttcagcagttaacaagctaaacgatggagacgttacaagcgaagtggagaaagtctcaaagctggtatctgctataagctctcctaacatatttgtggcgaacgcatttgcaatccataaaaaggttctggtgtgctgtttgaatggaccggccatcggacttagcgcatcgctagttgctctttgtgacattgtttactcgcaaaacgattcagtatttcttctttttcccttcagcaatctcggttttgtcgcagaagtgggaacttctgttaccttaactcaaaaactgggtataaattctgcaaacgaacatatgattttcagcacaccagttctatttaaagaattgataggaactattattacaaaaaattatcaattgacaaatactgaaacattcaatgaaaaagttcttcaggacataaagcagaatttagaagggctttatccgaaaagtgtactaggtatgaaagaattgttacacagtgaaatgaaacagaagcttatcaaagcacaagcaatggagactaacggaaccttgcctttttgggcaagcggcgagccattcaaaagatttaaacagcttcaagagggaaacaggcgccacaagttataa

SEQ ID NO: 1768 - DNA, 390 bp, Saccharomyces cerevisiae
atgagattacttcaccatggtgaatacgggacaaaactaattggaggaaaatgcagcatagatgggaaactcggtcacccttgcccgctaagcagaagacgcaaaaaacatctgcgcgaaaaagaaatgggtccacaatatgtacggatgtatggtcccaaaagaaaagccataataaggacaggaaacccggatgacggcattaatttacctgacaccggccgaggcaccttaactgcagccacaatttggtcacgagcttaccattcaaattattcttaccttgtacgcccaaaagtagtgactctttctaagcatcgcgaattaatgactacttttcttttatacgttttatatgtatgtatatatataagtgccttcataaaatag

SEQ ID NO: 1769 - DNA, 2466 bp, Saccharomyces cerevisiae
atgaacgaagttcctaccactccagttaggcttattttagggcaagctcagcaacgcgagcagaattcagaaaactgttcgcaagaacgtaacccacgcacgtttaattccgaaccggattccagctttaactctcctggttcctcccagttcgtgatacatcctcatgaaccgctcgagaaggagaaagatgagaagcaggatttagaccgctcgattgattacggtaggtcatcagctcttaacaacaagaataatgccaatccattagagaatatagacataaataaaatgtttgatgacaaaaaatcagattcaggtaccaatgatgataaaggaggcgcaagtactagtgataagcatgtccttgcattgaattattcaccgatcagagttgaaatgaactcctcagagaaacgaagcgacaaaaacgtggacgtagatgaaaatgataaagaaggtagccatattaataaaaaattgaaattgcagttagaatcagtacctgatttgaaacaaagctctactaaagatatcattaatgacaaagaagaaattatgtcgtctccaatggcgattgatatgattgagaccaacataagcccaaataaattcataataaacgacggagttgaaagaaacgatagtttcaatatcaataccgacacacttaaattagaaaatgatataaatgagaaacaacaagaggaagacttcataaaatctaacagtaacaatgtggttaatattgacaatgcttataaggaaaaggaggacgaagaaaatgatataacaaattctcatataaacaggcttactcctttgtatgagacttctgcaagggagtcgaactcaaatgaagaggggaggaatgactacgatgatgacaaccaacttgatattagacatgacaattttcagattgtagcaaaaagaaacgaggagctcactgatcagatatatcacttaaatcaaatgttaaactctttgatttccaaaaatgaatcattgtcttttcaatacgagaaattgaacaaaaatcaccaactactaatagatttgacaaatgaaaagttagataaactaaatacagaaagagagagcgatattgccaaggtggaaaaattcaaaaagaggattaaggagttgaatacagaaattaaggtattgaattccaaccaaaaaatattacaagaaaaattcgatgcctcaattactgaagtaaatcatataaagggcgaacatgaaaatactgtcaacactttgcagcaaaatgagaaaattttaaatgataaaaatgtagaactggaaaatatgaaagcagaattgaaaggcaataatgataaattatccgaatatgagaccacgttaaatgacttgaattctcgcattgtgcaactgaatgataagattgaaagcacagatattgttttgaaatctaaagagaacgaactagataatttaaaattgagtttgaaggaaactttatcgatttctaaggacttcaacgactctgaccttataggacaaattaatgagctaatatctacaaaaaacaacttgcaacaaaaaatggatgatttgaataacctgaacgacgataatttgaaggtagtacaggataaattaattaaaaatgaggagacgctaaaactaaaagaagctgaaattgattcattgaatagtgaaatggacgagctaaaaaaacagatcacttcaaaagatgatgaatttaagatgtggcaaagtaaatacgaaactgtcgaagacgaagctaagatacgcaatgccgaagttacagagttgaacggagatattgaagatctaaaggaatcaaaattgcatttggaagaaacaattacggaactagaaaacaaagttcataaactagaaaatgagtgtgaactggagaaacaaaaattcgaaaaaacttcgctagaattagaaagcttacaactaaaaaatagtaacattcaggctgagcacatcaaagaattggaaaatcttcatgaaaaccttatttctcttcaaaatgaattgaagatttcatccgacaggataacaacattaacaaaagaaaatgaagtattaatggaacaaaataataataacaataatagcgttactttaagcaatgatcaaaaggatagagatgatgaaaaaattaaatcattaggaaaacaagtacaagattggaaagaaaagtatgaggccaaagaaaaagatacaaataaaaggctaaagttattagcagaagatttgtatatccagtattcatccaaacacgaacaaaaggtcaaactgttgaaaaaaggctatgaaaacaagtaccaaaataagtttgatcaattaaatttagaaaataaaactctgtcagaagaaatcgagcaattgaacaagcagctgtcttcagaaagagaagaaaagcaggagttactcaagttgttagaaaatgaaaaaaaataa

SEQ ID NO: 1770 - DNA, 711 bp, Saccharomyces cerevisiae
atgttaggattatatctatcctcccttttcttcgccttttttatggcacaagtgtttgctaccaaatactcaattacttttacatcagatgagtatgaagaagatgaaacaggacaaaatgaacctggtcctttagttttccatttggataaaaactcattaccaccagctctgctaaatcaaatggagtttaatccatacttagtattagcagatttaccggaggagccgcgagctgttgattctcaagaacataccgatacggtccttgcttccaaatctgttatagattttctgttggaagatcctctaacaatagtggagcacaaaaagttttctcaaattgaaagtattctacatgaaattatggaagacagcatacagaagaaagtcggggcagacgaggtatttgaagagattccgaaaccgaaaatttacgcgtatgaagatattttagtaactaatatgagcatcatcaataatagtgaaatgccgacaagtactgcaacattaacgagcaccatttcttatttatctagtacgacaagtttagctttatccacgggtgttaccagcgttgagattttcccaacaatcaccccgggaaatattacaactattgggggatacgaaaattcatcatcctccttaatgccgtcgatgggaatcttatcttttctatttggtctgtacttgttacttcacccttaa

SEQ ID NO: 1771 - DNA, 837 bp, Saccharomyces cerevisiae
atgagagcaccaccttcaccgagaaagtccaaatctggtcattttttttacctatattttcgactgtgtcaactgttcagtggccggaaattaaagaggaggtggcatgtccacaaacttcacattcaccaatataatactcgctggaacttgagccccctctccgaaatacacattgaggacatgataaatgaaccgtctggactatgtccaggaagttccaaaaagaaaccactactgattgcaaggtttcccaagggttgccaagaatcaccaagggtatatgtactgcaaaggaacaatttgtctcgtttaaaattaagcaaaagaaaatatgccctaaggttctatcacaatgaaatttttggcaataatttaaagagaaaagacggaagcatccacaaagttgaacaccaacagtgcgcagaaaccgttagaaagatcaagaaagtcacagcaaaccatgctgatgttaaaataatatttcacgataaaaatactataagaagtgacaaattagggggtaggagtaataagatgcagactaggcctagtgttcttgaagaggatgtagaagaagaagtctcttcggtatatatcagattttgtgacgaccattccctgagagttaaagattatcactctttgcacaggcattctaaaaaatcttctaaagaaaaacgaaataatcaggagattggaaaatctaagttgcttgggaagctttttgaagaggaaacatcgcgtcaaaacaaaggtgtagagaagaaactagatacgattgtgatacagaaatttcaaaattatcctattgtctccttctctcgtgtcatttaa

SEQ ID NO: 1772 - DNA, 687 bp, Saccharomyces cerevisiae
atggctgaattaaacgattatagtacgatgatcgatattcttctctctgatatggatttggaaacggtcacaactaaaaaggttaggatggctttgaaagaagtatatgcaatcgacgttgaatcacagggaaaagcaattaacaaattgattaggaaacatctagatcttgtaaaagaaaggccgcgcttcgaaagatctcttgaggatctgctaaaggaaaatgctactttggcgattgagctcaccaaggaaattaccgtaagcaaacgatcatctggagaggaaaagaacgatagcgaaaccaaaggtactcatgttgagaagaaaaaagggactgttagtaagtcacctatttcaacacgaaaagttacactatctaaatcattagcgagtttgctaggagagcatgaattgacgaggaccgaagtagtacgacgactctgggcatatattaaagcgcataatctgcagaatcctaacaacaagaaagaaatactgtgcgacgaaaaattagaattaatacttggcaagagtaccaatatgtttgagatgcacaaaattttggcaagtcatatgacagagcctaaaaaaataagcgactgtcctcctcttatccaagaagtccgtagaaaggaaaagcccatcgtttcagattccgagcaatcagatacaaagggcatttga

SEQ ID NO: 1773 - DNA, 1440 bp, Saccharomyces cerevisiae
atgggttttgttgatttcttcgaaacatatatggtcggttctagggtccagttcaaacagttagatatttctgattggttgagtctgaccccaaggttgcttattctttttggctatttttaccttcattctttttttactgcaatcaatcaattcctacagttcattaacacgaattccttctgtcttagactgcatttactatatgacagattttggtcgcatgtgcccataataggtgagtacaaaattcggctgctctcgagggcactgacatatagtaaactgaaaataataccaactttagacaaggtgctggaggcgattgaaatttggtttcagctacatttagttgaaatgaccttcgaaaaaaaaaaaaacgtccaaattttcataaccgagggaagtgatgacctaaacttttttaaagatagcaaattccaaaccacattaatgatatgtaatcatcgatcagtgaatgactacacattgattaattacctttttctcaaaagttgtcccaccaagttttatactaaatgggaatttctacaaaagctgaggaagggggaagatctagctgaatggcctcagttaaaatttcttggttggggaaaaatgtttaactttcctcgattggatctactaaagaacatattcttcaaagatgaaacactcgcactctcatcgaatgagttaagagatattttagaaagacaaaacaatcaagctattactatttttcccgaagtcaatatcatgagtttggaactatcaattattcaaagaaaattacaccaagattttccctttgttataaacttctataatttattatacccaagatttaaaaactttaccactttgatggctgctttttcatcaattaaaaacatcaaaagaaagaaaaaccgtaacaatataatcaaagaggcccgatacctgtttcacagagaacttgacaaattagttcacaagagcatgaaaatggagtcttccaaggtatccgataagacgacgccgcccatgatcgtagataattcatacttacttacaaaaaaggaagaaatcagcagcggcaagcccaaggtggtacgaatcaatccatacatatatgatgtcaccataatttattaccgagtcaaatatactgatagtgggcatgatcataccaacggagatttgagacttcataaaggttatcaattagagcaaatatctccgacaatctttgagatgattcaaccagaaatggagtctgaaaacaacataaaggataaggaccccattgttgtgatggtaaatgtaaaaaagcatcaaattcaaccattactcgcatacaatgatgagagtttagaaaagtggcttgaaaataggtggatagaaaaagatagattaatcgagtccttgcaaaaaaatattaaaattgagaccaaataa

SEQ ID NO: 1774 - DNA, 471 bp, Saccharomyces cerevisiae
atggcagtagaagagggtggttgcgtgacgaaacgtttacaaaatgagctgctacagctacttagttctacaacagaaagtattagtgcgtttcccgtagacgataatgatttaacatactgggtagggtatattacaggccctaaagacacaccgtatagtggacttaaattcaaggtttcattgaagtttcctcaaaactatcctttccatccgccaatgattaaatttttgagtccaatgtggcatccaaacgtggataagagtggcaacatttgtttggacattctgaaagagaaatggtctgcagtgtataatgtagaaacaattctattgtcattgcagtcattacttggcgaaccaaataacagatctccgctgaacgctgtggcagcagaactttgggatgcagatatggaggaatacagaaaaaaggtcctggcctgttatgaagaaatcgacgattactga

SEQ ID NO: 1775 - DNA, 3045 bp, Saccharomyces cerevisiae
atgaacaatattcgggccttgctggactcgatacaatctggagttcagaccgtttctccagaaaagcaccaacagacgattgccgcgatcaacaaatttcaagatgatcctgcacttctagacaccatactaccgagatgcgtgcctcttttgaccaagtcgttcttttgtatgtcacagcgtgatcagaaacttgttgcggagcttttctacaatcttgacaagatctcccactcaaaagtccttaaatcattagatacaagtatttttagattaaacgaaattttaaactatttacaagatcgagcctcgccctcttctttcagcgatgtcttgtgcgtctatctaaacctttcttggctaagcgtcattctgctttcaccttacgcattcaaagataaattcaacaaaacgcttcaagtatcttccaggttcgagaactaccccatttgcatacctccaattaacaagatcaaagccgttttatatttcaaaaacttcacagatgcctttgaccagctaccggaacgggaacaggcaaatgtgccgtttctcaaccaatttttaaagctgtttattcagtcttcggaaaaggcaaactactacttctccaatgaaaatctaagacacttacaacaagttgcactgtccaatgacggaataaagctgctgccaaaattattccagatttcgttcaatcatggctctcatgatatcctagatgctatagtagaattcttccatgaccatttaagttcgaattccacagacacaagattccaattggcacactccttcgctaaaattgccaagttcctgcaccaggcagatccagcatcttttatcgagctcattgattataccatcgaaaatacggtttccctattacaggctccttgcgattctatcgatagcaatgagctgcacacttcccttctgatcatcgccgaggtggctctggccaaaattctgcctatagatctagtcgaccgcgtattgactctgatcatccctaaaacatgtcattttcagaaatctcactttcaaatcatcaagggccaccatatcagggactcgacaaacttcattatctggtcagtaataaggtcaaaccgtagcaatagtttatcgccgcaggttctacaatcactactttctcatctgttaataaacgccttttttgaccccgaattaataatcagatactcgagttttgccgcgctccaagaattattgggcaggtccaacaaatctcttgcgctaaatcaaaatgacattgctttgatattgcaagcaaattggaaggatctaccgaggtctttcgaggagaactctggtctaattcgtaggctgttcaaccccgaaaacacctccaaaagtgctgtttgcgtatggaaggtattccgcgattggtccttcaattggaatttactagagaatttacatttgaccacaatgaaactcaacatagattataacctagttccattaatcaagtcgaaattatcttcacccgctttattgcaagaggtattaaacaaggctggcagctcagttacacaaaattgtcaaattttgtacttgtacttgaaactattcgaaaatgacgtaaattgcccgaaaataagcgagatttgtatcgacatttaccagaaaaagataaaattccaattaactactcaagcgaaaagacaatttaacgataattcgcccgaactgtttcaaatttttgtcattttgaaatactggcaattaacaggacaaaatgatttcaatcaggaattgttttggaaatttgtagacatagtatccccacaaaagaagttaaatctgtacaacgaattcatccctataatacagcaaataatatctcaatgcgttagcctaaactacacaaggattgttcaattaattaaatcagataacgaactgacttgccgatcaatatgtcatatgcccgatcaagaaaagatgtgttcccttttcttctcccagttccccctattgtcacctcaatccagatcgcttttgataggcgaacttgatcatcattgggatgttagaataagcttactcccgtcgaattcgtatcgaaaatttcgcaacatcattatcaactgtctcgatgattatacaataactcaacagggtgatgtaggacgtctggtaagaatacaggctttaaaacttatgcaatcccatcccgatttcttatctggtgattgcgactccatcaatccaaaattaacgagattgctggcggaacctgtaccagagatcagaaaactaagttatcaattacttgcttcggccacatcacaaatcactgtgttatctgactcttcgatactcaatttccgtcacaagcaaggtttaagtgaagaattctggaaaggatatgcagtgagcgctggagcaatacattttacagattctcagcttacttcatcaatagattcatttatcgtatactacagatctttgtctccttcacaacagctggaattatgccacgatttaatcagaataattccaagcgctaaacaaatcgctgaatcaagaatacgcgatcgtaacaaggatccattaacaggaggtatgagatttgacaccatcaaattcaccattcattgtgtaaaattttggactagaatcatggaatctgggttggttgttctacatccaaattttaattttcagggtgttttcgccaagttctataacctacatttattagattgtacgacattgagagtaagcgtgatcaaattcttcccgttcttggcaatatcttgttaccacacaatgagagaaaatgctgaccagaagaatctatccaacataatactgaaaaggttgttggttcttgtgaaacgtgaatacgccgcaacaaaatcaaaatttatgactgatcaaaatgtcgctttacaaggtatgttccagatatttttggaattaggtgtcaccaggcaactccaagctctacaagtggcctgccagaaacatgaattggcgaatatattagagtctgatatcactttatag

SEQ ID NO: 1776 - DNA, 1494 bp, Saccharomyces cerevisiae
atgagaccgttgtatagctgcaaccttgcaaccaaagatgatattgagatggcaggtggcgtagctcctgctcacctggaagttaatgtaggcggctataatacagagcagacaatacctatagtaaagcatcagctcgtgaaagttgggagaaatgataaggaatgtcaactcgttctaacgaatccctctatctcctctgttcattgcgtgttttggtgtgtcttttttgatgaggatagtattccaatgttctacgttaaagattgttctcttaatggaacgtatttgaacggtttgcttttgaaaagggacaaaacgtatcttttaaaacattgcgacgttattgaattatcgcagggaagtgaagaaaatgacattaaaaaaacacgactagtttttatgattaatgatgatttacaatcttctctggacccaaaacttttagatcaaatgggttttctgagggaagtagaccaatgggaaataacaaatagaatagtgggtaatggcactttcggtcatgttctgatcacgcataactcaaaagaacgtgatgaagatgtctgttatcaccctgaaaattatgctgtgaagatcattaaactaaaaccaaataaattcgataaagaggctcgaatccttttgagactggatcacccaaatattatcaaagtctaccatactttctgtgacaggaacaatcacctttacatattccaggatcttatccctggtggtgatttgttttcttacctagctaaaggcgactgtctaacttccatgtcagaaactgaatcgctattgatcgtctttcaaattttgcaagctttaaactaccttcatgatcaagacattgttcaccgcgatttgaaactagacaatattttgttatgtacgccagaaccgtgcactagaatcgtcttggcagactttggtatagctaaagatttaaattccaacaaagaaagaatgcatactgtcgtaggcactccggaatactgcgctccagaagttggattcagagcaaacagaaaagcatatcaaagcttctcaagagcagctacgttagagcaacgaggttatgacagtaaatgtgatctttggtctttgggtgtcattacacacattatgttaacagggatctcgcctttttatggagatggttctgagaggagtattattcaaaatgcaaaaattgggaagctgaatttcaaactgaagcagtgggatattgtttcagataatgccaagagttttgtcaaagaccttttgcaaactgacgtagttaaacgattaaatagtaagcaaggtctcaaacatatttggattgcaaaacacttaagtcaattagagagattatattacaaaaagatattgtgcaataacgaaggccctaaactagaaagtataaattcagactggaaaaggaagttacccaaaagtgttatcatttctcaggcaataccgaaaaagaagaaggttttggagtaa

SEQ ID NO: 1777 - DNA, 2112 bp, Saccharomyces cerevisiae
atgcttcccattaaagtcttctctttatctcggatttttgttttgctagcaatcttccgacaaatacacgctatttccattaacagctctactttccaggtttctaactcttttacactactgaacaacgcatcgactctattcccagtaccatttgatgcatatactaaagaatatctaaggacttcggctctgttgacttgtgctaaagactcacagttttctgcatcgtatttcgaagctgcttttttcccgagaaataatactctattctttaatgttgaagcacaaacaattatgagcgaaaacataaccatcaaggcagaattgattgcatatggtctcaatgtttataccaaagtttttgatctatgtggaatccaagataatttattatgtccgttgaagccgggaaatatagaactcatgggaagttattatgttgaggccgcggtagctagccaaataccaagcataacatataatatacctgacttagacgcatatattgtggtgacagcatactccactattgataaagaatttaccaaacctctagcatgtgtacaagtgatgttatcaaatggtagaacagtccaaacagagtatttatcgtggaatctagtgatattgacaatttccggaattatgttttcagtggtttattctttgcaaggttatacggttacttcaacaagactggcgtcttattcaatatcgctacttttatatttccaaaatttggctattttagctatgattagtgtatcatttttaccgcctattgtcgccgcttggactcaaaatttccaatggtcaatgggaataataaggataaattttatgcagcggttatttgactggtatgttgtcgcaacatctgggtcccccaccgttgtataccgcaataaagaagttttatcgatcagtgttcaaaaaagatccttgaacagtaaaatcatatcagcgtcaagtaatttaaatggtattgaaagttcccaaaaaaatgatttattatacacttcaaatttgagaaattcaaatgactatctgtcaaaaattttagtattaagaggtattaaaagggtgtcttacaaagctggaattgagatatcaaatttctttttaacgggattttccttctttatcatattcatttgtatgataatattggcgtttattatcttcaaaacatttttgaaagtacttcagaagtttaaagttaagacaattagatatttacacttccacacacattggagtgcacttttacaggggacactatatcgagcggtgttcataatttattctgagatatctcttttagcactttgggagttcactcaaacagactcagcagctaccttagtggaggcaatcgttgttttcattttgattacagtcttgttatcatccgcaagcgtaagaatatggaggaagatgatcaagtctaagaaaatatttggccagccaagctatttactcttcagtagctcgaaattcttaaacaagttcggctttctttcctctcaatttaagtctacaaaagtctggtggttaatggcgacctctgcacacatgcttattaggtctatactagtgggttctctacaagcgcacggaaaatctcaatctattggtatctttttgaatgaagctatctatctcatccttttgtgctggatgcaaccttacatggataaaacaaccaacttcttcaatattagtatccattcactgaatttagtgaacgcattttttttcttatttttcagtaacttatttcagcagcccatagctgtgtcttcttttatgggactaattttcttttttctaaatgcagcgttttctttgtatctcttcattttcatattgatatgctttacgatggcaatatactacaaacaccctgatacaagatacaaacctattgatgatcaaagacgatcctttttgaagggtgaaatggatgatgatgcggtttacgaatcggtcccggaactgcacgaaatgaagaaagccgttcttgaatgcaacggtattcaaaagccgcagatcaataagattgacctttgtaaacaaaattcgaactgtgaatatctgtatatgtga

SEQ ID NO: 1778 - DNA, 1548 bp, Saccharomyces cerevisiae
atgtcaactagctcctccgtaacgcagaaaaacttggatacaaacgcggaagccttgaaaaaggaggataaagtattatcagagtttgatattcaggatgagaggcctaaatcccttttatgggagagtgcctttgtcggagtgctgtgctctgcccaactaatgactcaggcaggacttggacaatcattagcgccgcttcacatcatcggtaacagttttggaacaacgaatgctggacaacttagttggtttgcttccgcatattcgctaactgttggtacattcattttaattgctggaagactcggagatatcttcggacacaagaaattctttgtccttggcttcttttggtacgcactttggtccttacttgctgggtttagcgtctactctaatcagattttttttgactgctgtcgtgcatttcaaggcatgggtccggcctttttgttgccaaatgccattgcgattctcggacgcacatataagccaggaagaagaaaaaacatggtctttagtctgtttggtgcttcagcacctggtggcttcttccttggggctgttttctcatccatgttgggtcaactggcgtggtggccatgggcttactggataatgggtattgcatgctttgttttagctgtagcaggttactttgtaatccctcacacccccatgccaagccgcgatgcctcatctttcaagttgttggaacgaatcgattttgcagggtcagttaccggcgttgttggattaattctctttaatttcgcttggaaccaaggccccgttgtgggttggcaaactccatacacatacgctcttttgatagttggtacctttttcttggttatttttgcatatatcgagtcccgagcagctttccctctgctaccatttgctgctctttctagtgatactgcttttgtacttagctgcatagctgcgggatgggccagctttggtatttggatattctatacatggcagttcatggaagactcaaggggccaaaccccccttctttctagtgcacagttttcacctgtagcaatcagtggattttgtgcagccgtgacgacaggtttccttctaagccatacacccccaagcacagttatgctttttgcgatgacagctttcacagtcggaactatattgattgctacggcccccgttcaccaaacgtattgggctcaaacgtttgtgtcaatcattgttatgccttggggaatggacatgtcctttccggccgctacaataatgcttagtgactcgatgccacacgaacatcaaggtcttgcagcctctttggttaatacggtggtaaactattcgatatcgataggtttgggtattgcaggtacaattgaatctagagtaaatgacggaggtgccaagcctttgaaaggatatcgttgttcgtggtacatgggcatcgggttgagcggacttggcatttttgtcgcagcaacgtatgcatggagcacttttatgaagtctaaaaaaaggatctccgaaaagcagcattttatagaataa

SEQ ID NO: 1779 - DNA, 2085 bp, Saccharomyces cerevisiae
atgcttttcgctagattagtgctgctgttggtgtatttggcaccaggttctttagcaaaaccagcatcaactaagaaaagaacgcaatgggaccagatagcaattgatgcttgtgctaaagaattggaatcacacaaatttgacacggatgtgaagggtcggcacgctactctttgcacttatgaaccagcactagggtcttggttacattgcgcgaaggatgttctcgacagtaggaagaaaagtaaaaaaatattcgaaaaaacgtttagcaaaattaatcagtattgccacgattatcacaaagatgaggtcgtcagcaatgaggagtattatcgaatttttgccaatgcatcccttttcatccggcctcttgatgaggtaaaggaaaacatacgatatcccgtcactcccaataaagcctctctagataggtgggtatgggcttattttgggcccctggataatatagacaaaggaaatgtttatggagtgacgatttgcttatactggataggagttctgtttattgcagctgtatatcacttcttgaacttttctcgacttaaacaaacggtgttcaaaaacaaggtgtctgctttcttaagaggccactatgttcttccagcgcttgttcataaccatgctatgtcagtgggaaggtggtttttcatcggtctggtccctaccaggttagagacccttgtcctattcggttacgttttgttgcacgggttcttgttgagtagttacaattttgaccataatgagttgctcagtgatcgcagaagccaagtgcttatcttcctttccgacagggcagggatcctggcattcgcacattttcctttgatagttctctttggcggtaaaaacagcacaatgacttggctcacaggtataagatataccgcattcattacttaccacaaatggttaggaagattcatgttagtagactgtacgatccatgcaataggatacacctaccatgcatacatagaaaattactggaaatacgtgaagtatagtgatctatggacatccggaagacatgccatgatcattgttggaatacttgtgtttttttcgttcttcttctttagacgacattattacgaattgtttgttattacgcacattatcttagcaataggatttttccatgcgtgctggaaacattgctataaacttggatggggtgaatggataatggcgtgtgcactgttttggattgctgaccgtattctgcggctaataaagattgcaatttttggaatgccatgggctaaattgaaactgtgtggcgagtccatgatagaagtgagaatctcaaaaagctccaaatggtggaaagcagaacctggccaatatatatatctgtacttcttaagaccaaaaatattctggcaatcacatccattcacggtcatggattctttggttgaggatggtgagttggtagttgtgataacagtgaaaaatgggctaaccaaaaaattacaggaataccttttagagagcgaagggtacacggaaatgcgagtactagcagaaggaccttatggacaaagcacgcgaacacatttgttcgaaagcctcctgtttattgccggaggggcgggtgttcctggacctctgtcgatggcaataaaggcaggtcgccaggtcaaaagcaacgattctcatcaaatgatcaaatttgtgtggagtgtacgtaaccttgatctcttagaagtgtatcgcaaagagataatggtgctaaaagagttgaacatagacacaaaaatttacttcacaggagagcgaaaagatgaatcgaacacggaggagggagcaattgctaatatgagcacggaaggcagactgctgacgacatcgaaatcagcggaaatgattactgattttggacgaccaaatatcgatgagataattgaagaagcagtaagtggtgcaaaatctttgttggtcacttgttgcgggtcagagggctttgtagacaagacacgagagttgacggcaaaaagagttcttgaacacggtgacaaatggatagaatacgtggaggaattccagaattggtag

SEQ ID NO: 1780 - DNA, 621 bp, Saccharomyces cerevisiae
atgagtttcctaaacatttttacttttttcagcgtccttgtgtctgttgcaacagccgtcagatttgatttgactaacgtcacttgtaataacctacatggacctcactgtggtacctacgttatggaagtcgttggccaaaatggtacatttttgggtcaatctacgtttgctggtgccgacgttttaactgaaagcgctggtgacgcttgggcaagatatttgggccaggaaacaagattcctcccaaagttgactactattgctagcaatgatacgaagaacttttctccactaatcttcaccaccaatatctacacttgtaaccctcaatccattggtgatgctatggttccttttgctaacactgttactggtgaaattgaatacaactcttgggcagacaccgctgataatgcttccttcataaccggtttagctaaccaattgtttaactctactcagtatggcgttcaagttgcttcctgttacccaaactttgcttctgttattttgagcaccccaactgtgaacattttcgctgcgaatgagacattaccagattattgtaccgccatccagttgaaggccgtttgtccaccagacgctggttttgcttga

SEQ ID NO: 1781 - DNA, 495 bp, Saccharomyces cerevisiae
atgaccaatgaaggaataggtataaatagagatacttcaactatatgccttcgagaatatgtctttattcatttctttcctgttaagcttatatcagcactaacaaacaaaacaaatacaatggtcaaattaacttcaatcgctgctggtgttgccgctatcgctgccggtgttgccgctgctccagccactaccactctatctccatctgacgaaagagtcaacttggtcgaattgggtgtttacgtctccgatatcagagctcatttggctcaatactacttgtttcaagcagctcatccaacagagacctacccagttgagattgctgaagctgttttcaactatggtgacttcaccaccatgttgactggtattccagctgaacaagtcaccagagtcatcactggtgtcccatggtactctaccagattgagaccggctatctccagtgctctatctaaggacggtatctacactgctattccaaaatag

SEQ ID NO: 1782 - DNA, 1110 bp, Saccharomyces cerevisiae
atggattttacgtctgatacgacgaattcgcacgacacatcgaattcgcatttaagtctggaagacgctgtgggtacacatcatgctggtgaagcagatgtaaacattgatggggacgagaagcaacaactatcgctattagatgatgatcaggtacgcgcactgaagctacaggaggagaaggatgcgctgttgacaaggagaaatactcttttacaagagatccagacgtaccaaaatatcttgatgaaggaaaataacagtaagactaaaaatggtgatatcctccaaaacgatatcacacaggattttcttaatctaatctcgatctcatcctctaatcctaattcggcgataagtgaccgcaagcgggtcgagaggatcaatgggctaactaacttgcagaaggaactagtaacaaaatacgacacgttacctttgttaaatatgaatctacggctaagttatttgagagaccacacatacccgcatcttcaagtttctgtgcaatcaagagacagagtacataacgatgggattgaagttttggtggtcaattataaattctgcagaaacacgatgaatccttttgaaattcagttcaaaatgttctataaatttgaagattccacactgctgaagtgggaaatcttgcgaatttccacaaacgttagactgaaggccaagcaattactggcaacacgtaacttccagaagtgtctattaagcctttatgagtttgataagatcaagtccaaaaaaactggaattttccaaaatttgattaatttattgaaaaggaaaaccaggtgttatctaatgaataatagtgactcattaattgtggaaagagttattagagaaggaagactcacgacgataaaattgcagataaatttcatcattacaatgcccggtgagagaggcaaacctcgtaactgttttctgcccatgagtaaaatttcaatagcgctatggaaggggggagaaagatttaaccagatagatttggacgagatatgctacggacttatcaaggaatatggtgtgaaaaccgggttaaaggagatctgcaacgtttgcctattcccggacatgtacgccaggtga

SEQ ID NO: 1783 - DNA, 564 bp, Saccharomyces cerevisiae
atgttatataacaaagagcagggaacaagcggcgctagtagctctggtcgtagaacgaaattccacttcgatcgttttgtacaaatggttctgttcattgccgctaatcccaattattgctgttcagtagccagtatcccgaaatctggtgtcacgccagatttaaaaagagcagatattcttgaacagaagatcaaaagcttaaatagtgcgctgagtccaaaattgaaggaagaaagtcgtcttggtgggcctttgcataacccctctattctaccagccccatctttttcatcactaccaatatcatccaatggaaagaaatctttagcaggatatagacctaaaagtaggaagaaacaaactatactccccaacggtcaaccaaaagagtgcgccacttgtggtgacacctggacttctcagtggagaagtggacctaatggaaatgttgagctatgtagtcgatgtggcatagcatataggaaaaaaatggagaaaaaaatacgatcgcaacaatcctccgatgatggtactaaaaattttatatttaaaaataaatag

SEQ ID NO: 1784 - DNA, 846 bp, Saccharomyces cerevisiae
atgaagaaaacaatttacaaagtcctcgtaagtttttatcaatatgtcggtttaggtaaaaagttccatcctagccacgatacagtattaattattggcggttcttcaaatgagttaggcatcgagctctgcgagacatttatagaagattatcatacaaaggttataaatattgacactatagacagtattaatggaaaaaacgcaaggagaagtgaaaaactgtatacttttatttcttgcaaagatttcagtgacataaaatgtcttgaggaatccatgctttaccttcaaaatttagaaataattcctacagtgctcattaacaacatgcaggagggaatcgaatcgactcttctcaaagaagacaaatttttgagacttgatgaagagtctttaaatgaattcgagaaaatcgtgaggtataatttacaaagtgtaatattgataactaagttctgcttgagtaacatttttccaaaggttcaagctgaagctcaagaaaaagcaaaggggttctatattgtcaacatatcatcggtattgacgttaaaaccgtgcaaatcaggaacacattttattacatcgaaatgtggtataaactctttccacgatggaataacctcagagcttaaattgaaagatagtaatttgaatgtaaaaacgctgattgcatatttacccagttttgaaagtgaagcacattggaagagactttccccgagtatctcgaaacatctcgtccactgtctacttgagggaagatatggtgatacaattctcgaaagcaaaagatcaattggtgatattcttttgataactggtttcaaaagctcttttacttaa

SEQ ID NO: 1785 - DNA, 882 bp, Saccharomyces cerevisiae
atgcatatgcaactcaggaaaagaaaaagggttgactattcagggagaaatcagacgtccgatcctccttcaaccacaacggcagcggtaccatccattattgtccctaagaagcgtaaagtagtcgcacaaaacatggttagtccagctattcgagccacaaccacaacactgggcacctcaaatataataatacctaagcctctgcagcgccctaaattccacaatagcgccagcctatcttcacctgatgatgatcccgaaaagatctctgtattggaagttcagaaaaatttgtccaatctcatcaaaagacaacaaagattattttataaagatatacataagccgactctcgccggcttgaaaaatttcgaaatgttaaggctgcccaatgatctaaaactcctacaaaacatcgtaaacctattatattcattcgagcaattaaacagtgactcgaagacaagaccagtcactacttccaaattaaaggcctcctctcaagcgcactcagacaaattgaaaaaaatgctagctgagaggaaacctccatttagccaccccagtcacagcggcactgcctaccacaatgacatcatccatgagatagcgaatttgcattctattaacctggtagatttgattaatttggaagtatataataacaattgccatacaaacaacacagcgttgcaaactacggcgaattcgctgacacttaatagcattatcaaaaagcttgacaagccaatactgaaagaaagaaataattctctggtatggccccataaaagcagatttaaagcaaaaaggaaccaaccttcgcctggccaatctttaattaacaatacagatataactctctacaacgatgtatag

SEQ ID NO: 1786 - DNA, 669 bp, Saccharomyces cerevisiae
atgcacaatcaggaagagtggctagacaaggacaaaactttggtgaacgaagaagaaaatacttgcatcaaccattcttatacaaaaaaggacactaataactatcgggtcggtaaaagcggtattaaggacttgaagaagcctacgaaccagaaggaaattgcgataaaaaatagggagttaacgaaacaacttactcttctcaggcaagaaaataatcacttacagcaggcttgtaaaattctcagcgaaaacaagatcattgagaacagaaaatccatagaaaaatggaggacaatttgtgagatggaactgtcttttattttaaattccactttaatcaaaatcaatagaatgggcggctataaagattttctagaaaaagaaatggaggctaaaaagagaagattggaatatcagattgacaacggtatggaagatcaaatctgtgaaataaaggaaagtgatgactttagacaactttcagaagttgagaaacaagagtgggagagtcaaatgaatgaacagctgaaagagttggaaaaaaaaaaaatagcggagctggaaaaattgaataaggtgctgcatgatagcgaagggaaagattttggaatggctgaactatgcactaggttaaaacttgactacagcttaatctttccacaatga

SEQ ID NO: 1787 - DNA, 672 bp, Saccharomyces cerevisiae
atgaagaaacaaatattaatagttgctgcacaaagtattttatgttctactgtttttggcgagcgaagtaatgtaggcctttccactgaagagctaggaggtgactcaattttatacttcaatgaagaccctatagtgattgaaatcgataagaaagctattgacaagaagactttggaacagttggcaagcacaagagatgttgttcttactgatttaccggacactcttgagtttatagacttcaacgagtacgcgaaaatgaagtcaaaatcagatatgctactagagtatatcaacgaatacgaatttgatgattttgaaagaagttctgaaggcggtcttgaagaagaagaagaagaggatttaatttatgacttcaatgcccaagctgaagatttgggtaagcttggttcaaatatatatgaagtagtcgaagaaaagaatattgttaatacttacgatggaaaccttatcaatgcaagtacaactgaatcaacgactactattcggcctttcgtgacttctcactcctacgttgcttcttctacaccttattcgaatatttcatcattgaatgaggactacgataatgcgagcaactttttgactcctacaacagtggctcttgcggtacttttaaccattttattatttatacaggcgtattaa

SEQ ID NO: 1788 - DNA, 1122 bp, Saccharomyces cerevisiae
atgactattgatggagacgtacatgaaatttccccatttttccaggttaggcaaactaaatggggcggtagggcttgtttcagtaatggtaatattcctaaagggacaacagtcttgcaagtcagtaattttacaggaacatctatttcctatgagttcaggaaggaagtttgtcacaattgtttcgcatacgctaatgcgaaaactatgaagtacaaactaaactacgattacctgagagatttggtttgtaatgcacactaccaaattaaccctaagaagtttctgggcgctggactgtggttctgttcagaacattgcagaacttcttatcttcaaataccaaatatcattgaattaattgaatgttatgagatattactgcatcattttccaagcatgctgaaaagatataattatacctctgaacaggaggaaaaattaaactctatcttaatttcggaaaatgtcatacagtcttcatgggatgagattgaaagtaaatggataccgcgcatcaacaacatgaaatctgcgaagagaataaatcaattaccacccacttgcgaagatgaatattgctgcattaggtttgtgtgcgagagtttgtttaatcttaaatatatggatcctcagtgcataacataccgagctttcaatatgttacaatcgaatgagcttagcaaaatatctaaatttcctgtcttactgcactttcaaaaattagtatttcaaacactctatattctattaccttcacatttgcatagaatgctctccataccgctattgagacatatattaggtactgaatatgggaatgcttttggtttatggcaagagggcgaagcctcagacagcagagaatattttggatactgggtatttccagaagcctcctatttcaaccactcttgtaaccccaatataacgaaatatcgtaaaggtaattcaatgctattcactatgaatagagatataaaaaaggatgagcagatctgtatcgattattccggggtactggacttaccaacagtaaaacgccgggcctttttggccgacagttggttttttgattgtgcttgtgaaagatgtaaatcagaattgcaatctgtccattag

SEQ ID NO: 1789 - DNA, 642 bp, Saccharomyces cerevisiae
atgattatgaatagtacaaacacagttgtatatatcaaagttaagggtaggagaccacagggattcttggatcctcccaaatttgagtggaatggaacaaaggagcgacagctttggacaatggtatcaaatttgaattattcacaagatcaaatagattggcagaatttatcaaaaatatttgaaacgcctgaattttttcttaaaaagagaacatataaattatttgctgaacacttagagcttttacaactacaattggagaaaaaaagagatcttgagaagtattcaaatgatcaagtgaatgaagggatgtctgatttaatacataaatatacccctactttacaaaatgataatctattaaatgtatccgcaagcccactgaccacggaaagacaggattctgaagaagttgagacagaagtaacaaatgaggcgttacaacatttgcaaacttccaaaattttgaacattcacaagaaaacatcggatagtgagaataagcctaatgacaaattggataaggatggtattaataaagaaatggagtgcggtagttcagatgacgatttatcttcgagcttaagtgttagtaaatctgcgttggaagaagcgctaatggacagattgcaattctga

SEQ ID NO: 1790 - DNA, 471 bp, Saccharomyces cerevisiae
atgatggatggttccataacaaggaaggtaacatcaacgttgtccaaccaattggcgacctggaaatggaaactgcagttatcgttattggaaagaaaattagcgacaataaacaatgattattttctcctgcaatgggaactcctttttataactaatgaagtgatgaaatggaaagaaatgattgcctttttggaaagccagttattttgcacaacgcaaaatttcgtggcacaagagacacatgacagggaaacctttcaaagcctggtagatgattataacaaacagttgagcgaaaataacctgattatttctgtattgaaaagtagaccacagctatcatcatttcctatatatttgagcgatgaggtgtgttcacaccttaaattcgtcatcgcggaactaaattcattgataatagttttttttatttctttagtatttttgtgggtatcgatagaagtttaa

SEQ ID NO: 1791 - DNA, 3309 bp, Saccharomyces cerevisiae
atggttctgcttaacagaaggaaaatacaacctaaggaaataggacagtctgctgattccttctctgaaactccatgggtgattaaagaaagtagcgagcgtataaatgattatgacagtgatttaaaaaagctagatttttacaaaagggatatattcacctgtgagattagtggaaaagatggcctttcgtatttcaaggcgttaaaaagcgaagaacagcaccgtgaaaaggtcagatatcttttaccaaaagaactaaggaaggctatagcaaatttcgcaaacttcagtccgataaggaaggtaggacaccttgtagaaagcgcatttcagcgttttagtaaccgtttctttataggcgatacggtgtgcttgaaaactatccaaaaaaatgcattgattacctataaagaaggagagcctaacttggtagaatcaccaactattgaaaacaatgtcacgttgttccttgtcaaggatgtgtttcaatctaacgggatgatggaaagtgaaaagggagaaatttctgccccaaaattgtcactgtatttaatcacagaatgcctgaatcgagaatctaaaggtgcggccctaattgtaggccagaatgaaattaaaaggccagaatcacacttttctaaattcataattgcgtgttttcttaatgaaatactcataaaagtatcgaataaggagcacgcaccatggagggtgaaacaagaatatatagaaagatatgatgtaaaccctaaatgctctcctaatatgattgattatttgccggatagaatgaactcatcttcttccgagctttacactcctcttactataccaccagagagcgatgttgaacctgctgactggaaggaaacgtcggaaacgtcggaaacgtcggaaacgtcactatctaaaataaaagcaattgacgacgagatttcagtctcatttgaccacatttacgataatgtgaactcccttgcctacaatgatttgaagggaaccgtcgacgacaaggagcttccattcactgggccttcgataccatttgaaaatatcagctacttagatagctccttagaatataagaatatcgatcaaaaatggttcaaagagtgcagtcaatttccaacggaacgactattggttgtttatcaattcctgagcttttttggacgttttattggtctatcacattttaattttgatcagttccttactactatcaagtgtactagtccggaggctttagtagatgaatatgtcaaaataaactttcttaaaacttacaacagcaaagggagtttcacaaatgagaagccaagaaacgaaatatataatcaagtgaccagtagtaacgtatcccagcgtgagaaggctaacgtctttaatgcagatgagagtcaacgaatacctagcaatttcaccagaaaccagaaaatgaggaaatttataacggataaaagtactgaatttgtaatgtattccatttttaaagggaagcctctaaaaaatgacgatatggagtttcaatcgtacgaaaaagtgaatatactttacattgatatagtttgctcgttaatgtgtctgatgacggataatgaacctgattggaattgtaatctgatggacaattggactgaagaaaagcgaaaggaggaaggaaataaaacagaaattgatatagctatagaaaagtgtttgaactatggagatactagctgggttaaacttttgcacaataaaaactttagcaacggcaattggttgatctgtctccttggaatcttgcaacagaatacacatatgatagcatatagtgatgtcgcaaaatgtatcacaaaaaaaatactacctttatccatgaattttgtaaatttaggtgatgagctctgggataactttcgcaagagattatctataaaagataaaattgatgttttatgggttctcgtagattttgcgtccaatttctcgagttatattaaggagttggtagataaagtaccaaaactgtgcaatggaatccgcttaaagttggatagtgcaaaaaaagagtatatcaaattgaaacggcaactaaaaacgttaaccaaaaatcgcgtgaagcttcacagcaacgtttcaatgaaccgatatggatcagatgaatgtaaaggtaaggtcaatgcccttaaagtgaaaattgcatacttaatggaagatatcgccttcctagaggcaaaattgattcagagcgatatcaagagactagagattttgggtaaagatagaaatggaaatcgatattattggatggactcaaatggatcgtcatcagccatcagtgaaaaaaatgaggaactttacaactgctgttttttgtgggttcaaggaccctctgaagcggatataaacttttgcttagatgtcgacgtcgaatctttgaaaaaatgggagttgttagctaaagcaaaaggtactgcctacgcgacaaaagaagtcttttcaatatttaggtcgacagacgggtcttactatcaaattgctcaaggtgagaatttcatgataattaattcaaacggtatcttaatgaggccaactattccggcattcatagacaaaaaaattatatcagaaactccagaaaagctcctactctctcatcatcaatgggctttcttcaacgatatagaagatatacatatgttagtagataggttggatgatttaagagaaaatgagggacaattgaagaaagctttgacatccaaaatggaccgtattgaagtatcatacaagcaacagttcaaaattaaaaggcgtattgaatgtgatgaaaccttcaaaaaaaatcacaaacttttgaaaaataacgagttcacgtttcctgaactgaaaagaattgagacaacttgtacatccaacggccaacatttttccaacatggagaaaatttccaaaaaactatcaaggacaaagaatgatctcgttttggaagcgattttaaaagacgtagctcaccttggagaatgtgaaagagcacttctcaaaaagcaacaaaatttgatttatcctttgaattttcatttcgaacaattgaggacgatagacctcgaatttatagttgaaacgaaaagaaaaaggcaagaggatattcttacgaagcttttaaatcatcagaggtataagcatattagtcatgtttcaggctatgggataagttctcaacgagtagataaagctgcacatcttgatgtgcagggtatattagaggagattgaatgtcaacttatttcaagacgacgagaggatgaagaacgcaactag

SEQ ID NO: 1792 - DNA, 1944 bp, Saccharomyces cerevisiae
atggcgtcacagcaaaacaaacacgcttttctttcaaagaatagaatctttcacaatcccgataatgtgtcctcatcaaaatctcgaaaccttatggatatcacaaacacgacaaacaccatgaatggctctagaccttcgtctatgaagagttcattggctcttccacccgtaaaggattccttcccatctgtatctcgatctgcatcattaaacatcaacatgagcaaaattaaggacttaaaagaccgccaagacaaaataaggttccaaagacatactctcaggactcaattgattgagtgcgaaagagaaatcaaaaccatcaagtttcgagatctcaataagtccaggtttgaactttataagaaaaaatccaaacaagcaaagtatctcaaacaggttagagatttgacgcaaaatctgaactccaaggacggtgaacgcgctgatttaattaagaagaacaaatccgctttggcaaccttgcaggctgaactcgaccagaatctgatcttgaaaaggcaggaatctcaagaattgtacaataataagcttatcttttgggaaaatgagctgcaaataatggaaaatgtcgagcctgaccacgaaatcacagaggaaatatctcagttgaagaaaacgctgcaagagctcaacataaattgggcgaatttacagaagcaaaacttggaaagacaagtaaaccacgaatcacaattgaggaaggattttattgcattcaaagaagctaagttaaaatccatggaaaatttgacaaacaaacatcgtgaattacttgatcagatagccactctacaatcggaaagtgagaagttacacaaggagatcatggatatagatagacaagctgaatattcggaacaaaacatctcagaaataaatgaaaatataaaacaattggaattggcaaacaacccactaataagcaaatccttacaaaactcgcaagatttggaacatttacaaaaccaaatggaaaatttgaaagaaatggcctctaaacaggaaaaattttataatgatacctataacactgtggaaaaagaactcctgcggagtaggagacttgaaaactctattattgaacaaaaaggcacgatgcgctgttacgcttacgtgatggagcaaaatttgcctgagaaccttttatttgattacgaaaatggcgtaataacccaaggtctaagcgaacatgtttacaaatttaatagggtgataccgcatttaaaagtttctgaagataaatttttcactcaagagtatagcgtttaccatgatatgtgcctgaaccaaaaaaaaaatttcaacttaatatctctaagcaccactccacatggctcattgagagagtctctaataaaatttttggccgaaaaggatacaatatatcaaaaacaatatgtgatcaccttacagtttgtatttttatcagatgacgaattttctcaggacatgctcttggattattcccacaatgataaagatagcataaagttgaaatttgaaaaacactcaatttctttggattccaaacttgtcatcatagaaaatggactcgaagatttgcccttaaattttagttgtgatgaacacccaaatttacctcattctgggatgggtataatcaaggtgcagttttttcctcgagattcaaaaagcgatggcaacaatgaccccgtaccggtggacttttattttatcgagttaaataatctgaagtccattgaacagtttgataaaagcatctttaagaaggaatcatgcgagacccctattgcacttgttctgaaaaaactaatttctgatactaaatcctttttcttgctaaacttgaacgattcaaaaaatgtcaataaattattaacgatttcagaagaagttcaaacacaactttgtaaaagaaagaaaaagctcacttaa

SEQ ID NO: 1793 - DNA, 1464 bp, Saccharomyces cerevisiae
atgcgattccatcgtcaaggtatctcagccatcataggcgtactactcattgtactgcttggtttctgttggaagttatctggatcttacggcatagtatcaactgccctaccacacaatcaatctgcaattaaaagcacagacttaccttctatacgatgggataattaccatgagttcgtcagagacattgattttgataacagtacggctatctttaattccattcgggctgctttaagacagtctccatcggatatacatcctgtcggagtatcttattttcccgctgtaattcccaaaggaactttaatgtaccatgccggatcaaaagtgccaactaccttcgaatggctagctatggaccatgaattcagctactctttcggcttgaggtcaccatcctatgggagaaaatctttggaaagaaggcatgggaggttcggcaatggcaccaacggtgatcatccaaaagggccaccaccaccaccaccaccaccagacgaaaaaggtcggggttcacaaaaaatgcttacttatagagcagcacgggacctcaacaaatttctctatcttgatggggcttctgctgcgaaaactgactcaggagagatggacacgcagctaatgttgtcaaatgttattaaagagaaattgaaccttacagatgatggtgaaaacgaacgaatggccgaacgactctacgctgctagaatatgcaaatgggggaagccattcgggcttgacggaattatcagggtagaggttggctttgaggtcgttttgtgtgatttttcggctgataacgtcgaacttgtttcaatgttagaaatggtccagcctaaccagtacctaggcttaccagcacctaccgtaatatcgaaggaagaaggttggcctctggatgaaaatggaagcctagttgaagatcagctaacagatgaccaaaaggcgattctggaaagagaagatggttgggagaaggctttttctaatttcaacgcagttaaaagcttcaatcagttgagagcgggtgcagcgcatgacaacggggagcatcgaatccatatcgactataggtacctagtgagcgggataaacaggacgtacattgctcctgatcctaacaacagaagattactcgatgaaggaatgacatgggaaaagcaattggacatggtagatgacttagaaaaggcgctggaagtcggatttgatgccacgcaaagtatggattggcagttagcatttgatgagcttgtccttaaatttgctccattactaaaatctgttagtaacatactgaacagcgatggtgatattaatgagtcaattgccatcaatgcaacagcactcacattgaacttttgtctaccaatatgtgagcccataccaggccttaaaaacggatgcagactttttgatttggtcatctgctgtcagcgttgtcggagaaattgttga

SEQ ID NO: 1794 - DNA, 834 bp, Saccharomyces cerevisiae
atggttggtatttacagaatacttgcttcgttcgtcccactcctgggtcttctttttgcattccatgatgatgacatgatagatactgttacaatcatcaaaactgtatatgaaacggtgacatcaacttctactgcacctgcacctgccgctacaaaatctgttagtgaaaagaaactggatgacactaaactaacacttcaagtaattcaaactatggtatcatgtttttctgtaggtgaaaatccggccaatatgatatcctgtgggctaggagttgtaatcttaatgttttcattaatcatcgagcttatcaacaagctcgaaaatgatggtatcaatgaaccgcaaaggttatatgacctaattaaaccaaaatacgtcgagctaccttcaaattatgtgaatgaaaaaatcaaaacaacatttgaacctctcgacctatacttaggagtaaatatgaatacttcaggaagtgaactaaaccaaaactgtttgattctcaaacttggcgagaagacggctctgcctttcccaggcttggcccagcagatttgttatacaaaaggcgcttcaaatgagttcacaaattataaattatcggacatacagggcaatttaaacgaaaacagccaaggaattgctaatggcgttttccagaaaatatcaaacattagaaaaatatcaggtaattttaagtctcagctttatcaaatttcagaaaaaatcaccgacgaaaattgggacggttctgctgtaggcttcactgctcatgggagagaaaaaggcccaaacaaatctcaaatatcggtttcattttatagggataattaa

SEQ ID NO: 1795 - DNA, 1413 bp, Saccharomyces cerevisiae
atgcagaatccttacggtcactttactaacaataccacggaggacagggaagcttcatctcaaggaggaccattcggccaaagcctgaataggcccctagattacgccggatctttcccttctctgacatacaataataataatttcattgccaatcaacaaccttctctgcctttgccagaaccacgtttatcttggaacaacgtcaaccaggtttctaaccctttgatggtaacaccgcttccgggattacaaaaacgtatgaacaaaaacattaaaaagaaattaccaagagtatctaagaaggcatcagccctttctaacggggtatccggcaatgtaatgagcaacagtaatatagtagggcatggtgctgtaggttcggcatcgggatggaaagttgaaatgggtggcagtgatgaattagagagaagaaagagaagggcagaaagattcagtcagggaccatcagcgacgacgaatagtaacgataatttgaatgaagactttgccaacctaaatgccattagtagcaaatctcatcaatatgacaaaaagattcatgtggtagggcgttgccaaactctagagaaatcttatctgagactaacttcagagcctaatcctgacttgatcagacccccaaatattctacaaaaaatgtattgcttgttaatggacaaataccaatctaaaacagccacttatacttacctttgcgaccagtttaaatcaatgagacaagacctaagagtgcaaatgatcgagaactctttcactattaaagtgtaccaaacgcatgcacgtattgccttggagaacggagatcttggggaatttaatcaatgtcaaaataggattatggcgttattcgaaaaccctacaataccaaaaaaatcttattccgaatttatatgctattctgttttgtattcgatgttaaccgaagactatccgtcgatttctcatttaaaacttaagttaatagacgatggctcttcggaaatcttggaggacgaacatgtcaaaatgatatttgagttgagcgatatgaaactagtcggcaattatcactacttcatgaaaaactacctaaaactgcacaaatttgaaaaatgtctaattaattcattcttaaatctagaaaagttgatatttttgaccataatttgtaagagttataaccaggtcaatttagattttgttaaaagtgagtttaatttcaacagtatagaagagacaacaaatttcttgaatgagcaaaacttgacggagttcatattaaacaaacaaatcactgacagtaatggcaaaagtagtaatatcaagattttgaataccaagggatgtagggtacagttgatacaaaattatatgaagtctaaaaaaattgatataaagggacaaaaatga

SEQ ID NO: 1796 - DNA, 1167 bp, Saccharomyces cerevisiae
atgaattgcacacttacagataataccagagccataaatgtggcctccaacctcggtgctcctcaacagaggacgatttttgccaaggagagaatatccatcccaggatactacgagataatccaattcctgggcaagggagcctatgggacagtgtgctcagtgaagtttaagggtcgaagcccagctgctaggatagcggtaaagaagatcagcaacatctttaataaggagatccttttgaaaagggccatccgtgagctaaaattcatgaacttcttcaagggccataaaaatattgtaaatctaatcgatctagagatagtgaccagctcgccctatgacggactgtattgctaccaggaactgattgattatgatttggcaaaagtcatacattcgtccgtgcagctctcggagtttcatatcaaatactttctttaccaaatcctgtgtgggctaaagtacatacacagtgcagatgtcatccaccgagatttgaagcctgggaacatattgtgcacattgaatggctgtttgaagatctgcgattttggtctcgctaggggtattcatgccggatttttcaagtgtcattccactgtgcagccccatataaccaactacgttgctacaagatggtatagggcgcctgagctgcttctttccaaccaaccgtatagtaagtccgtagacatatgggctgtagggtgcattcttgcagaattctatgctcgaaagcctgttttcatggggcgtgactccatgcaccagatatttgaaatcatcaaagtcttgggtactcctgataaagatattctgatcaagtttggcaccattaaagcttggaatctaggcaaaaacagtaataaccctgtatataaaaaaatcccatggtccaacattttcccctttgcctcgcatgaagcaatcaatctcatagagtcattacttcattgggactcaacacataggttaaacgtggaacaagctatatcacatccgttcctaaacgaggtgcggaagccagacgacgagcctgtttgccttcagggtcctttcgacttcacctatgaatccgagttgaattcaatgtccaaattaagagactacttggttgaagaagtgaaaaatttcaaaaccgatttgtcctcctcgtctttatag

SEQ ID NO: 1797 - DNA, 2667 bp, Saccharomyces cerevisiae
atgaacagtgtttgggatgatgctagaatagaggacagaacggtggacaaaccagtaggctcctctcacgctcaggagaaactcgcgctggtaaaatcaactttgtttaaacttgaccaagaagatagaccagaatgcgattcctgggtacaactagtcaaattgatctgcgacgaagaccgtgaagaagaatttactacattcaaggagttattaagggaagtcaaaaacgttaatgataaatccgtcacaggcgttgccttgattcattatatcattgtatttgatcgtgcagactacattgagttactacatgataatccttctggtgcaaaattagatttgaatcttgtcgacgacattgtaggttacacacctttgatgtggagtttcagtctgcagagaaggaactgttgcttggagctgttcaacgcattcgacgagataaacttcaacatgacgaataaggctggattaaccgcttgggatatggttcctccatattcaccactttcggaatttttggaacaaaacaatatgtttcgataccgtaccgaagtaaaacatgaaatacctcaaatttcccaaccgaaagacacctctcttctaatgagtaatgaagactctaccacgaaagaaacttttgataatattgacttacaagtcgccggtttgaccctgtcccctggtgcaaatgacaacatgtttctggattctgatgaaaagaacatgaatcattctcagggagctgcaaccctaatagatcccacatatacagaagactaccacggtacatttgattatgataaactatctccggaccaatacttggaattttccgactttgatataccacaaatcctgaatctattgatatcgctaccacaaaaggaacctcacatgaccacctatccagctggtttaatataccaatgtattagatatgctgatcataagataaagtccaagccactagtagaatcgttaattaacttatctctaacaaaaattctgaccagtgtttcatccaacggagctgcaggattggtctccacagaagcttctttgcaagcaggtgacattgtattgcaatcgtattggttaagttgtttatcttttctctattactacctctgtagagatgattcatttttcaagaggcatccaagcgtgttacaagagctgattaacaccatccactctattatcatagaactgacatcttccattcattgcaggttgatttctttgatagattcaactttactagcatacacaacaatccaggacgttaaacaaactttatacaaaagagactggaacttttttaaaaagagaaagcaggccaagcttttattgaaggaaaagaacagaaaacaattaaaggaacaacaaaagaaagaacttcatcgaaaaagccagggtcaagaaaatcatgaagaagaggagggtcaacaagatgggaatgattcagatgatagggcatcaacaaatgatgataacaattctagtgtttcactcttttatgataaagaaattttgagacatttatatcctccatcattcgaagagcagatgaaaccctctccactaaagattgttcaaatatttggtgccttgtcttacgttcttaatttacatcaaacgcatccgattttccaacaacagtgtctctctatttcagttaactggtttgccacgaccttattcaataagatcttaaaggacaaaaagaaaagatctttatcaagagcccatgctattcaaatcaggttaaatctttcaactctagaatcatggatacagaacaacgatttctgtgttcctaaaccgatgcttattgatgacttcatgtggcagcgctttccaatgactttaattcgcgacgttggcgagatagatttatcggatccgatactaagaaatgtagcaacttacaaacctatagatgaaaataacaaggacttgatatatgatacgtcaaactcattattttactaccaacctttccataagatcgcccaaattcatcttgagccagttttccaactattacaatggttgcaagtagctacaacactagatagtgaagaatcattaatatcaacaatgaatttattaccaagaattacaccagtacagctcctaaagtctatggaaaaatacaattacgaattgaatgaaaataaattcaactccaaactgaagaaatttttaaacaacaaaatcaaagatagtaagatgagcaaggcagacgcgtatttacaagaacatgaaataccgtatctagttttaccaactatacccgaaatgacagacttgtattcaaagggtcctgattcacattctttccaaccgtttttaccaggcagtatccaagacgatgtttatgaaattcacgatgtcaacttcaaacaaagacaaaatgaaccacagatatctcggactaactcgggtacctcagattttactggagatgaggataaggcgcaatatgaaactgaaggggtaggggaaagtatagatattaacgaaacagtcgaacccgagagcaacgcgttcaatgtaggtaatgatgattattttaaagaattaaatattccgtcttcaactgctcaacgtcctgcttggtcgaataatgatgatatggaacaaaatccgtggtaa

SEQ ID NO: 1798 - DNA, 834 bp, Saccharomyces cerevisiae
atgggtttacctaaatcggcatataagaagttactcatagattgtccaacgagagtcattaataaaaactgtgcccaacgagtcaaagatgtttctccgctcattacaaacttcgagaaatggtcggataagcgcaagaagctctatttcaaagatgaagaggaaatggtggggcagttccatttggaaaatttcaatttaaaaaataacttatatggtaggcttttagcttctccaatgagagcagaaaaaatctcaaaattaaaatcgtgtagagaattactaattccattgaaagtggtaccatcaactggcaaagatcagcatgctgataaagataaactaaaactggtacctacactagattattccaaatcatacaaaagctcgtacgtattgaattcagcctccattgtacaagacaacttggcggctgcgacgtcatggttcccaatctcggtattgcaaacatcaactccaaagagcctagaagttgattcctctacatttataacggaatacaatgctaacttgcacgcatttataaaagcaagactttcagtgataccgaatgttggaccttcttcgataaatcgtgttttactcatttgtgacaagagaaaaacacccccgattgaaatacaagtagttagtcatggtaaagggctaccaattacacagtctgtctttaaccttggttatctccacgagccaactctagaagctatcgtgagtaaagatgcagttactaatggaatttacctggatgccgacaatgacaaggatctcatcaaacacctttatagtacattattgtttcattcagttaactga

SEQ ID NO: 1799 - DNA, 1869 bp, Saccharomyces cerevisiae
atgaacagacaggaatccataaattcgtttaattcagacgaaacatcttcgttgtctgatgtagaaagtcagcagccgcaacaatatatcccttcagagagtggatctaaatccaacatggctcctaatcaactgaagttgacccggacggaaaccgtgaagtcattgcaggacatgggtgtgagctccaaagcccccgttcctgatgttaatgctcctcaatctagcaagaataagatttttcctgaagaatatactttagaaacccctacaggtttagttcctgtcgccactctacattccataggtagaacttctactgcgatttcccgtacgagaactagacagatcgatggcgcttcttcgccttcttctaatgaagatgctttagaaagtgataataacgaaaagggtaaagaaggcgactctagtggtgcgaatgacgaagctccagatctagatccggaaattgaattcgttacctttgtgactggcgatccagaaaacccccataactggcctgcatggatccgttggagttacactgtcctactgtcaatcttagttatttgtgtcgcctacgggtctgcttgtatcagtggtgggttgggaaccgttgaaaagaaataccatgtaggtatggaagccgctattttatcggtttctttaatggttattgggttctcgctgggtcctttgatttggtctcctgttagtgatctttacggtagaagagttgcttactttgtttctatgggtctttatgtcatcttcaatatcccttgcgccttagctccaaatctaggtagtcttttagcttgtagatttttatgtggtgtttggtcatcatctggtttgtgtttagttggtgggtctattgccgatatgttcccaagtgaaacaagaggtaaggctattgctttcttcgcttttgctccttacgttggtcccgttgttggtccactagttaacggttttatttccgtttctaccggacgtatggacctgattttctgggtcaatatggcctttgcaggtgttatgtggatcatatcttctgccatcccagaaacgtacgctccagttatcttgaagagaaaggctgctagattaagaaaggaaactggtaatcccaagattatgactgagcaggaagcgcaaggtgtcagtatgggtgaaatgatgagggcttgtctgttgagacctttgtacttctctgtcactgaacctgttctagttgctacttgtttctacgtgtgtttgatttactctctactatatgcgttcttctttgccttccctgtcattttcggtgaactatatggctacaaagacaaccttgtgggtttgatgtttattcctattgttatcggtgctctttgggcgttagccacaactttctactgtgaaaacaagtatttacaaattgtcaaacagcgtaaacctactcctgaagatcgtttgctaggtgctaagatcggtgctccatttgctgcaattgctttatggatcctgggtgctaccgcttataaacatattatttgggttggtccagcttcagctggtttagcttttggtttcggtatggtgttgatttattattcattgaataattacattattgattgctacgtccaatacgcatccagtgctctggctacaaaggttttcttaagatccgccggtggtgctgccttccccttgtttaccattcaaatgtaccacaaattgaatctgcactggggttcttggttgttggctttcatctccactgctatgattgctttaccttttgcattttcttactggggcaaaggtttgagacataagttatccaagaaggattattccatagatagtattgaataa

SEQ ID NO: 1800 - DNA, 1290 bp, Saccharomyces cerevisiae
atgggaggagaggttctaaataatgaaggaatgccactggccgaacttaaacaggagaccattcccatatcacgatcagagagttcagaatcattgaacagtttaacatcaactagaagctcatcgagcaataggccaaagacatatttctgtgactatgatggctgtgataaggcatttacaagaccttcaattttgactgaacaccaattaagcgtacatcagggtttaagagcatttcagtgtgataagtgtgcaaaatccttcgttaaaaagagtcacttagagagacacttgtatacgcattctgatacgaaaccattccaatgttcttattgtggaaaaggagtgacgactcgccagcaactgaagcgacacgaagtaacgcataccaaatctttcatttgtccagaggaaggatgcaacctccgattctacaagcatccacaattaagggcacatattttatctgttcatttacataaactaacctgtccacactgcaataaaagctttcagaggccatataggctaagaaatcacatttctaaacatcacgatcctgaggtagaaaatccttaccaatgtacttttgctggttgttgcaaagagtttcggatatggtcacaattgcaatcgcatataaaaaatgatcatcctaaattaaaatgtcctatttgtagcaaaccatgtgtgggggaaaatggtttacaaatgcacatgattattcatgacgactcactagtaaccaaaaattggaagtgtcatatatgtcctgatatgtctttttctagaaaacatgatcttctcacgcattatgggtctattcatacggaagaagatatcccactggaactaaaatataaaatttctgatattcaacaacttgtccaagaccacggagttcaactggggaatagcaaacactcgaatgagcaggatgaagagaagatttccaataggttgaggaaaaggagaaaacttaccgaaaacaataatgtagagtttttacagaatgaagtggatttagaaaagcgacttgagtctggtgaaaatgggctaaaccttttattgaataccgttggaagaaaatacagatgcttttacaataattgttctaggactttcaagacaaaggaaaaatacgagaaacatatagacaagcacaaagtacatgagctaaagttaaaaatattacaggaaaaggaagaaaataaaacgctagtggaccagaaccataaggaaccttttataattcaaaaggaaacgcagtcagcgggtgacaaataa

SEQ ID NO: 1801 - DNA, 393 bp, Saccharomyces cerevisiae
atggtaagtttcataacgtctaggcaactcaagggcctaattgaaaatcagaggaaggattttcaagttgttgatcttcgaagagaagattttgcacgtgatcatattacaaacgcttggcatgttccagtaacagcacagattacagagaagcaactgaatcaattaattaaaggtttatccgatactttctcaagttctcaattcgtcaaagtgatatttcattgtactgggtccaagaataggggaccaaaagtagctgctaaattcgaaacctacttacaagaagaagatattacaagtaagtttgagagttgcatcctcgttggaggtttttacgcttgggagacccattgtagagagagtaaccttaaattgattgttagtggttga

SEQ ID NO: 1802 - DNA, 1215 bp, Saccharomyces cerevisiae
atgtcagaagatcaaaaaagtgaaaattcggtaccttctaaggttaatatggtgaatcgcaccgatatactgactacgatcaagtcattgtcatggcttgacttgatgttgccatttactataattctctccataatcattgcagtaataatttctgtctatgtgccttcttcccgtcacacttttgacgctgaaggtcatcccaatctaatgggagtgtccattcctttgactgttggtatgattgtaatgatgattcccccgatctgcaaagtttcctgggagtctattcacaagtacttctacaggagctatataaggaagcaactagccctctcgttatttttgaattgggtcatcggtcctttgttgatgacagcattggcgtggatggcgctattcgattataaggaataccgtcaaggcattattatgatcggagtagctagatgcattgccatggtgctaatttggaatcagattgctggaggagacaatgatctctgcgtcgtgcttgttattacaaactcgcttttacagatggtattatatgcaccattgcagatattttactgttatgttatttctcatgaccacctgaatacttcaaatagggtattattcgaagaggttgcaaagtctgtcggagtttttctcggcataccactgggaattggcattatcatacgtttgggaagtcttaccatagctggtaaaagtaattatgaaaaatacattttgagatttatttctccatgggcaatgatcggatttcattacactttatttgttatttttattagtagaggttatcaatttatccacgaaattggttctgcaatattgtgctttgtcccattggtgctttacttctttattgcatggtttttgaccttcgcattaatgaggtacttatcaatatctaggagtgatacacaaagagaatgtagctgtgaccaagaactacttttaaagagggtctggggaagaaagtcttgtgaagctagcttttctattacgatgacgcaatgtttcactatggcttcaaataattttgaactatccctggcaattgctatttccttatatggtaacaatagcaagcaagcaatagctgcaacatttgggccgttgctagaagttccaattttattgattttggcaatagtcgcgaggatccttaaaccatattatatatggaacaatagaaattaa

SEQ ID NO: 1803 - DNA, 954 bp, Artificial Sequence
  Optimized genes for E. coli.
atgaccgataaactgacttctctgcgtcagtacaccactgtggttgctgacaccggtgatatcgcggcgatgaaactgtatcagccgcaggacgcaaccaccaacccgagcctgatcctgaacgcagcgcaaatcccggaataccgtaagctgatcgacgatgctgttgcctgggcaaaacagcaaagcaatgaccgtgcgcagcagatcgttgatgcgactgacaaacttgcggttaacattggtctggaaattctgaaactggttccgggtcgcatctccactgaagttgacgcgcgtctgtcttacgataccgaagccagcattgctaaagcgaaacgtctgattaaactgtacaacgacgctggtatctctaacgatcgtatcctcatcaaactggcgtctacctggcagggcatccgtgctgctgagcagctggagaaagaaggtatcaactgcaacctgacgctgctgttctcttttgctcaggcgcgcgcctgtgcggaagcgggcgtgttcctcatcagcccgttcgttggtcgtattctggactggtacaaagcaaacaccgacaagaaagagtacgcaccggctgaagacccgggcgttgtttctgtttccgaaatctaccagtattataaagaacacggctacgaaaccgttgtgatgggcgcatccttccgtaacatcggtgaaatcctggaactggctggctgtgatcgcctgaccatcgctccggcgctgttgaaagagctggcagaaagcgaaggcgctatcgaacgtaaactgagctataccggcgaagtgaaagctcgtccggcacgtatcaccgagtctgaattcctgtggcagcacaaccaggatccgatggcggtagacaaattagctgaaggtattcgtaaattcgcgattgatcaggaaaaactcgaaaaaatgatcggcgacctgctgtaa

SEQ ID NO: 1804 - DNA, 1917 bp, Artificial Sequence
  Optimized genes for E. coli.
atgggcaaaatcatcggcattgatctgggtactactaactcctgcgtggcaatcatggatggcactaccccgcgcgttcttgaaaacgcagaaggcgaccgtaccactccgtctatcattgcctacacccaggatggcgaaacgctggttggtcagccggcgaaacgtcaggcggtgaccaacccgcagaacactctgttcgcgatcaaacgcttgattggtcgtcgtttccaggacgaagaagttcagcgtgatgtttccattatgccgttcaagatcatcgccgctgacaacggcgatgcatgggttgaagttaaaggccagaagatggcgccgccgcagatctccgctgaagtgctgaagaaaatgaaaaagaccgctgaagattacctgggcgagccggttactgaagccgttatcaccgttccggcatacttcaacgacgcccagcgccaggcaactaaagatgcgggtcgcattgcggggctggaagtaaaacgtattattaatgaaccgactgcagcggcgctggcttacggtctggacaaaggtacgggtaaccgcactatcgcagtttacgacctcggcggtggtaccttcgatatcagcattatcgaaatcgacgaggttgatggtgaaaaaacctttgaagtgctggcaaccaacggtgacactcacctgggcggtgaagacttcgacagccgtctgatcaactacctcgtggaagaattcaaaaaagatcagggtatcgacctgcgtaacgatccgctggcgatgcaacgcctgaaagaagcagcagagaaagctaaaatcgagctgagctctgcgcagcagactgacgtaaacctgccttacatcactgcagacgcgaccggcccgaaacatatgaacatcaaagttacgcgtgcgaagctggaatccctggtagaagatctggtgaaccgttccatcgaaccgctgaaagtcgccctgcaagacgctggcctgtccgtatctgacattgacgatgtgattctggtcggcggccaaacccgtatgccgatggtgcagaaaaaagtggctgagttcttcggtaaagagcctcgcaaagacgttaacccggatgaagcggttgctatcggtgctgcagtacagggcggcgtactgaccggtgatgtgaaagacgttctgctgctggatgtaaccccactgtctctgggtattgaaaccatgggtggcgtgatgaccaccctgattgctaagaacaccaccatcccgaccaaacacagccaggtgttctctaccgccgaagacaatcagtctgctgttaccatccacgttctgcagggggaacgtaagcgtgctgctgataacaaatctctcggtcagttcaatctcgacggcatcaacccagcaccgcgtggtatgccacagattgaggtaacttttgacatcgatgctgacggtatcctgcatgtcagcgcgaaagacaaaaacagcggtaaagaacaaaaaattaccattaaagcgtcttctggtctgaacgaagacgaaattcagaaaatggttcgtgacgcggaagctaacgctgaagcggatcgtaaattcgaagaactggttcagacccgcaaccagggcgatcacttgctgcactctactcgtaaacaggttgaagaggcaggcgacaaactgccggccgatgataaaactgccattgaaagcgcactgactgctctggaaactgcgctgaaaggcgaagataaagcagctatcgaagcaaaaatgcaggaactggcacaggtttctcagaaactgatggaaatcgcgcaacagcagcacgctcagcagcaaacggcgggcgcagatgccagcgccaacaacgccaaagatgacgacgtggttgacgcagaatttgaagaggtgaaagacaagaagtaa

SEQ ID NO: 1805 - DNA, 1152 bp, Artificial Sequence
  Optimized genes for E. coli.
atgttcgaaccgatggaactgactaacgacgcagtgatcaaagttatcggtgtgggcggtggcggtggtaacgccgttgaacacatggttcgtgaacgtatcgaaggtgttgagttcttcgctgttaacaccgatgctcaggcactgcgtaaaaccgctgttggtcagactattcagatcggttctggtattactaaaggtctgggtgccggtgctaacccggaagtgggtcgtaacgctgctgacgaagatcgcgatgcgttgcgtgcagcgctggaaggcgctgatatggtgttcatcgccgctggtatgggcggcggcactggtactggcgcagctccggtagtggcagaagttgcgaaagatctgggcattctgaccgttgcagttgtgaccaaaccgttcaacttcgagggtaaaaaacgtatggcatttgccgagcagggtatcaccgaattaagcaaacacgttgacagcctgatcaccattccgaacgacaaactgctgaaagtgctcggccgtggcatttctctgctggacgcgttcggtgcagcaaacgatgtgctgaaaggcgcggttcagggcatcgctgaactgattacccgtccgggcctgatgaacgttgatttcgcagacgtacgtaccgtgatgagcgaaatgggctacgcaatgatgggttccggcgttgccagcggcgaagatcgtgctgaagaagcggcggaaatggctatctccagcccgctgcttgaagacatcgacctgagcggtgcgcgtggtgttctggtaaacatcactgctggcttcgacctgcgtctggatgaatttgaaaccgttggcaacaccatccgtgcgtttgcttctgacaacgcgaccgtagttattggcaccagcctcgatccggacatgaacgatgagctgcgcgtaactgttgttgcaaccggtatcggcatggataaacgccctgaaatcactctggttaccaacaaacaggttcaacagccggttatggaccgttaccagcagcacggtatggcgccgctgactcaggaacagaaaccagttgctaaagtcgtgaatgataacgcaccgcagaccgcaaaagagccggattacctggatatcccggcattcctgcgtaagcaggcggactaa

SEQ ID NO: 1806 - DNA, 2664 bp, Artificial Sequence
  Optimized genes for E. coli.
atgagcgagcgcttcccaaacgacgttgatccgatcgagacccgtgactggctgcaggcgatcgaaagcgttattcgcgaagaaggcgttgagcgtgcgcaatacctgattgaccagctgctggctgaagcacgtaagggtggcgtgaacgtagctgccggtactggcatctccaactacattaacaccatccctgttgaagagcagccggaatacccgggtaatctggagctggaacgtcgtatccgcagcgccattcgttggaacgcaatcatgaccgttctgcgtgcttctaagaaagatcttgagctgggcggtcacatggcttccttccagtcttctgcaaccatttacgatgtttgcttcaatcacttctttcgcgctcgtaacgaacaggatggtggtgatctggtttacttccagggccatatctctccgggcgtatacgcacgcgccttcctggaaggtcgcctgacccaggagcagctcgacaacttccgccaggaagttcacggcaacggcctgtcttcctatccgcatccgaaactgatgcctgaattctggcagttcccgactgttagcatgggtcttggcccgattggcgctatctaccaggcaaagttcctgaaatacctcgaacaccgtggtctgaaagacaccagtaaacagaccgtttacgctttcctcggcgatggcgaaatggacgaaccggagtctaaaggtgcgattactatcgcaactcgtgagaagctggataacctggtgttcgttatcaactgcaacctgcaacgtctggacggtccggttaccggtaacggtaaaattatcaacgagttggaggggatcttcgaaggcgctggctggaatgtgatcaaagtaatgtggggcagccgctgggatgaactgctgcgcaaagatacctctggcaagctgatccagttgatgaacgaaaccgtggatggcgactatcagacttttaaatccaaagacggtgcttacgttcgtgagcacttcttcggtaaatatccggaaacggcggctctggtcgcagactggaccgatgaacaaatctgggcgctgaaccgtggtggtcacgatccgaagaaaatctatgcggcattcaaaaaagcacaggaaaccaaaggcaaagcgaccgtaatcctggcgcacaccatcaagggttacggcatgggcgacgcggcggaaggtaaaaatattgctcaccaggttaaaaaaatgaatatggatggtgtgcgccacatccgtgatcgtttcaacgtgccggtatccgacgctgacatcgaaaaattgccgtatattaccttcccggaaggctctgaagaacatacctatctgcacgcgcagcgtcagaaactgcatggctacctgccaagccgtcaaccgaacttcactgaaaaactcgagctgccgtctctgcaagacttcggcgcgctgcttgaagagcagagcaaagagatttctaccaccatcgcgttcgtacgtgcactcaacgttatgttgaaaaacaaatctatcaaagaccgtctggtaccaatcatcgctgacgaagcgcgtacctttggtatggaaggcctgttccgtcagatcggtatttatagcccgaatggccaacagtacaccccgcaggatcgcgagcaagttgcgtactataaagaagatgagaaaggtcagattctgcaggaaggtatcaacgaactgggcgcaggctgctcctggctggcagctgcgacttcttacagcaccaacaacctgccgatgatcccgttctacatctactactctatgttcggttttcagcgcattggtgacctgtgctgggcagcgggcgatcagcaggctcgcggcttcctgatcggcggcacctccggtcgtactaccctgaacggcgaagggttgcagcacgaagacggccactctcacattcagtcgctgactattccgaactgtatcagctatgacccggcatacgcctacgaagtggcggtgattatgcacgacggtctggaacgtatgtacggtgaaaagcaggaaaacgtttattactacatcaccactctgaatgaaaactaccatatgccggcgatgccagaaggtgcagaagaaggtatccgtaaaggcatttacaaactggaaaccattgaaggctcgaaaggcaaagtgcagcttctcggttctggttccatcctgcgtcacgttcgtgaagctgctgaaatcctcgctaaagattacggtgttggttctgacgtgtactccgtgaccagcttcaccgaactggctcgcgatggccaggactgcgaacgctggaacatgctgcacccgctggaaactccgcgtgtaccgtacatcgcccaggtgatgaacgatgctccggccgttgcatctactgattacatgaaactgtttgccgaacaggttcgcacttatgttccggctgatgactaccgtgtgctgggtaccgacggctttggccgttctgattcccgtgaaaatttgcgtcatcatttcgaggttgacgccagctacgtggtggttgctgcactgggtgaactggcaaaacgtggcgagatcgacaaaaaggttgttgccgatgcaattgcgaaattcaacatcgatgcggataaagttaacccgcgcctggcgtaa

SEQ ID NO: 1807 - DNA, 1893 bp, Artificial Sequence
  Optimized genes for E. coli.
atggcaatcgaaatcaaggttcctgatatcggcgcagacgaagttgaaattactgaaatcctggtgaaagttggcgacaaggtggaagctgaacagagccttatcaccgtagaaggcgataaagcttctatggaagttccgtctccgcaggcaggtatcgtcaaagagatcaaagtatctgttggtgataagactcagaccggcgcactgattatgattttcgattccgctgatggcgcggccgatgctgcgccggcgcaggcggaagaaaaaaaagaagcggcgccagctgcagcgcctgctgctgccgctgcgaaagatgtgaacgttccggatatcggttccgatgaagttgaagtgaccgaaatcctcgttaaagtgggtgacaaagtcgaagctgaacaatcactgatcactgttgaaggtgataaagcgtccatggaagtgccggcaccgtttgcaggcaccgttaaagagattaaagtgaatgtcggtgacaaagtttctaccggttctctgattatggtttttgaagttgctggtgaggctggcgctgcagctccggctgctaaacaggaagccgcacctgcggctgctcctgcaccggcggcgggcgtgaaagaagtaaacgtaccggacattggtggtgatgaggtagaagtaaccgaggtgatggtgaaggtcggcgataaagtcgccgctgagcagtctctgattaccgttgaaggcgacaaagccagcatggaagtcccggcgccgttcgccggtgtggttaaggaactgaaagttaacgtgggcgacaaagtgaaaaccggtagcctgatcatgatcttcgaagtcgagggtgcagctccagcagcggcaccggctaaacaagaagcggccgcaccagcgccggcagcgaaagcggaagcaccggcagctgcaccggccgccaaagcagaaggtaaatctgaatttgccgaaaacgatgcgtacgttcacgcgacgccgctgatccgtcgcctggcacgtgagttcggtgtaaacctggcgaaggttaagggtactggccgtaaaggtcgtattctgcgtgaagacgtacaggcttacgtaaaagaggcgatcaaacgtgctgaagcggctccggcagcaactggtggcggtattccgggtatgctgccgtggccgaaagttgatttctctaaattcggcgaaattgaagaagttgagctgggccgcattcagaaaatttctggtgctaacctcagccgtaactgggttatgatcccgcacgttacccacttcgacaaaactgacatcacggaactggaagcattccgtaagcagcagaacgaagaggcagcaaaacgcaagctggacgttaaaatcactccggttgtttttatcatgaaagctgttgccgcggcgctggagcagatgccgcgtttcaacagctcgctgtccgaagatggtcagcgtctgactctgaagaaatacatcaacatcggtgttgcggttgacaccccgaacggcctggttgtaccggtgttcaaagacgtcaacaaaaaaggcatcatcgaattaagccgcgaactgatgaccatttccaaaaaggcgcgtgacggcaaactgaccgcgggtgaaatgcagggcggctgtttcaccatctcttctatcggcggtctgggtaccactcacttcgctccgatcgttaacgccccggaagtggctatcctgggcgttagcaaatccgcaatggagccggtatggaacggtaaagaattcgttccgcgcttgatgctgccaatctccctgagctttgaccaccgtgttatcgacggcgctgacggtgcgcgcttcatcaccatcattaacaacaccctgtctgatattcgtcgtctggtaatgtaa

SEQ ID NO: 1808 - DNA, 1425 bp, Artificial Sequence
  Optimized genes for E. coli.
atgagcactgaaatcaaaactcaggtagttgttctgggcgcaggtccggcgggctacagcgcggcattccgttgcgctgacctgggcctcgaaacggtcatcgttgagcgctacaacaccctgggtggcgtttgcctgaacgttggctgtatcccgagcaaagcgctgctgcacgtagcgaaagttattgaagaagccaaagctctggctgaacacggcattgtgttcggtgagccgaagaccgatatcgacaaaattcgtacctggaaagaaaaagtgattaaccagctgactggcggcctggccggcatggcgaaaggtcgtaaagttaaagtggttaacggcctggggaaatttaccggtgctaacacgctggaagtagaaggcgaaaacggtaaaaccgttatcaacttcgataacgcaatcatcgccgcaggcagccgtccgattcagttgccgttcatcccacacgaagatccgcgtatctgggattccaccgacgcgctggaactgaaagaagttccggaacgtctgctggtgatgggcggcggtattatcggtctggagatgggtactgtttaccatgcactgggttctcagatcgatgtggtggaaatgttcgatcaggttatcccggctgctgataaagacatcgtgaaagtattcaccaaacgtatttccaagaaattcaacctgatgctggaaactaaagtgaccgctgttgaagcgaaggaagatggtatctacgttaccatggaaggtaaaaaagcgccggcagaaccgcagcgttacgatgcggtgctggttgcgatcggccgcgtgccgaatggtaaaaacctggatgctggcaaagccggtgttgaagttgacgaccgtggttttatccgtgttgataaacagctgcgtactaacgtaccgcacatcttcgctattggcgatatcgttggtcagccgatgctggcgcacaaaggcgtacatgaaggtcacgttgctgcggaagtgatcgcgggtaagaaacactacttcgatccaaaagtcattccgtctatcgcttacaccgaaccagaagtcgcctgggttggactgacggaaaaagaagctaaagagaaaggcatctcttacgaaaccgcaaccttcccgtgggcggcgtctggccgtgcaattgcttctgactgcgcagacggtatgaccaaactgattttcgacaaagagtctcaccgtgtaatcggtggtgcgattgtcggcaccaacggtggtgagctgctcggtgaaattggtctggctatcgaaatgggttgcgacgccgaagacattgccctgaccatccacgctcacccgactctgcatgaaagcgtgggtctggcagctgaagtgtttgaaggctccatcactgatctgccgaacccgaaagcaaaaaaaaagtaa

SEQ ID NO: 1809 - DNA, 663 bp, Artificial Sequence
  Optimized genes for E. coli.
atgaaagacatcgacactctgatttctaacaatgcgctgtggagcaaaatgctggtagaagaagatccgggcttcttcgaaaaactggcgcaggcgcaaaaaccgcgtttcctgtggatcggttgttctgacagccgtgttccggctgaacgcctgaccggtctggaaccgggtgaactgttcgttcaccgtaacgttgctaatctggttatccataccgacctgaactgcctgtctgttgttcagtacgcagttgacgtgctggaagttgaacacatcatcatttgcggtcactacggctgtggcggcgtacaggctgctgttgaaaacccggaactgggtctgatcaacaactggctgctgcacattcgcgatatctggttcaaacactcttctctgctcggcgaaatgccgcaggaacgtcgtctggatacgctgtgcgagctgaatgtgatggaacaggtttacaacctgggccacagcaccattatgcagagcgcctggaaacgtggtcagaaagtgaccatccacggctgggcgtacggtattcacgacggcctgctgcgtgatctggacgttaccgcaaccaaccgtgaaaccctggagcagcgttaccgtcacggtatctccaacctgaaactgaagcacgctaaccacaagtaa

SEQ ID NO: 1810 - DNA, 726 bp, Artificial Sequence
  Optimized genes for E. coli.
atggcgaccgtttctatgcgcgacatgttgaaagcgggcgtacacttcggtcaccagacccgttactggaacccgaaaatgaaaccgttcatcttcggcgcgcgtaacaaagttcacatcatcaacctggaaaaaactgttccgatgttcaacgaagcgctggctgagctgaacaaaatcgccagccgtaaaggtaaaattctgtttgttggtactaaacgcgctgcttctgaagctgttaaagacgcagcgctgtcttgtgatcagttcttcgttaaccaccgctggctgggcggcatgctgactaactggaaaaccgtacgtcagtctatcaaacgtctgaaagacctggaaacccagtcgcaggacggcaccttcgacaaactgaccaaaaaagaggcactgatgcgtacccgcgaactggagaaactcgaaaactctctgggcggtatcaaagatatgggtggtctgccggacgctctgttcgtaatcgacgctgaccatgaacacattgcgattaaagaagccaacaacctcggcattccggtatttgctatcgttgataccaacagcgatccggatggcgttgacttcgttatcccgggtaacgatgatgcgatccgtgctgtaaccctgtacctgggtgcggttgctgcaaccgttcgtgaaggtcgttctcaggatctggcaagccaggctgaagaaagcttcgttgaagcagagtaa

SEQ ID NO: 1811 - DNA, 852 bp, Artificial Sequence
  Optimized genes for E. coli.
atggcagaaatcaccgccagcctggtgaaagaactgcgtgaacgtactggcgcgggtatgatggactgcaaaaaggctctgaccgaagcgaacggcgatatcgagctggcaatcgaaaacatgcgtaaatctggcgctatcaaagcagcgaagaaagctggcaacgttgccgctgatggcgttatcaagaccaaaatcgacggtaactacggtatcatcctggaagttaactgccagaccgacttcgttgcgaaagacgcgggcttccaggcgttcgctgacaaagttctggatgcggcggttgcaggcaaaattactgacgtagaagtactgaaagcgcagtttgaagaagagcgtgtggcgctggtcgcaaaaatcggtgaaaacatcaacattcgtcgtgttgctgcactggaaggcgacgtgctgggcagctatcagcacggtgcgcgtattggtgttctggtagcagctaaaggcgcagacgaagaactggttaaacacatcgcgatgcacgttgctgcgtccaaaccagaatttattaagccggaagacgtttccgcggaagttgttgaaaaagaataccaggttcagctggacatcgctatgcagtctggtaaaccgaaagagatcgccgagaaaatggttgaaggtcgtatgaaaaaattcaccggcgaagtttctctgactggtcagccgttcgtgatggaaccgtctaaaaccgttggtcaactgctgaaagagcacaacgccgaagtgaccggtttcatccgtttcgaagtgggcgaaggtattgaaaaagtggaaaccgattttgctgctgaagtcgcggcaatgagcaaacagagctaa

SEQ ID NO: 1812 - DNA, 1026 bp, Artificial Sequence
  Optimized genes for E. coli.
atgccgtccatccgtctggctgatctggcgcaacagctggacgctgaactgcacggtgacggcgatatcgttatcactggcgttgcttctatgcagtctgcacagaccggtcacattaccttcatggtgaacccgaaataccgtgaacacctgggcctgtgtcaggcgtctgcggtggtgatgactcaggacgacctgccgttcgctaaatccgctgcactggttgtgaaaaatccgtacctgacctatgcgcgtatggcgcagatcctggataccactccgcagccagctcagaatatcgctccgtctgctgtgattgatgcgaccgcgaaactgggtaacaacgtttctatcggtgccaacgccgttatcgaaagcggtgtagaactcggtgataacgtcatcattggtgctggctgtttcgttggtaaaaacagcaaaattggcgcaggttctcgtctgtgggcgaacgtaactatctaccatgaaatccagatcggtcagaactgcctgattcagagcggcaccgttgttggcgcggatggcttcggttacgctaacgaccgtggtaactgggttaaaatcccgcaaatcggccgcgtaatcatcggcgatcgcgttgaaattggcgcttgcaccaccattgaccgcggtgcgctggatgacaccatcatcggcaacggcgtaattatcgacaatcagtgccagattgctcacaacgtggttattggcgacaacaccgcagttgcgggcggcgtgatcatggcaggcagcctgaagatcggtcgttattgtatgatcggtggtgcatctgttatcaacggtcatatggaaatctgcgacaaagtaaccgtgaccggcatgggtatggttatgcgtccgatcaccgaaccgggtgtttacagctctggtattccgctgcagccgaacaaagtgtggcgtaaaaccgctgctctggtaatgaacatcgatgatatgtccaaacgcctgaaatctctggaacgtaaagttaaccagcaggattaa

SEQ ID NO: 1813 - DNA, 816 bp, Artificial Sequence
  Optimized genes for E. coli.
atggcgtttaaattcaaaaccttcgctgctgtgggcgcgctgattggcagcctggcactggtgggttgcggtcaggacgaaaaagacccgaaccacatcaaagtcggtgttatcgttggtgcggaacagcaggttgcagaagttgcgcaaaaagtggcgaaagacaaatacggtctcgacgtagaactggttactttcaacgactacgtgctgccaaacgaagcgctgagcaaaggtgatatcgacgctaacgcattccagcacaaaccgtacctggatcagcaactgaaggaccgtggctacaaactggtagctgttggcaacacctttgtttatccgatcgccggttacagcaagaaaattaaatctctggatgagctgcaagatggtagccaggtagcggttccgaacgatccgaccaacctgggtcgttccctgttgctgctgcagaaagtaggcctgatcaagctgaaagatggcgttggtctgctgccgactgttctggacgttgttgagaacccgaaaaacctgaaaatcgtcgaactggaagcaccgcagctgccgcgttctctcgatgatgcgcagatcgctctggcggtgatcaacaccacctacgcttctcagattggtctgaccccggcaaaagacggtatcttcgttgaagataaagaaagcccgtatgttaaccttatcgtgacccgtgaagacaacaaggatgctgaaaacgttaaaaaatttgttcaggcttaccagagcgatgaagtgtacgaagctgcgaacaaagtttttaacggtggtgcagtgaaaggctggtaa

SEQ ID NO: 1814 - DNA, 474 bp, Artificial Sequence
  Optimized genes for E. coli.
atgggtcgtatttcttctggtggtatgatgttcaaagcgatcaccactgttgctgctctggttatcgctaccagcgcgatggcgcaggacgacctgactatctcctctctggcgaaaggtgaaaccaccaaagcagcattcaatcagatggttcagggtcacaagctgccggcatgggtgatgaaaggcggtacttacaccccggctcagaccgttaccctgggcgacgaaacttatcaggttatgagcgcctgcaaaccgcacgactgcggttctcagcgtatcgcggtaatgtggtctgaaaaatccaaccagatgaccggtctgttctctaccatcgacgagaaaacttcccaggaaaaactgacctggctgaacgttaacgatgcgctgtctatcgatggtaaaaccgtgctgtttgctgcactgactggcagcctggaaaaccacccggatggcttcaacttcaagtaa

SEQ ID NO: 1815 - DNA, 333 bp, Artificial Sequence
  Optimized genes for E. coli.
atgagcttcttcatctctgacgctgttgcggcgaccggtgcgccggcacagggcagcccgatgtctctgattctgatgctggtggtgttcggtctgatcttctacttcatgatcctgcgtccgcagcagaaacgtaccaaagaacacaaaaaactgatggattctatcgcgaaaggcgacgaagttctgaccaacggcggcctggttggtcgtgtgactaaagttgctgaaaacggttacatcgccatcgctctgaacgataccaccgaagtggttatcaaacgcgacttcgttgcagcggtgctgccgaaaggtaccatgaaagcgctgtaa

SEQ ID NO: 1816 - DNA, 645 bp, Artificial Sequence
  Optimized genes for E. coli.
atgcgtatcattctgctgggtgcgccgggtgctggcaaaggtactcaggcacagttcattatggaaaaatacggtattccgcagatctccaccggtgatatgctgcgtgctgctgttaaatctggttctgaactcggtaaacaggcgaaagatatcatggatgcaggcaaactggtaaccgatgaactggttatcgcgctggtcaaagagcgtattgctcaggaagactgccgtaacggcttcctgctggacggtttcccgcgtaccatcccgcaagctgatgcgatgaaagaagctggtatcaacgttgattacgttctggaatttgacgttccggacgaactgattgttgaccgcatcgttggtcgtcgcgttcacgctccgtctggccgtgtttaccatgtgaaattcaacccgccgaaagttgaaggtaaagatgatgtgaccggcgaagagctgaccacccgtaaagacgatcaggaagaaaccgttcgtaagcgtctggtggaataccaccagatgaccgcaccgctgatcggttactacagcaaagaagcagaagcgggtaacaccaaatatgctaaagtggatggcactaaaccggttgctgaagttcgcgctgacctggagaaaatcctgggctga

SEQ ID NO: 1817 - DNA, 495 bp, Artificial Sequence
  Optimized genes for E. coli.
atggttaccttccataccaaccacggcgatatcgttattaaaacctttgacgataaagcaccggaaaccgttaaaaacttcctggattactgccgtgaaggtttctacaacaacaccatcttccaccgtgttatcaacggcttcatgatccagggtggtggctttgaaccgggcatgaaacagaaagcgaccaaagagccgatcaaaaacgaagcgaacaacggtctgaaaaatacccgtggtactctggcaatggcgcgtactcaggcgccgcactctgcaaccgctcagttcttcatcaacgtggttgataacgacttcctgaacttctctggtgaatctctgcagggctggggctactgcgtgttcgctgaagttgtggacggtatggatgttgttgacaaaatcaaaggcgttgctaccggtcgttccggtatgcaccaggacgttccgaaagaagatgtgatcatcgaaagcgtgaccgtatctgagtaa

SEQ ID NO: 1818 - DNA, 954 bp, Artificial Sequence
  Optimized genes for E. coli.
atgcgtgctaaactgttgggtatcgttctgaccaccccgatcgctatttctagttttgcttctaccgaaaccctgagcttcactccggacaacatcaacgccgatatctccctgggtactctgtctggcaaaaccaaagagcgtgtgtacctggctgaagagggtggtcgtaaagtcagccagctggactggaaattcaacaacgcagcaatcatcaaaggcgctatcaactgggatctgatgccgcagatctctatcggcgcagcgggctggaccacgctgggctctcgtggcggcaacatggttgatcaggactggatggattccagcaacccgggcacctggactgatgaatcccgtcacccggatacccagctgaactacgctaacgaatttgacctgaacattaaaggctggctgctgaatgaaccgaactatcgtctgggtctgatggcgggttaccaggaaagccgttactccttcaccgcgcgtggtggctcttacatctacagctctgaagaaggtttccgtgatgacatcggttctttcccgaacggtgaacgtgcgattggctacaaacagcgtttcaaaatgccatacattggtctgactggcagctaccgttatgaagacttcgaactgggcggtacctttaaatattccggttgggttgagtcttctgataacgacgaacactacgatccgggtaaacgtatcacctaccgcagcaaagtgaaagaccagaactactattctgttgctgttaacgctggctactacgtgacgccgaatgcgaaagtttacgttgaaggcgcctggaaccgtgttaccaacaaaaaaggtaacacctctctgtacgaccacaacaacaataccagcgattactctaaaaacggcgcgggcatcgaaaactacaacttcatcactaccgcaggcctgaaatacaccttctaa

SEQ ID NO: 1819 - DNA, 564 bp, Artificial Sequence
  Optimized genes for E. coli.
atgagcctgatcaacaccaaaattaaaccgttcaaaaaccaggcgtttaaaaacggtgagttcatcgaaatcaccgaaaaagacaccgagggccgctggtctgtgttcttcttctacccggcagacttcactttcgtctgtccgactgaactgggcgacgttgccgatcactacgaagagctgcagaaactgggtgttgatgtttacgctgtttctaccgacactcacttcacccacaaagcatggcacagctcttctgaaaccatcgcgaagatcaaatacgcaatgatcggcgatccgaccggtgcgctgacccgtaacttcgacaacatgcgtgaagacgaaggtctggctgaccgtgcaaccttcgttgttgacccgcagggcatcatccaggctattgaagtgaccgctgaaggtatcggtcgtgatgcgagcgatctgctgcgtaaaatcaaagcggcgcagtacgttgcttctcacccgggtgaagtttgcccggcgaaatggaaagaaggcgaagcgaccctggcaccgtctctggacctggttggtaaaatctaa

SEQ ID NO: 1820 - DNA, 210 bp, Artificial Sequence
  Optimized genes for E. coli.
atgtccaaaatcaaaggcaacgtgaaatggttcaacgaaagcaaaggcttcggttttatcactccggaagatggttctaaagatgtgttcgttcacttctctgcgattcagactaacggtttcaaaaccctggctgaaggtcagcgtgttgaatttgaaatcaccaacggcgcgaaaggtccgtctgcagctaacgttatcgcgctgtaa

SEQ ID NO: 1821 - DNA, 1218 bp, Artificial Sequence
  Optimized genes for E. coli.
atgtcttctgttgacatcctggttccggatctgccagaaagcgtggctgacgcaaccgttgcgacctggcacaagaaaccgggcgacgctgtagttcgtgatgaagtgctggtggaaattgaaactgacaaagttgttcttgaggtaccggcaagcgccgatggcattctggacgcggttctggaagacgaaggcaccactgttacttcccgccagatcctcggccgtctgcgcgaaggtaacagcgcgggtaaagaaaccagcgcaaaatctgaagaaaaagccagcacccctgcgcagcgtcagcaggcttctctggaagagcagaacaacgatgctctgagcccggcgatccgtcgtctgctggcagaacataacctggatgcgtctgctatcaaaggtaccggtgttggtggtcgtctgacccgtgaagatgttgagaaacacctggcgaaagctccggccaaagagtctgcaccggctgcagctgcgccggctgctcagccggcactggcagcgcgttctgagaaacgcgtaccaatgacccgcctgcgtaaacgtgttgctgaacgtcttcttgaagctaaaaactccaccgcaatgctgaccaccttcaacgaagttaacatgaaaccaatcatggatttgcgcaaacagtacggtgaagcattcgaaaagcgtcacggtatccgcctgggtttcatgtccttctacgtgaaagcggtagtagaagcgctgaaacgttatccggaagtaaacgcctctatcgatggtgatgatgtggtttatcacaactacttcgacgtatctatggcagtttctactccgcgtggtctggtaaccccggtactgcgtgacgttgataccctgggcatggctgatatcgaaaaaaaaatcaaagagctggctgttaaaggccgcgacggcaaactgacggttgaagacctgactggcggcaacttcaccatcaccaacggcggtgtgttcggtagcctgatgagcacgccgatcatcaacccgccgcagtctgccattctgggtatgcacgcgattaaagaccgtccgatggcggtgaacggtcaggttgaaatcctgccgatgatgtacctggccctgtcttacgaccaccgtctgatcgacggtcgtgagtccgttggcttcctggtcaccattaaagaactgctggaagatccgactcgtttgctgctcgacgtttaa

SEQ ID NO: 1822 - DNA, 1167 bp, Artificial Sequence
  Optimized genes for E. coli.
atgaacctgcacgaataccaggcgaagcagctgtttgcgcgttacggcctgccggcaccggtaggctacgcctgtaccactccgcgcgaggcggaagaggcagcttctaaaatcggtgccggtccgtgggtggtgaaatgccaggttcacgcgggtggccgtggtaaagcgggcggtgtaaaagtcgtaaacagcaaagaagacatccgtgcgtttgctgaaaactggctgggcaaacgcctggtgacctaccagactgatgcgaacggtcagccagtgaaccagatcctggtagaagctgccaccgatattgccaaagaactgtacctgggtgcggtggttgaccgttccagccgtcgtgttgtatttatggcgtccaccgaaggcggcgttgagatcgaaaaagtagcagaagaaaccccgcacctgatccacaaagtggcgctggacccgctgactggcccgatgccgtatcagggtcgtgaactggcattcaaactggggctggaaggtaaactggttcagcagttcaccaaaattttcatgggtctggcgaccatcttcctggagcgtgacctggcactgattgaaatcaacccgctggttatcactaaacagggcgaccttatctgcctggacggtaagctgggtgctgacggcaacgcgctgttccgtcagccggatctgcgcgaaatgcgtgatcagtctcaggaagatccgcgtgaagcgcaggctgcacagtgggaactcaactacgttgctctggatggcaatatcggctgtatggttaacggcgcaggtctggcgatgggcaccatggatatcgtcaaactccacggtggtgaaccggctaacttcctcgacgttggcggtggtgcaaccaaagagcgcgttactgaagcgttcaagattattctgtctgacgacaaagttaaagcagttctggtcaacatttttggcggcatcgttcgttgcgacctgatcgccgatggtatcattggcgctgttgctgaagttggtgttaacgttccggttgtggtacgtctggaaggtaacaacgccgagctgggcgcgaaaaaactggctgattccggtctgaacatcatcgctgctaaaggcctgaccgacgcggctcagcaagttgttgcggcggttgaaggcaagtaa

SEQ ID NO: 1823 - DNA, 522 bp, Artificial Sequence
  Optimized genes for E. coli.
atgcaactgaacaaagtgctgaaaggcctgatgatcgcgctgccggttatggctatcgctgcctgttcttctaacaagaacgccagcaacgacggttctgaaggcatgctcggcgcaggcaccggtatggatgctaacggtggtaacggcaacatgagcagcgaagaacaggcgcgtctgcagatgcagcagctgcaacagaacaacatcgtttatttcgacctggacaaatacgatatccgttctgacttcgcgcagatgctggatgcgcacgcgaacttcctgcgttccaacccgtcttacaaagttaccgttgaaggtcacgctgatgagcgtggtactccggaatacaacatttctctgggcgaacgtcgcgcaaacgctgttaaaatgtacctgcagggtaaaggtgtttctgctgaccagatctctatcgtcagctacggcaaagaaaaaccggcagttctgggtcatgacgaagcggcttacagcaaaaaccgtcgtgctgtactggtttactaa

SEQ ID NO: 1824 - DNA, 792 bp, Artificial Sequence
  Optimized genes for E. coli.
atgagctccaacttccgtcaccagcttctgtctctgtcgctgctggtgggtatcgctgcgccgtgggcggcgttcgcgcaggctccgatctccagcgttggcagcggttctgttgaagatcgcgtaactcagctggaacgtatcagcaacgcgcactctcagctgctgacccagctgcaacagcaactgagcgataaccagtctgacatcgattccctgcgtggccagattcaggaaaaccagtaccagctgaatcaggtggttgagcgccagaaacagatcctgctgcagatcgactccctttcttctggtggtgcggcagcacagtccacctctggcgaccagagcggcgctgcagcttctaccactccgaccgctgatgctggtactgcgaacgctggcgcaccggttaaatccggtaacgctaacaccgactacaatgccgctatcgcgctggttcaggataaaagccgtcaggacgacgcgatggttgctttccagaacttcatcaaaaactatccggacagcacctacctgccgaacgcaaactactggctgggtcagctgaactacaacaaaggtaaaaaagatgatgcggcttactacttcgcttccgttgttaagaactacccaaaatctccgaaagctgctgacgcaatgttcaaagttggtgtgatcatgcaggacaaaggcgataccgcgaaagcaaaagcggtttatcagcaggttatctctaaatacccgggtaccgatggcgcgaagcaggcgcaaaaacgtctgaacgccatgtaa

SEQ ID NO: 1825 - DNA, 753 bp, Artificial Sequence
  Optimized genes for E. coli.
atggcggtgaccaagctggtactggttcgtcacggcgaaagccagtggaacaaggagaaccgtttcaccggctggtacgacgttgacctgtctgagaaaggcgtttctgaagcgaaagctgcgggtaaactgctgaaagaagaaggctacagcttcgacttcgcttacacctctgttctgaaacgcgctatccacaccctgtggaacgttctcgacgagctggaccaggcatggctgccggttgaaaaatcctggaaactgaatgaacgccactacggcgctctgcagggtctgaacaaagcagaaaccgctgaaaaatacggtgatgagcaggttaaacagtggcgtcgtggtttcgcggtaactccgccggaactgaccaaagatgacgagcgttatccgggtcacgatccgcgctacgctaaactgagcgagaaagagttgccgctgactgaatctctggcactgaccatcgaccgcgttattccgtactggaacgaaactattctgccgcgtatgaaatctggtgaacgtgttatcatcgctgctcacggtaacagcctgcgtgcgctggtgaaatatctggataacatgagcgaagaggaaatcctggaactgaacatcccgaccggtgttccgctggtttacgaatttgacgaaaacttcaaaccgttgaaacgttactacctgggcaacgctgacgaaattgctgcaaaagccgcagctgttgctaaccagggcaaagcgaagtaa

SEQ ID NO: 1826 - DNA, 747 bp, Artificial Sequence
  Optimized genes for E. coli.
atgaaatccgttctgaaagtgtctctggctgcgctgactctggcgttcgcggtttcttctcacgctgctgacaagaaactggttgttgcgaccgacaccgctttcgttccgttcgaatttaaacagggcgataaatacgttggtttcgacgttgatctgtgggcggcgatcgctaaagagctgaagctggactacgaactgaaaccgatggatttctccggtatcatcccggcactgcagaccaaaaacgttgacctggcattggcgggtattaccatcaccgatgaacgtaaaaaagctatcgacttctctgacggttactacaaatctggtctgctggtgatggttaaggctaacaacaacgatgtgaaatcggtaaaagatctggatggtaaagtagttgctgttaaaagcggtactggttctgtagattacgcgaaagcgaacattaaaacgaaagacctgcgtcagtttccgaacatcgataacgcttacatggaactgggtaccaaccgtgctgatgcggtgctgcacgacactccgaatattctgtacttcatcaaaactgctggcaacggtcagttcaaagcagttggcgacagcctggaagcgcagcagtacggcatcgcattcccgaaaggcagcgacgaattgcgtgacaaagttaacggtgctctgaaaaccctgcgtgaaaacggcacttacaacgaaatctataaaaaatggttcggcaccgaaccgaagtaa

SEQ ID NO: 1827 - DNA, 504 bp, Artificial Sequence
  Optimized genes for E. coli.
atgtccaccgctaaactggttaaatccaaagcaaccaacctgctgtacacccgtaacgatgtttctgactctgaaaaaaaagcgaccgttgaactgctgaaccgtcaggttatccagttcattgacctgtctctgattaccaaacaggcgcactggaacatgcgtggtgctaacttcatcgctgttcacgaaatgctggacggtttccgtaccgcgctgatcgaccatctggataccatggctgaacgtgctgtacagctgggtggtgttgctctgggcaccactcaggtgatcaacagcaaaaccccgctgaaatcttatccgctggatatccacaacgttcaggaccacctgaaagagctggctgaccgttacgcaatcgttgcgaacgacgttcgtaaagctatcggtgaagcgaaagatgatgacaccgcagacatcctgaccgccgcttctcgcgatctggacaaattcctgtggtttatcgaaagcaacatcgagtaa

SEQ ID NO: 1828 - DNA, 516 bp, Artificial Sequence
  Optimized genes for E. coli.
atgaaaaaaatcgcttgcctgtctgcactggctgctgttctggcattcaccgctggtacttccgttgctgcaacctctaccgttaccggtggttatgcgcagtctgacgctcagggtcagatgaacaaaatgggcggctttaacctgaaataccgctacgaagaagataacagcccgctgggcgttatcggttccttcacttacaccgaaaaatcccgtactgcttcttctggcgactacaacaaaaaccagtactacggtatcaccgcgggtccggcttaccgtatcaacgactgggcgtctatctacggcgtggtgggtgtgggctacggtaaattccagaccactgaatacccgacctacaaacacgacaccagcgattacggcttctcttatggcgcaggtctgcagttcaacccgatggaaaacgttgcgctggacttcagctatgaacagagccgtattcgttctgttgacgttggcacctggatcgccggtgttggttaccgtttctaa

SEQ ID NO: 1829 - DNA, 225 bp, Artificial Sequence
  Optimized genes for E. coli.
atggaaaaaggcaccgttaaatggttcaacaacgcgaaaggcttcggtttcatctgcccggaaggcggtggtgaagatatcttcgctcactacagcaccatccagatggatggctaccgtaccctgaaagcgggtcagagcgttcagttcgacgttcaccagggcccgaaaggtaaccacgcttctgttatcgttccggtagaagttgaagcggcggttgcgtaa

SEQ ID NO: 1830 - DNA, 219 bp, Artificial Sequence
  Optimized genes for E. coli.
atggcgaaagaagataacatcgaaatgcagggcaccgtgctggaaaccctgccgaacaccatgttccgtgttgagctggaaaacggtcacgttgttaccgctcacatctccggtaaaatgcgtaaaaactacatccgtattctgaccggcgacaaagtgaccgttgaactgactccgtacgacctgagcaaaggtcgtatcgttttccgcagccgttaa

SEQ ID NO: 1831 - DNA, 495 bp, Artificial Sequence
  Optimized genes for E. coli.
atggttgacagcaaaaaacgtccgggtaaagatctggaccgtattgatcgtaacatcctgaacgaactgcaaaaagacggtcgtatctccaacgttgagctgtccaaacgcgttggtctgagcccgactccgtgcctggaacgtgttcgtcgtctggagcgtcagggttttattcagggctacaccgcgctgctcaacccgcactacctggatgcttctctgctggtgttcgttgaaatcaccctgaaccgtggtgcgccggacgtttttgaacagttcaacaccgctgttcagaaactggaagagatccaggaatgccacctggtatctggcgacttcgactatctgctgaaaactcgtgttccggatatgagcgcttaccgtaaactgctgggcgaaaccttgctgcgtctgccgggcgttaacgatacccgtacctacgttgtgatggaagaagttaaacagagcaaccgcctggttatcaaaacccgttaa

SEQ ID NO: 1832 - DNA, 2283 bp, Artificial Sequence
  Optimized genes for E. coli.
atgagcgaactgaatgaaaaactggcaactgcatgggaaggcttcactaaaggcgactggcagaacgaagtaaacgtacgcgacttcatccagaaaaactacactccgtacgaaggcgatgaaagcttcctcgcgggtgccaccgaggcgaccaccacgctgtgggataaagtgatggaaggtgtgaaactggaaaaccgtacccacgctccggttgattttgacaccgctgtagcttctaccattacctctcacgatgctggttatatcaacaaacagctggaaaagatcgtcggtctgcagactgaagcaccgctgaaacgcgctctgattccgttcggtggtattaaaatgattgagggttcctgcaaagcgtacaaccgtgaactggatccgatgatcaaaaaaatcttcaccgaatatcgcaaaactcacaaccagggcgttttcgacgtctataccccggatatcctgcgctgccgtaaatccggcgtactgaccggtctgcctgacgcttacggtcgtggtcgtattatcggtgactaccgtcgtgttgcgctgtatggcattgattatctgatgaaagacaagctggcgcagttcaccagtttgcaggctgaccttgagaacggcgtgaacctggagcagaccatccgtctgcgtgaagaaatcgctgaacagcaccgtgcgctgggccagatgaaagagatggcggccaaatacggctatgacatctctggcccggcaaccaacgcccaggaagcgattcagtggacctactttggctacctggctgctgtgaagtctcagaatggcgcagcgatgtcttttggtcgtacttccactttcctggatgtttacatcgagcgtgatctgaaagcaggcaaaatcactgagcaagaagctcaggaaatggttgaccacctggtaatgaaactgcgtatggtacgtttcctgcgcaccccagaatacgacgagctgttcagcggcgatccaatctgggcgactgaatccatcggcggcatgggtctcgacggccgtactctggtgaccaagaactccttccgtttccttaacaccctgtacaccatgggcccgagcccggagccgaacatgaccatcctctggagcgagaaattaccgctgaacttcaaaaaattcgcagctaaagtcagcatcgatacctcttctctgcaatacgaaaatgacgacctgatgcgtccggatttcaacaacgatgattacgcaatcgcctgctgcgtttctccgatgatcgttggcaagcagatgcaattcttcggcgctcgtgctaacctggctaaaaccatgttgtatgccattaacggtggtgttgatgagaaattgaaaatgcaggttggtccgaaatctgaaccgatcaaaggtgatgtgctgaactatgatgaagttatggagcgcatggatcacttcatggactggctggcgaaacagtacatcaccgcactgaacatcatccactacatgcacgacaaatacagctatgaagccagcttgatggctctgcatgaccgtgacgttatccgcacgatggcatgcggtatcgcgggcctgtccgttgctgcagacagcctgtctgctatcaagtacgcgaaagttaaaccgattcgtgacgaagatggcctggctatcgactttgaaattgaaggtgaatacccgcagtttggtaacaacgacccgcgtgtggacgatctggcagttgacctggttgaacgttttatgaagaaaattcagaagctgcacacttaccgcgatgcgatcccgacccagagcgttctgacgatcacctccaacgtggtttatggtaaaaagactggcaacacgccggacggtcgccgtgcaggtgcgccgttcggtccgggtgctaatccaatgcacggccgcgatcagaaaggcgcggttgcaagccttaccagcgtggcaaaactgccgtttgcttatgcgaaagacgggatttcttacaccttctctatcgtgccaaacgcactgggtaaagatgacgaagtgcgtaagaccaatctggccggtctgatggatggttacttccaccacgaagcgtcaatcgaaggcggtcagcatctgaatgttaacgttatgaaccgcgaaatgctgctggacgcaatggaaaacccggaaaaatatccgcaactgactattcgcgtatctggttacgctgttcgcttcaattccctgaccaaagaacaacagcaggacgtgattactcgtacctttactcagtctatgtaa

SEQ ID NO: 1833 - DNA, 1674 bp, Artificial Sequence
  Optimized genes for E. coli.
atgaccgaatccttcgcgcagctgttcgaagaaagcctgaaagagatcgaaacccgtcctggttctatcgtccgtggtgtagtggtggcaattgataaagacgtagtactggtagacgcgggcctgaaatctgaatctgcgatcccggcagagcagtttaaaaacgctcagggcgaactggaaattcaggttggtgatgaagttgacgttgctctggacgctgttgaagacggtttcggtgaaacgctgctgagccgtgaaaaagcgaagcgtcacgaagcctggattaccctggaaaaagcttacgaagatgccgaaaccgtaactggtgttatcaacggtaaagtgaaaggcggcttcactgtagaactcaacggcatccgtgcgttcctgccgggttccctggtcgatgtgcgtccggttcgcgataccctgcatctggaagggaaagaactggagttcaaggtgattaaactcgatcagaaacgtaacaacgttgttgtttctcgccgtgccgttattgaaagtgaaaacagcgcagaacgtgaccagcttcttgagaacctgcaggaaggtatggaagtcaaaggtattgttaaaaatctgactgactacggcgcgtttgttgacctgggtggtgtggacggtctgctgcacatcaccgacatggcatggaaacgtgtaaaacacccgtctgaaatcgtgaacgtgggtgatgagattactgttaaagttctgaagttcgaccgtgagcgtacccgcgtatccctcggcctgaaacagctgggtgaagatccgtgggttgcgattgccaaacgctatccggaaggcaccaaactgacgggtcgtgttactaacctgaccgattacggttgcttcgttgaaatcgaagaaggcgttgaaggtctggttcacgtttccgaaatggactggaccaacaaaaacatccacccaagcaaagtggttaacgtcggcgacgtggtcgaagtgatggttctggatatcgacgaagagcgtcgtcgcatttcgctgggcctcaagcagtgcaaagcaaacccgtggcagcagttcgctgaaactcacaacaaaggcgatcgcgtggaaggcaaaatcaaatccatcactgattttggtatcttcatcggtctggatggcggtatcgatggtttggtacacctgtctgacatctcctggaacgtagctggcgaagaagcggttcgtgaatacaaaaaaggtgacgaaatcgccgcagttgtgctgcaagttgatgctgagcgcgaacgtatctctctgggcgtgaaacaactggctgaagacccgttcaacaactgggtggcgctgaacaagaaaggtgctatcgttaccggtaaagtaaccgctgtcgacgcaaaaggcgcaaccgttgagctggcagacggcgtagagggctacctgcgtgcaagcgaagccagccgcgaccgcgttgaagatgcgactctggtgctgtcggttggcgacgaagtagaagcgaaattcaccggcgttgatcgtaaaaaccgtgctatttctctgtccgtacgtgcgaaagatgaagctgacgagaaagatgcaatcgctaccgtgaataaacaggaggatgctaacttctctaataacgcgatggcggaagcattcaaagccgctaaaggcgagtaa

SEQ ID NO: 1834 - DNA, 285 bp, Artificial Sequence
  Optimized genes for E. coli.
atgaccaaatctgaactgatcgagcgtctggcaactcagcagtctcacatcccggcgaaaaccgttgaagatgcggtgaaagaaatgctggaacacatggcttctaccctggctcagggcgaacgtatcgaaatccgtggtttcggttccttctctctgcactaccgtgcgccgcgtaccggtcgtaacccgaaaactggcgacaaagtggaactggaaggcaaatacgttccgcacttcaaaccgggtaaagagctgcgtgaccgtgctaacatctacggctga

SEQ ID NO: 1835 - DNA, 1191 bp, Artificial Sequence
  Optimized genes for E. coli.
atgtttgaaaacatcaccgcagcaccggcagacccgatcctgggcctggcagatctgttccgtgccgatgagcgtccgggcaaaatcaacctgggtatcggtgtttacaaagacgaaaccggtaaaaccccggtactgacttctgttaaaaaagcagaacagtacctgctggaaaatgaaaccaccaaaaattatctgggcatcgacggtatcccggaatttggccgttgcactcaggaactgttgtttggtaaaggcagcgcgctgattaacgacaaacgcgcgcgtaccgctcagactccgggtggtaccggcgcgctgcgcgttgcggctgacttcctggctaaaaacaccagcgtgaaacgtgtctgggtttctaacccgtcctggccgaaccataaatccgtgttcaactccgcaggtctggaagttcgtgaatacgcttactacgacgctgaaaaccacaccctggatttcgatgctctgatcaacagcctgaacgaagcgcaggcgggcgacgttgtgctgttccacggttgctgccacaacccgactggcattgatccgaccctggagcagtggcagaccctggcgcaactgagcgttgaaaagggctggctgccgctgtttgactttgcttatcagggcttcgcacgtggcctggaagaagatgcggaaggtctgcgtgcgttcgcggcgatgcacaaagaactgatcgttgccagctcttactccaaaaacttcggtctgtacaacgaacgtgttggtgcctgtactctggttgctgctgattctgaaactgttgaccgtgcattcagccagatgaaagcggcaatccgtgctaactacagcaacccgccggctcacggcgcttccgttgttgcaaccatcctcagcaatgacgcactgcgtgcgatctgggaacaagagctgaccgatatgcgtcagcgtatccagcgcatgcgccagctgttcgttaacacgctgcaggaaaaaggtgcgaaccgtgatttttccttcatcatcaaacagaacggcatgttctctttctccggtttgactaaagagcaggttctgcgtctgcgcgaagagttcggcgtttatgcggtagcttctggtcgtgtgaacgttgctggtatgacgccggataacatggcgccgctgtgtgaagctatcgtcgctgttctgtaa

SEQ ID NO: 1836 - DNA, 1089 bp, Artificial Sequence
  Optimized genes for E. coli.
atgatgaaacgtaacatcctggcggttatcgttccggcgctgctggtagctggtactgcgaacgccgctgaaatctacaacaaagacggtaataaagtggatctgtacggtaaagcggtaggtctgcactacttctctaaaggcaatggcgaaaacagctatggcggtaacggtgacatgacctacgcgcgtctcggcttcaaaggtgaaactcagatcaactccgacctgaccggctacggtcagtgggaatacaacttccagggtaacaactctgaaggtgctgatgcgcagactggcaacaaaactcgtctggcattcgctggcctgaaatatgccgatgtgggttccttcgactacggtcgtaactacggcgttgtttacgacgcactgggttacaccgatatgctgccggaattcggcggcgataccgcttacagcgatgacttcttcgttggccgtgttggtggtgtggcaacgtaccgtaattccaacttctttggtctggtggacggcctgaactttgcagttcagtacctgggtaaaaacgaacgtgacactgcacgtcgttctaacggtgatggtgttggcggttctatctcttacgaatatgaaggtttcggtatcgtcggcgcatacggcgctgctgaccgtaccaacctgcaggaagcacagccgctgggcaacggcaaaaaagcagaacaatgggcgaccggtctgaaatacgatgcaaacaatatttatctggctgccaactacggcgaaacccgcaacgcaaccccgatcactaacaaattcaccaacacctctggttttgctaacaaaacccaggacgtgctgctggtcgctcagtatcagtttgactttggcctgcgtccgtccatcgcttataccaaatccaaagctaaagatgttgaaggcatcggcgacgttgacctggttaactattttgaagttggtgcaacttactacttcaacaagaacatgtccacctatgttgattacatcatcaaccagattgattccgataacaaactgggcgtgggctctgacgacaccgttgctgttggtattgtgtaccagttctaa

SEQ ID NO: 1837 - DNA, 168 bp, Artificial Sequence
  Optimized genes for E. coli.
atgaaacgtcagaaacgcgatcgtctggaacgtgctcaccagcgcggttatcaggcgggtatcgctggtcgtagcaaagaaatgtgcccgtaccagaccctgaaccagcgttctcagtggctgggcggctggcgtgaagcgatggctgaccgtgtggtgatggcgtaa

SEQ ID NO: 1838 - DNA, 1041 bp, Artificial Sequence
  Optimized genes for E. coli.
atgaaaaaaaccgcaatcgctatcgccgttgctctggcgggtttcgcgaccgttgcacaggcggcgccgaaggacaatacctggtacaccggcgcgaaactgggctggtctcagtatcacgacactggcttcatcaacaataacggtccgactcacgaaaatcagttgggcgcaggtgcgttcggcggttaccaggttaacccatacgttggttttgaaatgggctacgactggctgggtcgtatgccgtacaaaggttctgtagaaaacggcgcttataaagcacaaggcgtacagctgaccgcgaagctgggctatccgatcaccgatgatctggatatctacactcgcctgggtggcatggtctggcgtgcggatactaaatccaacgtttacggtaaaaaccacgataccggtgtcagcccggtgttcgctggcggcgttgaatacgcgatcactccggaaatcgcaactcgtctggaatatcagtggaccaacaacatcggcgacgctcacaccattggcacccgtccggataacgggatgctgagcctgggtgtttcttaccgtttcggtcagggcgaagcggcaccggtagttgcgccagctccggcgccggcaccagaagttcagaccaaacacttcaccctgaaatctgacgttctgtttaacttcaacaaagcgacgctgaaaccggaaggccaggctgcgctggaccagctgtacagccagcttagcaacctggatccgaaagacggttccgttgtggtgctgggttataccgaccgtatcggtagcgatgcttacaaccagggtctgtctgaacgtcgtgctcagtctgttgttgattacctgatttctaaaggtatcccggctgacaaaatctccgcgcgtggtatgggtgaatctaacccggttaccggtaacacctgcgacaacgtaaaacagcgtgcagcactgatcgactgcctggcaccggaccgccgcgttgagatcgaagtgaaaggcatcaaagatgtggttactcagccgcaggcataa

SEQ ID NO: 1839 - DNA, 375 bp, Artificial Sequence
  Optimized genes for E. coli.
atgaccatgtacgcaacgctggaagaagctatcgatgcggcgcgtgaagagttcctggctgataacccgggtatcgacgctgaagatgctaacgttcagcagttcaacgcgcagaaatacgttctgcaggacggcgatatcatgtggcaggttgaattcttcgctgacgaaggcgaagaaggcgaatgcctgccgatgctgtctggtgaagcggctcagagcgtgttcgacggtgattacgatgagatcgaaatccgtcaggagtggcaggaagaaaacaccctgcacgaatgggacgaaggtgaattccagctggaaccgccgctggataccgaagagggtcgtgctgctgcagacgagtgggatgaacgttaa

SEQ ID NO: 1840 - DNA, 522 bp, Artificial Sequence
  Optimized genes for E. coli.
atgcagaaagttaaactgccgctgaccctcgatccggtacgtaccgctcagaaacgtctggattaccagggtatctacactccggatcaggtagaacgtgttgctgaaagcgttgtttctgttgactccgacgttgaatgttctatgagcttcgctatcgacaaccagcgtcttgctgttctgaacggcgatgcgaaagtgaccgttaccctggaatgccagcgctgcggtaaaccgttcactcaccaggtttacaccacctactgcttctctccggttcgttctgatgaacaggcggaagcgctgccagaagcttacgaaccgatcgaagttaacgaattcggcgaaattgatctgctggcgatggttgaagacgaaatcatcctggctctgcctgtggttccggttcacgacagcgaacactgtgaagtgtctgaagccgatatggtgttcggtgaactgccggaagaagcacagaagccgaacccgtttgctgtgctggcatctctgaaacgcaaataa

SEQ ID NO: 1841 - DNA, 174 bp, Artificial Sequence
  Optimized genes for E. coli.
atggcggttcagcagaacaaaccgacccgtagcaaacgcggtatgcgtcgttctcacgacgcgctgaccgcagtgaccagcctgtctgttgacaaaacctctggtgaaaaacacctgcgtcaccacatcaccgctgacggctactaccgtggtcgtaaagttatcgctaaataa

SEQ ID NO: 1842 - DNA, 954 bp, Artificial Sequence
  Optimized genes for E. coli.
atgtacaccaaaatcattggcaccggtagctacctgcctgaacaggttcgcaccaacgcagacctggagaaaatggttgacacctctgacgagtggatcgttactcgtactggcatccgtgaacgtcatatcgctgcaccgaatgaaaccgtttctactatgggttttgaagcggcgacccgtgcgattgaaatggctggtatcgaaaaagatcagatcggtctgatcgtcgttgcaaccacttccgcaactcacgcgttcccgtctgctgcttgccagattcagtctatgctgggcattaaaggctgcccggcattcgacgtagcggctgcctgtgcgggtttcacttacgcgctgtctgttgctgaccagtacgttaaatctggtgcggtgaaatacgctctggtggttggttccgacgttctggctcgtacctgcgacccgaccgaccgtggtaccatcatcatcttcggcgacggcgctggcgcagcagtgctggccgcttctgaagaaccgggcattatttctacccatctgcacgccgatggttcttacggtgaactgctgacgctgccgaacgctgatcgcgttaacccggaaaacagcatccacctgaccatggcaggcaacgaagtgttcaaagttgcggttaccgagctggcgcacatcgtggacgaaactctggcagctaacaacctcgaccgttctcagctggactggctggtaccgcaccaggcgaacctgcgtattatctccgcgactgcgaaaaaactgggtatgagcatggataacgttgttgtgaccctggatcgtcacggtaacaccagcgcggccagcgttccgtgcgcactggatgaagcagttcgtgacggtcgtatcaaaccgggtcagctggttttgctggaagctttcggtggtggcttcacctggggcagcgccctggtacgtttctaa

SEQ ID NO: 1843 - DNA, 930 bp, Artificial Sequence
  Optimized genes for E. coli.
atgacccagttcgcattcgttttcccgggtcagggcagccagaccgttggtatgctggcagatatggctgcttcctatccgatcgtcgaagaaactttcgcggaagcatctgctgcgctgggctacgacctgtgggcgttaacgcagcaaggtccggctgaagagctgaacaaaacctggcagactcagccggccctgctgaccgcgtctgttgctctctaccgtgtctggcagcagcagggtggtaaagcgccggcgatgatggctggccactctctgggtgaatacagcgcgctggtctgtgcgggcgtgatcgacttcgctgatgcagttcgtctggttgaaatgcgtggtaaattcatgcaggaagctgttccggaaggtaccggtgctatggccgctatcatcggtctggatgatgcttctatcgcgaaagcttgcgaagaagcggcagaaggccaggttgtttctccggttaacttcaacagcccgggtcaggtggttatcgctggtcacaaagaagccgttgagcgtgcaggcgctgcctgcaaagcagcgggtgcgaagcgtgctctgccgctgcctgtcagcgttccttctcactgcgcactgatgaaaccggcagctgacaaactggcggtagaactggctaaaatcaccttcaatgcaccgaccgtaccggtggtgaacaacgttgatgtgaaatgtgaaaccaacggcgacgcaatccgtgatgcgctggtacgtcagctgtacaacccggtacagtggaccaagtctgtagagtacatggcggcgcagggcgttgaacacctgtacgaagttggcccgggcaaagttctgactggcctgaccaaacgtatcgttgacaccctgacggccagcgccctcaacgaaccgtctgcaatggcagctgcactggaactgtaa

SEQ ID NO: 1844 - DNA, 735 bp, Artificial Sequence
  Optimized genes for E. coli.
atgaacttcgaaggcaaaatcgcactggtgaccggtgcttcccgtggtattggccgcgctatcgcggaaactctggccgcacgtggcgcgaaagtgattggtactgcaacctctgaaaacggtgcacaggcaatctctgattacctgggcgcaaacggtaaaggcctgatgctgaacgtaactgatccggcttctatcgaaagcgttctggaaaaaattcgtgctgaattcggcgaagttgacatcctggtaaacaacgctggcattacccgcgataacctgctgatgcgtatgaaagatgaagaatggaacgatatcattgaaaccaacctgtcttctgtgttccgtctgagcaaagcagtgatgcgcgcaatgatgaaaaaacgtcacggtcgtatcatcaccatcggttctgtagttggtaccatgggtaacggcggtcaggcgaactacgcagctgctaaagcgggtctgatcggcttctctaaatctctggcgcgtgaagtggccagccgcggtatcaccgttaacgttgttgctccgggtttcatcgaaaccgatatgacccgtgcgctgtccgatgatcagcgtgcaggcattctggctcaggttccggcaggtcgcctgggtggtgcgcaggaaatcgctaacgccgttgcgttcctggcatctgacgaagcggcttacatcactggtgaaacgctgcacgttaatggcggcatgtacatggtttaa

SEQ ID NO: 1845 - DNA, 237 bp, Artificial Sequence
  Optimized genes for E. coli.
atgtccaccatcgaagagcgtgttaaaaaaatcatcggtgaacagctgggcgtgaaacaggaagaagttaccaacaacgccagcttcgttgaagatctgggtgctgacagcctggataccgtagaactggtgatggcgctggaagaagagttcgacaccgaaatcccggatgaagaagctgaaaaaattaccaccgttcaggcagctatcgactacatcaacggtcaccaggcgtaa

SEQ ID NO: 1846 - DNA, 1434 bp, Artificial Sequence
  Optimized genes for E. coli.
atgttcaaaaacgcctttgccaacctgcagaaagtgggtaaatccctgatgctgccggtttctgttctgccaatcgccggtattctgttgggtgttggctccgctaacttctcctggctgccggcagtggtcagccacgttatggctgaagcgggtggttctgtgttcgcgaacatgccgctgatttttgctattggtgtagcgctcggcttcaccaacaacgatggcgtatctgcgctggctgcagttgttgcctacggcattatggttaaaaccatggcggtggtggcgccgctggttctgcacctgccggcggaagaaatcgcttctaaacatctggcagacactggcgtgctgggcggtatcatctccggtgccattgccgcttatatgttcaaccgcttctaccgtattaaattacctgaatacctgggcttcttcgctggtaaacgtttcgttccgattatcagcggtctggcggcaattttcactggtgtggtactgagttttatttggccgccgattggcagcgcgattcagaccttcagccagtgggcggcttaccagaacccggtagttgcgttcggcatctacggtttcattgaacgttgcctggtaccgttcggtctccaccacatctggaacgttcctttccagatgcagatcggtgaatacactaacgcagcaggtcaggttttccacggcgacatcccgcgttacatggcaggcgatccgaccgctgggaaactgagcggcggctttctgtttaaaatgtacggtctgcctgctgcggcgatcgcaatctggcactctgctaaaccggaaaaccgtgcgaaagtcggtggtatcatgatctctgcagcgctgacttccttcctgaccggtattactgaaccgatcgaattctctttcatgtttgttgcaccgatcctgtacatcattcacgctatcctggctggcctggcattcccgatttgcattctgctgggtatgcgtgacggtactagcttctctcacggtctgatcgacttcatcgtcctgtctggtaacagctccaagctgtggctgttcccgatcgttggtatcggctacgctattgtttactacaccatcttccgtgtgctgatcaaagcactggatctgaaaactccgggtcgtgaagatgcaaccgaagacgcaaaagcgaccggcacctctgaaatggctccggctctggtggcagctttcggtggcaaagagaacatcaccaatctggacgcctgtatcactcgtctgcgtgtttccgttgctgacgttagcaaagttgatcaggcgggcctgaaaaaactgggtgctgctggcgtggttgttgctggctctggcgttcaggctatctttggtaccaaatctgacaacctgaagaccgagatggatgaatatatccgtaaccactaa

SEQ ID NO: 1847 - DNA, 1251 bp, Artificial Sequence
  Optimized genes for E. coli.
atggaaagcaaagtagttgttccggcgcagggtaagaaaatcactctgcagaacggtaaactgaacgtgccagaaaatccgatcatcccgtacatcgaaggcgacggcattggcgttgacgttaccccggcgatgctgaaagtggttgatgcagctgttgaaaaagcgtacaaaggcgagcgtaaaatctcctggatggagatctacaccggtgaaaaatctactcaggtttacggtcaggacgtctggctgccggcagaaaccctggatctgattcgcgagtaccgtgttgcgatcaaaggcccgctgaccaccccagttggcggcggtatccgttctctgaacgttgctctgcgtcaggaactggacctgtacatttgcctgcgtccggttcgttactaccagggcactccgtctccggtaaaacacccggaattaaccgatatggttatcttccgtgaaaactctgaagatatctatgcgggcatcgagtggaaagctgacagcgcagacgcagagaaagtgattaagttcctgcgcgaagagatgggtgtgaaaaaaattcgtttcccggaacactgtggtatcggcattaaaccgtgcagcgaagaaggcaccaaacgcctggtacgtgctgctattgaatacgcgattgctaacgaccgtgactccgtgacgctggttcacaaaggtaacattatgaaattcaccgaaggcgcattcaaagactggggctatcagctggcgcgtgaagaattcggtggcgaactgatcgacggtggtccgtggctgaaagtcaaaaacccgaacaccggcaaagaaatcgtcatcaaagatgttatcgccgatgcgttcctccagcagattctgctgcgcccggctgaatacgatgtgatcgcttgtatgaacctgaatggtgattacatctctgacgcgctggctgcacaggtgggtggtattggtatcgcgccgggtgcgaacatcggtgacgaatgcgcactgtttgaagcaactcacggtactgcaccgaaatacgcaggccaggataaagttaacccgggcagcattatcctgtctgcggaaatgatgttgcgtcacatgggctggactgaagcggcggatctgatcgttaaaggtatggaaggtgcaatcaacgctaaaaccgttacttacgacttcgaacgtctgatggatggcgcgaaactgttgaaatgctccgaatttggcgatgctatcattgagaacatgtaa

SEQ ID NO: 1848 - DNA, 414 bp, Artificial Sequence
  Optimized genes for E. coli.
atgtctgaagcgctgaaaatcctgaacaacatccgtacgctgcgtgcgcaggcgcgtgaatgtactctggaaaccctggaagaaatgctcgaaaaactggaagtggttgttaacgaacgtcgtgaagaagagtctgctgctgcagctgaagttgaagagcgtacccgtaagctgcagcagtaccgtgagatgctgattgctgacggtatcgatccgaacgaactgctgaacagcctggcagcggtgaaatccggtaccaaagctaaacgtgctcagcgtccggcgaaatacagctacgttgacgaaaacggtgaaactaaaacctggaccggtcagggccgtactccggcagttatcaagaaagcgatggatgaacagggtaaatctctggatgacttcctgatcaaacagtaa

SEQ ID NO: 1849 - DNA, 1632 bp, Artificial Sequence
  Optimized genes for E. coli.
atgactaacatcaccaaacgtagcctggtcgctgcaggtgttctggctgctctgatggcgggcaacgtggcgctggcagcagacgttcctgcgggtgtgacgctggcagagaaacagactctggtgcgtaacaacggtagcgaagttcagagcctcgacccgcacaaaatcgagggcgttccggagtctaacatctcccgtgatctgtttgaaggtctgctggtttctgacctggacggtcacccggcgccgggtgttgctgaatcctgggataataaagacgctaaagtctggactttccacctgcgtaaagatgcgaaatggagcgatggtactccggtaactgcgcaggacttcgtttacagctggcagcgttccgttgacccgaacactgcttccccgtacgcatcttacctgcagtacggccacatcgctggtatcgacgaaatcctggaaggcaaaaagccgattaccgacctgggcgtgaaagctatcgatgatcacaccctcgaagtaaccctgtctgaaccggtgccttacttctacaaactgttggttcatccgtctaccagcccagtaccgaaagcggcaatcgaaaaattcggcgaaaaatggacccagcctggcaatattgttaccaacggcgcttataccctgaaagactgggtggtgaatgagcgtatcgtgctggaacgttctccgacctactggaacaacgccaaaactgttatcaaccaggttacttatctgccgatcgcatccgaagtgactgacgtgaaccgttaccgttctggtgaaattgatatgaccaataactctatgccaatcgaactgttccagaaactgaaaaaagagatcccggatgaggttcacgttgatccgtatctgtgcacctattactacgaaatcaataatcagaagccgccgttcaacgatgttcgcgttcgtaccgcactgaagctgggtatggatcgcgatatcatcgtcaacaaagtgaaagcacagggtaacatgccggcttacggttacaccccgccatacaccgatggcgcaaaactgactcagccggaatggttcggttggtctcaggaaaaacgcaacgaagaagcgaagaaattgctggcggaagcaggctataccgctgacaaaccactgaccatcaacctgctgtataacacctctgatctgcacaagaaactcgcgatcgccgcttcttctctgtggaaaaaaaacattggcgtaaacgttaagctggttaaccaggagtggaaaacctttctggacacccgtcaccagggcaccttcgatgtggcacgtgctggctggtgtgcggattacaacgagccgacttccttcctgaacaccatgctgagcaacagcagcatgaacacggcgcactacaaaagcccggcattcgactctatcatggcagaaaccctgaaagttactgatgaagctcagcgcaccgcgctgtacactaaagccgagcagcagctggataaagactccgcgattgtgccggtttattactacgttaacgcgcgtctggtaaaaccgtgggttggcggctacaccggtaaagatccgctggataacacttacactcgtaatatgtacatcgttaaacactaa

SEQ ID NO: 1850 - DNA, 507 bp, Artificial Sequence
  Optimized genes for E. coli.
atgagccagaccgttcacttccagggcaacccggttaccgtagctaacagcatcccgcaggcgggttctaaagcgcaaaccttcactctggtagcgaaagacctgtctgacgttacgctgggtcagttcgctggtaaacgcaaagttctcaacatcttcccgtctatcgacaccggtgtttgcgcagcttctgttcgtaaattcaaccagctggcaaccgaaatcgataacaccgtggtgctgtgtatctccgctgatctgccgttcgcgcagagccgtttctgtggcgctgaaggtctgaacaacgttatcaccctgagcactttccgtaacgcagaattcctgcaggcttacggcgttgctatcgctgacggtccgctgaaaggcctggcggcgcgtgctgtggttgttattgatgaaaacgacaacgtgattttctctcaactggttgacgaaattaccactgaaccggattacgaagcggcgctggctgttctgaaggcgtaa

SEQ ID NO: 1851 - DNA, 138 bp, Artificial Sequence
  Optimized genes for E. coli.
atgaaatctaaccgtcaggcgcgtcacatcctgggtctggatcacaaaatctccaaccagcgtaagatcgttaccgaaggcgacaaatcctctgttgttaacaacccgaccggtcgtaaacgtccggctgaaaaataa

SEQ ID NO: 1852 - DNA, 342 bp, Artificial Sequence
  Optimized genes for E. coli.
atgaaaatcaccctgagcaaacgtatcggtctgctggctatcctgctgccgtgcgcactggcgctgtctaccaccgttcacgctgaaaccaacaaactggttatcgaaagcggcgactccgcgcagagccgtcagcacgcggcgatggaaaaagagcagtggaacgatacccgtaacctgcgccagaaagttaacaagcgtaccgagaaagaatgggataaagctgacgctgcattcgacaaccgtgacaaatgtgaacagtctgctaacatcaacgcttactgggaaccgaacaccctgcgttgcctggaccgtcgtactggtcgtgtgatcactccgtag

SEQ ID NO: 1853 - DNA, 1533 bp, Artificial Sequence
  Optimized genes for E. coli.
atgcgtatcggtatcccgcgtgaacgtctgaccaacgaaacccgtgttgcggcaactccgaaaaccgttgagcagctgctgaagctgggttttaccgtggcggtagaaagcggtgctggtcagcttgccagctttgatgacaaagccttcgttcaggctggtgcggaaatcgttgaaggtaacagcgtctggcagtccgagatcattctgaaagtaaacgcgccgctggacgacgaaattgcactgctgaacccaggcaccaccctggtatcctttatctggccggcgcaaaacccggagctgatgcagaaactggctgagcgtaacgtgaccgtaatggcgatggattccgtaccgcgcatttctcgtgcccagtcgctggatgcgctttcttccatggccaacatcgcgggttaccgtgcaattgttgaagcggctcatgaattcggtcgtttcttcactggccagatcactgctgcgggcaaagttccgccggctaaagtgatggttattggcgcaggcgttgccggtctggctgcaattggtgccgctaactctctgggcgcgatcgttcgtgcgttcgacactcgtccggaagttaaagaacaggtacagtctatgggcgctgaatttctggaactggatttcaaagaagaagctggcagcggcgacggttatgccaaagttatgtctgacgcattcatcaaagctgaaatggaactgttcgctgctcaggcgaaagaggttgatatcatcgtcaccacggcgctgattccgggtaaaccggcaccgaagttgattacccgcgaaatggtggacagcatgaaagcaggttctgtgatcgtagacctggcagcgcagaacggtggcaactgcgaatacactgtaccaggtgaaatcttcaccactgaaaacggcgtgaaagtcatcggctacaccgatctgccgggccgtttgccgacccagagcagccagctgtacggtactaacctggttaacctgttgaaactgctgtgcaaagaaaaagacggcaatattactgttgacttcgatgatgtggtgattcgtggcgtaaccgttatccgtgctggcgaaatcacctggccagcaccaccgattcaggtttctgcacagccgcaggcagcacaaaaagcggcgccagaagtgaagaccgaagagaaatgtacctgcagcccgtggcgtaaatacgctttgatggctctggcaatcatcctgtttggctggatggcatctgttgctccgaaagagttcctgggtcacttcacggtgttcgcgctggcgtgtgttgttggttactacgttgtgtggaacgtttctcacgcgctgcacaccccgctgatgagcgttaccaacgctatctccggtattattgtcgtgggtgcattgctgcaaatcggtcagggcggttgggtgtccttcctgtcttttattgctgttctgatcgcttctatcaacatttttggtggtttcaccgtaactcagcgtatgctgaaaatgttccgtaaaaactaa

SEQ ID NO: 1854 - DNA, 468 bp, Artificial Sequence
  Optimized genes for E. coli.
atgatcaaacgtgttctggttgtttctatggttggtctgagcctggtgggttgcgtgaacaacgataccctgtctggcgacgtttacaccgcttctgaagcgaaacaggttcagaacgtatcttacggcaccatcgttaacgttcgtccggtacagatccagggcggcgatgacagcaacgtgatcggcgctatcggtggtgcggtgctgggtggcttcctgggcaataccgtgggcggtggtaccggtcgttctctggcaaccgcagcgggtgctgttgctggcggcgtggcaggccagggtgttcagtctgcaatgaacaaaacccagggcgttgaactggaaatccgtaaagatgatggcaacaccattatggtggtgcagaaacaaggtaacacccgtttctctccgggtcagcgtgtggtactggcttccaacggcagccaggtgaccgttagcccgcgttaa

SEQ ID NO: 1855 - DNA, 582 bp, Artificial Sequence
  Optimized genes for E. coli.
atgagctttgaactgccggcactgccttacgcgaaagacgctctggctccgcacatctccgcagaaaccatcgaataccactacggtaaacaccaccagacctacgttaccaacctgaacaatctgattaaaggtactgcattcgaaggtaaatctctggaagaaatcatccgttcttctgaaggcggcgtgttcaacaacgccgctcaggtttggaaccacaccttctactggaactgcctggcgccgaacgcaggcggtgaaccgaccggtaaagtggctgaagcgatcgctgcttccttcggttcttttgctgacttcaaagcgcagttcaccgacgcagctatcaaaaacttcggcagcggctggacctggctggtgaaaaattctgacggcaaactggcaatcgtttctacttccaacgctggcaccccgctgactaccgatgcgactccgctgctgaccgttgacgtctgggaacacgcttactacatcgactaccgtaacgcgcgtccgggttacctggagcacttctgggcgctggttaactgggaattcgttgctaaaaacctggcagcgtaa

SEQ ID NO: 1856 - DNA, 237 bp, Artificial Sequence
  Optimized genes for E. coli.
atgaaagcgaccaaactggttctgggtgctgttatcctgggcagcacgctgctggctggctgctccagcaacgccaaaatcgaccagctgtcttccgacgtacagaccctgaacgctaaagttgatcagctttccaacgatgttaacgcgatgcgttctgacgttcaggcagcgaaagatgatgcggcgcgtgctaaccagcgtctggataacatggcgactaaataccgtaaataa

SEQ ID NO: 1857 - DNA, 300 bp, Artificial Sequence
  Optimized genes for E. coli.
atggcactgaccaaagctgaaatgagcgaatacctgtttgacaaactgggtctgagcaaacgtgacgcgaaagaactggttgagctgttcttcgaagaaatccgtcgtgcgctggaaaacggcgaacaggttaagctgtctggtttcggtaacttcgacctgcgtgataaaaaccagcgtccgggtcgtaacccgaaaaccggtgaagatatcccgatcaccgcgcgtcgcgttgttaccttccgtcctggtcagaaactgaaatcccgtgttgaaaatgccagcccgaaagatgagtaa

SEQ ID NO: 1858 - DNA, 2388 bp, Artificial Sequence
  Optimized genes for E. coli.
atgaaattctccgaactgtggctgcgcgaatgggtgaacccagctatcgacagcgatgcgcttgcaaaccagatcaccatggcaggtctggaagttgatggcgtagaaccagtagctggttccttccacggcgtggtcgtgggtgaagtagttgagtgcgcacagcacccaaacgctgataagttgcgtgtcaccaaagttaacgttggtggtgatcgcctgcttgacatcgtctgtggtgcgccgaactgccgtcagggcctgcgcgtggctgttgctaccatcggcgcggtgctgcctggcgatttcaaaatcaaagctgctaaactgcgtggtgagccgtctgaaggtatgctgtgttctttcagcgaactcggtatctctgacgaccactctggtattattgagctgccggctgacgctccgatcggtactgacattcgtgaatacctcaaactggacgataacaccatcgagatctccgtaactccgaaccgcgcagactgcctgggtatcatcggtgtggcgcgtgatgtggcagttctgaatcagctgccgctggttcagccggaaatcgttcctgttggcgcaactattgatgacaccctgccaatcactgttgaagcaccagaagcctgcccgcgctacctgggccgcgttgtaaaaggtatcaacgtgaaagcaccgaccccgctgtggatgaaagaaaaactgcgccgctgcgggatccgttctatcgacgcagtggttgacgtaaccaactacgttctgctggaactgggtcagccgatgcacgcgtttgacaaagatcgtatcgaaggtggcattgttgttcgtatggcgaaggaaggcgaaacgctggtcctgctggacggcaccgaagcaaaactgaacgcggatacgctggtgattgccgatcacaacaaagccctggcaatgggcggtatcttcggcggcgaacattctggcgttaacgacgaaacccagaacgtcctgctggaatgtgcgttcttctctccgctgtctattaccggtcgtgctcgtcgtcacggtctgcataccgatgcttctcaccgttacgaacgcggcgttgacccggcgctgcaacacaaagcgatggaacgtgcgactcgtttgctgattgatatctgcggtggtgaagccggtccggttatcgatattaccaatgaagcgaccctgccgaaacgtgcaaccattactctgcgtcgttccaaactcgaccgtctgattggtcaccacatcgccgatgagcaggtgaccgacattctgcgccgtctgggctgtgaagttaccgagggcaaagacgagtggcaggctgtcgccccgtcctggcgttttgatatggaaatcgaagaagatctggtagaagaggttgcccgtgtatacggttacaacaacatcccggacgaaccggtacaggccagcctgatcatgggtactcaccgcgaggcagatctttccctgaaacgcgttaaaacccttctcaacgataaaggctatcaggaagtgatcacctacagcttcgtagatccgaaggtgcagcagatgatccacccgggtgttgaagctctgctgttgccgagcccgattagcgtcgaaatgagcgccatgcgtctgagcctatggaccgggctgctggcaaccgtagtttataaccaaaaccgccaacagaatcgcgtacgtatttttgaaagcggcctgcgtttcgttccggatactcaggcgccactgggcatccgccaggacctgatgctggcgggtgttatttgcggcaaccgttatgaagaacactggaaccttgcgaaagaaactgtagacttctacgacctgaaaggcgacctcgaatctgtactggatctgaccggcaagctgaacgaagttgaattccgtgccgaagctaacccggcactgcacccgggccagtctgcagcaatctatctgaagggcgagcgcattggctttgttggtgtcgttcaccctgaacttgaacgtaaactggatctgaacggccgtaccctggttttcgaactggagtggaacaagctggctgaccgtgttgtgccgcaggcacgtgaaatttctcgcttcccggcgaaccgtcgcgatatcgctgtagtggttgctgaaaacgtaccggcagcggacatcctctctgaatgcaaaaaagtgggcgtaaaccaggttgtcggcgtcaacctgttcgacgtttaccgcggtaaaggtgtagcggaaggctacaaatctctggcgatttcgctgatcctgcaggataccagccgtactctggaagaagaagagattgctgccaccgttgcgaaatgcgtggaagcgctgaaagagcgtttccaggcgtcactgcgtgactaa

SEQ ID NO: 1859 - DNA, 357 bp, Artificial Sequence
  Optimized genes for E. coli.
atggcgcgcgtgaaacgcggcgtgatcgctcgtgcacgtcacaaaaaaattctgaaacaggctaaaggctactacggtgcgcgttctcgcgtttaccgcgtagcattccaggcggttatcaaagccggtcagtacgcttaccgtgaccgtcgtcagcgtaaacgtcagttccgtcagctgtggatcgcccgtatcaacgctgctgcacgccagaacggtatctcttacagcaaattcatcaacggcctgaagaaagcttctgtagaaatcgaccgcaaaatcctggctgacatcgcggtgttcgacaaagttgcgttcaccgcactggttgaaaaagcgaaagcagcgctggcgtaa

SEQ ID NO: 1860 - DNA, 198 bp, Artificial Sequence
  Optimized genes for E. coli.
atgccgaaaatcaaaaccgttcgtggtgcggcgaaacgcttcaaaaaaactggtaaaggtggtttcaagcacaaacacgctaacctgcgccacatcctgaccaagaaagcgaccaaacgtaagcgtcacctgcgtccgaaggcgatggtttctaaaggcgacctgggtctggttatcgcttgcctgccgtacgcgtaa

SEQ ID NO: 1861 - DNA, 1929 bp, Artificial Sequence
  Optimized genes for E. coli.
atgccggtaattaccctgccggacggttctcagcgccactacgatcacgctgtttctccgatggacgtagctctggatatcggtcctggcctcgcaaaagcatgtatcgctggtcgtgttaacggcgaactggtagacgcctgtgatctgatcgaaaacgatgctcagctgtctattatcactgctaaagatgaagaaggcctggaaatcatccgtcacagctgcgcacacctgctgggccacgcgattaaacaactgtggccgcacaccaaaatggcgatcggcccggttatcgacaacggtttctactacgacgttgatctcgatcgtactctgacccaggaagacgttgaggcactggagaaacgcatgcacgagctggcagaaaaaaactatgatgttatcaaaaaaaaagtatcctggcacgaagcacgtgaaaccttcgctaaccgtggtgaatcctataaagtgtctatcctggatgaaaatattgctcacgacgacaaaccgggcctgtacttccatgaagaatacgttgacatgtgtcgtggtccgcatgtaccgaacatgcgtttctgccatcacttcaaattgatgaaaactgcaggcgcttactggcgtggcgacagcaataacaaaatgctgcaacgtatctacggcaccgcctgggcggataagaaagcgctgaacgcatacctgcagcgtctggaagaagctgcgaaacgtgaccaccgtaaaattggtaaacagctggacctctatcacatgcaggaggaagcgccgggtatggttttctggcacaacgacggctggaccattttccgtgagctggaagtgttcgttcgtagcaaactgaaagagtatcagtaccaggaagtgaaaggcccgttcatgatggatcgcgttctgtgggaaaaaaccggtcactgggataactacaaagacgcgatgttcaccacctcttctgaaaaccgcgaatattgtatcaagccgatgaactgcccgggtcatgttcagatcttcaaccagggtctgaaatcttaccgtgatctgccgctgcgtatggctgaattcggctcctgccaccgtaacgaaccgtctggcagcctgcacggtctgatgcgcgtacgcggcttcactcaggatgatgcgcacatcttttgcaccgaagagcagattcgcgatgaggtaaatggttgcatccgcctggtttacgatatgtacagcactttcggttttgaaaagatcgttgttaaactgtcgactcgtccggaaaagcgtattggttctgacgaaatgtgggaccgtgctgaggctgacctggcggttgcgctcgaagagaacaacatcccgtttgagtaccagcttggcgaaggtgcgttctacggtccgaaaatcgagttcacgctgtatgactgcctggaccgcgcatggcagtgcggtactgtgcagctcgacttctctctgccaagccgtctgtccgccagctatgttggtgaagataacgaacgcaaagttccggtgatgatccaccgcgctatcctcggctctatggaacgttttatcggtattctgactgaagaatttgctggcttcttcccgacctggctggctccggtacaggttgtgattatgaacatcaccgatagccagagcgaatacgtgaatgaactgacgcagaaactgagcaacgccggtatccgtgtaaaagctgatctgcgcaacgaaaaaatcggctttaaaattcgtgaacacactctgcgtcgcgtgccgtacatgctggtgtgcggcgataaagaagttgaaagcggtaaagttgctgtacgtacccgtcgtggcaaagacctgggtagcatggatgtgaacgaggtgatcgaaaagctgcagcaggaaattcgttcccgttctctgaagcagctggaagagtaa

SEQ ID NO: 1862 - DNA, 1344 bp, Artificial Sequence
  Optimized genes for E. coli.
atggatcagacttacagcctggaatctttcctgaaccacgtacagaaacgcgacccgaaccaaaccgagttcgcgcaggctgttcgtgaagtgatgaccactctgtggccgttcctggaacaaaacccgaaataccgccagatgtctctgctggagcgcctggttgaaccggagcgtgtaatccagttccgtgtggtctgggtggatgaccgtaaccagattcaggttaaccgtgcctggcgtgtgcagttctcttctgcaatcggcccgtacaaaggcggtatgcgcttccacccgtctgtaaacctgtctatcctgaaattcctcggctttgaacagaccttcaaaaacgcgctgaccacgctgccgatgggtggtggcaagggcggcagcgacttcgatccgaaaggtaaatctgaaggcgaagtaatgcgtttctgccaggcactgatgactgagctgtaccgtcacctgggtgctgacaccgacgttccggcaggcgatatcggtgttggcggtcgcgaagttggtttcatggcgggtatgatgaaaaaactgagcaacaacaccgcctgtgtgttcactggtaaaggcctgtccttcggtggctcgctgatccgtccggaagctaccggttacggtctggtgtacttcaccgaagcaatgttgaaacgtcatggcatgggcttcgaagggatgcgtgtcagcgtttctggttccggtaacgttgcacagtacgctatcgagaaagcgatggaattcggcgcacgcgtgatcaccgcttctgactccagcggcaccgttgttgacgaaagcggttttaccaaagagaagctggctcgtttgattgaaatcaaagcaagccgtgacggtcgtgttgccgattacgcgaaagaatttggtctggtttacctggaaggtcagcaaccgtggtccctgccggttgacatcgctctgccgtgcgcaactcagaacgaactggacgtagacgcagcgcaccagctgattgccaacggtgtgaaagccgttgctgaaggtgcgaacatgccgaccaccatcgaagcgactgaactgttccagcaggcgggcgtgctgtttgctccgggcaaagctgcaaacgctggcggcgtagcgacctctggcctcgaaatggctcagaacgccgcacgtctgggctggaaagcggaaaaagttgatgcgcgtctgcaccacatcatgctggatattcaccatgcttgcgtggaacacggtggtgaaggcgagcagaccaactacgttcagggcgctaacatcgccggtttcgttaaagtggctgatgctatgctggcgcaaggcgttatctaa

SEQ ID NO: 1863 - DNA, 996 bp, Artificial Sequence
  Optimized genes for E. coli.
atgaccatcaaagttggtattaacggtttcggtcgtatcggtcgcattgtgttccgtgctgcgcagaaacgttctgacattgaaatcgttgctatcaacgatctgctggatgctgattacatggcttacatgctgaaatacgattccactcacggccgttttgacggcaccgttgaagtaaaagatggtcacctgatcgttaacggcaagaaaatccgtgtgaccgcagaacgtgatccggctaacctgaaatgggatgaagtgggcgttgatgttgttgcggaagcgaccggtctgttcctgaccgacgaaaccgcgcgtaaacacatcaccgctggtgcgaaaaaagtggtgatgacgggcccgtccaaagataacaccccgatgttcgttaaaggcgcaaacttcgacaaatatgccggtcaggatatcgtcagcaatgcttcctgcaccaccaactgcctggcaccgctggctaaagttatcaacgacaacttcggcatcatcgaaggcctgatgactaccgttcacgctaccactgcaacgcaaaaaaccgttgacggtccgtctcacaaagactggcgtggtggtcgtggcgcttctcagaacatcattccgagctctactggcgcggcaaaagcggttggcaaagtgctgccggaactgaacggtaaactgacgggtatggcgttccgcgttccgactccgaacgtttctgttgtcgatctgactgttcgtctggaaaaagctgcaacctacgaacagattaaagcggcggtgaaagcagctgctgaaggtgaaatgaaaggtgttctgggctacaccgaagatgatgtggttagcactgacttcaacggcgaagtttgtacttccgtatttgatgcgaaggcgggtatcgcgctgaatgataactttgttaagctggtttcctggtacgacaacgaaactggttacagcaacaaagtactggacctgattgctcacatttctaaataa

SEQ ID NO: 1864 - DNA, 801 bp, Artificial Sequence
  Optimized genes for E. coli.
atggaaatcaccaccctgcagatcgtactggtcttcatcgttgcctgtatcgccggtatgggttccatcctggacgaattccagttccaccgtccgctgatcgcatgtactctggttggtatcgtgctgggtgatatgaaaaccggcattatcatcggcggtacgctggaaatgatcgcgctgggctggatgaacatcggtgcagcggttgctccggatgcggcgctggcgagcatcatctctaccattctggtaatcgctggtcaccagtctatcggtgcgggtattgctctggctatcccgctggcagctgcaggtcaggttttaaccatcattgttcgtactattaccgttgcgttccagcacgctgctgacaaagcggctgataacggtaacctgaccgcaatctcctggatccacgtttcttctctgttcctgcaagcgatgcgtgtggcgatcccggcagtgatcgttgcactgagcgttggcacctctgaagtgcagaacatgctgaacgccattccggaagttgttactaacggcctgaatattgccggcggcatgattgtggttgtgggttacgcaatggttatcaacatgatgcgcgctggctacctgatgccgttcttctacctcggcttcgttaccgccgcattcaccaacttcaacctggtggcacttggcgttattggtactgtgatggctgttctgtacatccagctgtctccgaaatacaaccgtgttgcgggcgcaccggcgcaggcggcaggcaacaacgatctggacaacgaactggattaa

SEQ ID NO: 1865 - DNA, 210 bp, Artificial Sequence
  Optimized genes for E. coli.
atggcgaaaatcaaaggtcaggttaaatggttcaacgaaagcaaaggctttggtttcatcactccggctgacggttctaaagatgtgttcgttcacttctctgcgattcagggcaacggcttcaaaaccctggctgaaggtcagaacgttgaatttgaaatccaggacggccagaaaggtccggcagctgttaacgtgaccgctatctaa

SEQ ID NO: 1866 - DNA, 144 bp, Artificial Sequence
  Optimized genes for E. coli.
atgtgtggtatcttctccaaagaagttctgagcaaacacgttgacgttgaataccgtttctctgctgaaccgtacatcggtgcttcctgctccaacgtttctgtgctgtctatgctgtgcctgcgtgcgaaaaaaaccatctaa

SEQ ID NO: 1867 - DNA, 801 bp, Artificial Sequence
  Optimized genes for E. coli.
atgaaactggctcatctgggtcgccaggctctgatgggcgtgatggctgttgcgctggttgctggcatgagcgtaaaatccttcgctgatgaaggtttgctgaacaaagtgaaagagcgtggtactctgctggtcggtctggaaggcacctatccgccgttctctttccagggcgatgacggtaaactgaccggttttgaagttgaatttgctcagcagctggcgaaacacctgggcgtagaagcttctctgaaaccgaccaaatgggatggtatgctggcaagcctggacagcaaacgtattgatgttgttatcaaccaggttaccatctctgacgaacgtaaaaagaaatatgacttctccactccgtacaccatttctggtatccaggcactggtgaagaaaggcaacgaaggcactatcaaaactgctgacgacctgaagggcaaaaaagttggcgttggcctggggactaactacgaagaatggctgcgtcagaacgttcagggtgttgacgttcgtacctacgacgatgatccgactaaataccaggacctgcgcgttggtcgtatcgacgcgattctggtagaccgtctggcagcgctggatctggttaaaaaaaccaacgacaccctggcggtaactggcgaagcgttcagccgtcaggaaagcggtgtggcattgcgcaaaggtaacgaagatctgctgaaagcggttaacgatgctatcgctgaaatgcagaaagacggcacgctgcaggcgctgtctgaaaaatggttcggtgcagacgtaaccaagtaa

SEQ ID NO: 1868 - DNA, 330 bp, Artificial Sequence
  Optimized genes for E. coli.
atggaaaccaccaaaccgtccttccaggacgttctggaattcgttcgtctgttccgtcgtaaaaacaaactgcagcgtgaaatccaggatgttgaaaaaaaaatccgtgacaaccagaaacgtgtgctgctgctggataacctgtctgactatatcaagccgggtatgagcgtagaagcgattcagggtatcattgcttctatgaaaggcgactacgaagatcgcgttgatgattacatcatcaaaaatgctgaactgagcaaagaacgtcgcgatatctccaagaaactgaaagcgatgggcgaaatgaaaaacggtgaagctaaataa

SEQ ID NO: 1869 - DNA, 1407 bp, Artificial Sequence
  Optimized genes for E. coli.
atgagcaaacaacaaattggcgttgttggtatggcggtgatgggtcgcaacctggcactgaacatcgaatcccgtggttacaccgtttccatctttaaccgttctcgtgaaaaaaccgaagaagttattgctgaaaacccgggtaaaaaactggtaccgtactacactgtaaaagaattcgttgaaagcctggaaaccccgcgtcgcattctgctgatggtgaaagcgggcgcaggcaccgatgcagctatcgacagcttgaaaccgtatctggacaaaggcgacatcatcatcgatggtggtaacaccttcttccaggacaccatccgtcgtaaccgcgaactctccgctgaaggtttcaacttcatcggtaccggtgtttctggtggtgaagaaggcgcgctgaaaggtccgtctatcatgccgggcggtcagaaagaagcttacgaactggtggcaccgatcctgactaaaatcgcagcggttgcggaagacggcgaaccgtgcgtgacttacatcggcgctgacggtgctggtcactacgttaaaatggttcacaacggtattgaatatggcgatatgcaactgatcgccgaagcatacagcttgctgaaaggcggcctgaacctgaccaacgaagagctggctcagacctttaccgagtggaacaacggcgaactgagctcttacctcattgatattaccaaagatatcttcaccaagaaagacgaagatggcaactacctggttgacgttatcctggatgaagcggctaacaaaggtactggcaaatggaccagccagtctgcactcgacctgggcgagccgctgtctctgatcactgaatctgttttcgcgcgttatatctcctcgctgaaagatcagcgcgttgctgcttctaaagttctgtccggcccgcaagcgcagccggcgggtgataaagcagaatttatcgagaaagtgcgtcgtgctctgtacctgggtaaaatcgttagctatgcccagggcttctctcagctgcgcgctgcatctgaagaatacaactgggatctgaattacggtgaaatcgcgaaaattttccgtgctggctgtatcattcgtgcacagttcctgcagaagatcaccgacgcttatgcggaaaatccgcagattgccaaccttctgctggcgccgtatttcaaacagatcgctgatgattaccagcaggcgctgcgtgatgtggttgcctacgctgttcagaacggtatcccggttccgactttcagcgcggcggtagcttactatgactcctaccgtgcggcagtgctgccggcaaacctgattcaggctcagcgtgactacttcggtgcgcatacctacaaacgtatcgacaaagagggcgtgttccacaccgaatggctggactaa

SEQ ID NO: 1870 - DNA, 285 bp, Artificial Sequence
  Optimized genes for E. coli.
atgaaacgtaaaatcatcgttgcttgcggtggtgctgttgcgacctctaccatggctgctgaagaaatcaaagagctgtgccagaaccacaacatcccggttgaactgatccagtgccgtgttaacgaaattgaaacctacatggatggcgttcatctgatttgcaccaccgcgaaagttgaccgttccttcggcgacattccgctggttcacggtatgccgttcatctccggcatcggtatcgaagcgctgcaaaacaaaattctgaccatcctgcagggctga

SEQ ID NO: 1871 - DNA, 453 bp, Artificial Sequence
  Optimized genes for E. coli.
atgactaacctgttcgttcgttccggtatctcctttgttgaccgttctgaagtgctgactcacatcggtaacgaaatgctggcgaaaggcgttgttcatgacacctggccgcaagcgctgatcgcgcgtgaagctgaattcccgactggcatcatgctggaacagcacgcgatcgcaatcccgcactgtgaagcgattcacgctaaatcttctgctatctacctgttgcgtccgaccaacaaagttcacttccagcaggctgacgatgataacgacgttgctgtttctctggttatcgctctgattgtagaaaacccgcagcaacaactgaagctgctgcgttgcctgtttggtaaactgcagcagccggatatcgttgaaaccctgatcactctgccggaaactcagctgaaagaatacttcaccaaatacgttctggattctgacgagtaa

SEQ ID NO: 1872 - DNA, 1263 bp, Artificial Sequence
  Optimized genes for E. coli.
atgaaaaccctgattgcacgtcacaaagcgggcgaacacattggtatctgctccgtctgttctgctcacccgctggtgattgaagcagcactggcgttcgaccgcaacagcactcgtaaagtactgatcgaagcaaccagcaatcaggttaaccagttcggcggttacaccggcatgactccggcagacttccgtgagttcgttttcaccatcgctgacaaagttggttttgcgcgtgagcgcatcatcctgggcggcgaccatctgggcccgaactgctggcagcaggaaaacgccgacgcggcgatggaaaaatccgttgagttggtgaaagaatacgttcgtgcaggcttctctaaaatccacctggatgcgtctatgagctgcgctggcgatccgatccctctggcgccggaaaccgttgctgaacgcgctgcagttctgtgcttcgcggcagaaagcgtggcgaccgactgccagcgtgaacaactgtcttacgtgatcggtaccgaagttccggtaccgggtggtgaagcttctgcgattcagagcgttcacatcacccacgttgaagatgctgctaacacgctgcgtactcaccagaaagcattcatcgcccgtggtctgactgaagcgctgacgcgtgttattgctatcgttgttcagccgggcgtagaattcgatcacagcaacatcattcactatcagccacaggaagcgcaaccgctggctcagtggattgagaacacccgtatggtttacgaagcgcactctaccgattaccagacccgcactgcttactgggaactggttcgcgaccacttcgcaattctgaaagtgggtccggcgctgaccttcgctctgcgtgaagccatcttcgccctggcacagatcgagcaggagctgatcgcgccagaaaaccgttccggttgcctggctgttatcgaagaagtgatgctggacgaaccgcagtattggaaaaaatattaccgcaccggtttcaacgattctctgctggatatccgttacagcctgagcgaccgtattcgctactactggccgcactcccgtatcaaaaactccgtagagaccatgatggtgaacctggaaggcgttgacattccgctgggtatgatctctcagtacctgccgaaacagtttgaacgtatccagtctggtgaactgtccgcaatcccgcatcagctgatcatggataaaatttacgatgtgctgcgcgcataccgttatggctgcgcagagtaa

SEQ ID NO: 1873 - DNA, 855 bp, Artificial Sequence
  Optimized genes for E. coli.
atgtacgttgtttctactaaacagatgctgaacaacgcgcagcgtggtggttacgctgttccggcgttcaacatccacaacctggaaaccatgcaggtggtggttgaaactgctgctaacctgcatgcaccggtaatcatcgccggtactccgggtaccttcactcacgctggcaccgaaaacctgctggctctggtttccgcgatggcgaagcagtaccatcatccgctggcaatccatctggaccaccacaccaaattcgacgacatcgctcagaaagtgcgttctggcgttcgttccgtgatgatcgatgcgtctcacctgccgttcgcccagaacatttctcgcgttaaagaagttgttgacttctgccaccgtttcgatgtgtctgtagaagccgagctgggccagctgggcggtcaggaagatgacgttcaggttaacgaagctgacgcactgtacaccaacccggcacaggcacgtgaatttgctgaagcgaccggtatcgacagcctggcggttgctatcggtacggcgcacggtatgtatgcttctgcgccggctctggatttcagccgtctggagaacatccgtcagtgggtgaatctgccactggtgctgcacggcgcatctggtctgtctaccaaagatatccagcagaccatcaaactgggtatttgcaaaatcaacgttgcgactgaactgaaaaatgcattctctcaggcgctgaaaaactacctgaccgagcacccggaagcaaccgatccgcgtgattacctgcagagcgcgaaatctgcaatgcgcgatgttgtcagcaaagttatcgcagactgcggttgtgaaggtcgtgcgtaa

SEQ ID NO: 1874 - DNA, 567 bp, Artificial Sequence
  Optimized genes for E. coli.
atggttaaatcccagccgatcctgcgctacattctgcgtggtattccggcaatcgccgttgctgttctgctgagcgcctgttctgctaacaacaccgcgaaaaacatgcacccggaaactcgtgcggttggttctgaaaccagctctctgcaggcttctcaggacgaatttgaaaacctggttcgtaacgttgacgttaagagccgtatcatggatcagtacgctgactggaaaggcgtgcgttatcgtctgggtggttccaccaagaaaggtatcgactgctccggttttgttcagcgtaccttccgtgaacaattcggtctggaactgccgcgtagcacctacgaacagcaggaaatgggtaaatctgtttctcgttccaacctgcgtactggcgacctggtgctgttccgcgctggctctaccggtcgtcacgttggcatctacatcggtaacaaccagttcgttcacgcgtctacttcttctggcgttatcatctccagcatgaacgaaccgtactggaaaaaacgttacaacgaagcgcgtcgtgtactgtcccgttcttaa

SEQ ID NO: 1875 - DNA, 285 bp, Artificial Sequence
  Optimized genes for E. coli.
atgttcaccatcaacgctgaagtgcgtaaagagcagggcaaaggcgcttctcgtcgtctgcgtgctgctaacaaattcccggcaatcatctacggtggtaaagaagcgccgctggctatcgaactggatcacgacaaagtgatgaacatgcaggcgaaagcggaattctacagcgaagttctgaccatcgttgttgacggtaaagaaatcaaagttaaagctcaggacgttcagcgtcacccgtacaaaccgaaactgcagcacatcgacttcgttcgtgcgtaa

SEQ ID NO: 1876 - DNA, 1104 bp, Artificial Sequence
  Optimized genes for E. coli.
atgaaagtgaaagttctgtcgctgttggttccggcactgctggtggcgggtgcggcgaacgccgcggaagtttacaacaaagacggcaacaaactggatctgtacggcaaagtcgatggtctgcactacttctccgacaacaaagatgttgatggcgatcagacttacatgcgtctgggcttcaaaggcgaaacccaggttactgaccagctgaccggttacggtcagtgggaataccagattcagggcaacagcgcagaaaacgaaaataactcctggactcgcgttgcatttgctggcttgaaattccaggacgttggttcctttgactatggtcgcaactacggcgtggtttatgatgtaaccagctggaccgacgtgctgccggaatttggcggtgatacctatggctctgacaacttcatgcagcagcgtggtaacggttttgcgacctaccgtaacaccgatttcttcggcctggttgacggcctgaacttcgctgttcagtatcagggtaaaaacggtaacccgtccggtgaaggtttcacctctggcgttaccaacaacggccgtgatgcgttgcgtcagaatggtgacggtgtgggtggttctatcacttatgactacgaaggctttggtatcggcggcgctatctccagcagcaaacgtaccgacgcgcaaaacactgctgcttacatcggtaatggcgaccgtgctgaaacttacactggcggtctgaaatacgacgctaacaacatttatctggctgcacaatacacccagacctataacgcaacccgtgttggcagcctgggctgggcgaataaagcgcagaactttgaagcggttgctcagtaccagttcgacttcggtctgcgtccgtctctggcatacctgcagtctaaaggtaaaaatctgggtcgtggctacgatgacgaagatatcctgaaatatgtggatgtgggcgcaacttactacttcaacaagaacatgtccacctacgttgattacaaaatcaacctgctggacgataaccagtttactcgtgacgcaggcatcaacaccgataacatcgttgcgctggggctggtctatcagttctaa

SEQ ID NO: 1877 - DNA, 501 bp, Artificial Sequence
  Optimized genes for E. coli.
atgcatgaaaaccagcagccgcagaccgaagcctttgaactgtctgcagctgaacgtgaagcgatcgaacacgaaatgcaccactacgaagatccgcgtgctgccagcattgaagcactgaaaatcgttcagaaacagcgtggctgggttccggatggcgcgattcacgctatcgctgacgtgctgggtatcccggcttctgacgttgaaggcgttgcgaccttctacagccagatcttccgtcagccggttggccgtcacgttatccgttactgcgattccgttgtttgccacatcaacggctaccagggcattcaggcggcgctggaaaaaaaactgaacatcaaaccgggtcagactacctttgacggtcgtttcaccctgctgccgacctgctgcctgggcaactgcgacaaaggtccgaacatgatgatcgacgaagacactcacgcgcacctgaccccagaagctattccggaattgctggagcgctacaaataa

SEQ ID NO: 1878 - DNA, 1203 bp, Artificial Sequence
  Optimized genes for E. coli.
atgtccagcaaactggttctggtgctgaactgcggttcctccagtttgaaattcgctatcattgatgctgttaacggcgaagaatacctgagcggtcttgctgaatgcttccatctgccggaagcacgtattaaatggaaaatggatggtaacaaacaggaagctgcgctgggcgcaggcgctgcacactctgaagcgctgaacttcatcgtcaacaccatcctggctcagaaaccagaactgtccgcgcagcttactgcaatcggtcaccgtatcgttcacggcggcgaaaaatacaccagcagcgttgtgatcgacgaaagcgtgattcagggcatcaaagatgcagcttccttcgcgccgctgcacaacccggctcacctgatcggcatcgaagaggcactgaaatctttcccgcagctgaaagacaaaaacgttgctgtatttgacaccgcattccatcagaccatgccggaagaatcttatctgtatgcgttgccgtacaacctgtacaaagaacacggtattcgtcgttatggcgcgcacggtacttctcacttctacgtgactcaggaggcagcgaaaatgctgaataaaccggtagaagaactcaacatcatcacctgccacctcggcaacggtggttctgtttctgccatccgtaatggcaaatgtgttgatacctctatgggtctgaccccgctggaaggtctggtgatgggcactcgttctggtgatatcgatccggcaattatcttccacctgcatgacactctgggtatgagcgtagacgcgatcaacaaactgctgactaaagagtctggcctgcttggcctgaccgaagtgacctctgactgccgttacgttgaagataactacgcaaccaaagaagacgctaaacgtgcaatggatgtttactgccatcgtctggcaaaatatattggtgcttacactgctctgatggacggtcgtctggatgcggtggtgttcaccggcggtatcggtgaaaacgccgcgatggttcgtgaactgtctctgggtaagctgggcgttctcggttttgaagttgaccacgaacgtaacctggcggcgcgtttcggtaaatccggtttcattaacaaggaaggcacccgtccggcggttgttatcccgaccaacgaagagctggtaatcgcacaggacgccagccgcctgacggcgtaa

SEQ ID NO: 1879 - DNA, 1221 bp, Artificial Sequence
  Optimized genes for E. coli.
atgaaacgtgcggtgatcactggtctgggcattgtttcttccatcggtaacaaccagcaggaagttctggcctctctgcgtgaaggtcgttccggtatcaccttctctcaggagttgaaagattctggtatgcgttctcacgtctggggcaacgttaagctggataccactggcctgattgatcgcaaagtggttcgtttcatgagcgatgcgtctatttacgcattcctgtctatggaacaggctatcgctgacgcaggcctgagcccagaagcttaccagaacaacccgcgtgttgggctgatcgccggttctggaggcggcagcccgcgcttccaggtttttggtgccgatgcaatgcgcggtccgcgtggtctgaaagctgtgggcccgtacgttgttaccaaagcgatggcttctggcgtgagcgcctgcctggctaccccgttcaaaatccacggtgttaactacagcatttcttctgcttgcgcaaccagcgcacactgtatcggcaatgctgttgaacaaattcagctgggtaaacaggatatcgtgttcgctggcggcggtgaagaactgtgctgggaaatggcatgtgaatttgatgctatgggtgcgctgtccaccaaatacaacgacaccccggaaaaagcaagccgtacctacgacgctcaccgtgacggctttgttatcgcgggcggtggtggcatggtggtggtagaagagctggagcacgctctggcgcgtggcgcgcacatctacgctgaaatcgttggctacggtgcaacttctgacggtgctgatatggttgctccgtccggcgaaggcgcagtacgttgtatgaaaatggcgatgcacggcgttgacacgccgatcgactacctgaacagccatggtacttccactccggttggtgatgtgaaagaactggcagcgattcgcgaagtgtttggcgacaaatctccggcgatctccgcgaccaaggcaatgaccggtcacagcctcggcgctgctggtgttcaggaagcaatctatagcctgctgatgctggaacacggtttcatcgcaccgtctatcaacatcgaagaactggacgagcaggcggcgggtctgaatattgtgaccgaaaccaccgaccgtgagctgaccacggtgatgtccaactccttcggcttcggtggtaccaacgcaacgctggttatgcgtaaactgaaagactaa

SEQ ID NO: 1880 - DNA, 972 bp, Artificial Sequence
  Optimized genes for E. coli.
atgagcaaaattttcgaagataacagcctgaccatcggtcacactccgctggtacgcctgaaccgtattggcaacggtcgtatcctcgcgaaagttgaatcccgtaacccgtccttctctgttaaatgccgtatcggtgcgaacatgatctgggatgctgaaaaacgtggcgtactgaaaccaggcgtggaactggttgagccgacctctggtaacaccggcattgctctggcttacgttgcagctgcacgtggttacaaattaaccctgacgatgccggaaaccatgtctatcgaacgccgtaaactgctgaaagcgctgggtgctaacctggtgctgaccgaaggtgcaaaaggtatgaaaggcgcaattcagaaagcagaagaaattgttgcttctaacccagaaaaatacctgctgttgcagcagttctccaacccggcaaaccctgaaatccacgaaaaaactactggtccggaaatctgggaagataccgatggtcaggttgacgtgttcatcgctggtgttggtaccggtggtactctgactggcgtttctcgttacatcaaaggcaccaaaggtaaaaccgacctgatcagcgtggcggtagaaccgactgacagcccggttatcgcgcaggcgctggcaggcgaagagattaaaccgggcccgcacaaaatccagggtatcggcgcgggctttatcccggcgaatctggatctgaagctggttgataaagtgattggtatcaccaacgaagaagcgatctccaccgcgcgtcgtctgatggaagaggaaggcatcctggcgggtatttcttctggcgctgctgttgcggcggcactgaaactgcaggaagacgaaagcttcactaacaaaaacatcgttgttattctgccgtcttccggtgaacgttatctgtctaccgccctgtttgctgacctgttcaccgagaaagagctgcaacagtaa

SEQ ID NO: 1881 - DNA, 258 bp, Artificial Sequence
  Optimized genes for E. coli.
atgttccagcaggaagtgaccattaccgcaccgaacggcctgcacacccgtccggcagcgcagttcgttaaagaagcgaaaggcttcacctctgaaatcaccgtaaccagcaacggtaaatccgcttctgctaaatctctgttcaaactgcagaccctgggtctgacccagggcaccgttgttaccatctccgctgaaggcgaagacgaacagaaagcggttgaacacctggttaagctgatggcggaactggaataa

SEQ ID NO: 1882 - DNA, 1728 bp, Artificial Sequence
  Optimized genes for E. coli.
atgatctccggtatcctggctagcccgggtattgcttttggtaaagcgctgctgctgaaagaagatgaaatcgtcatcgatcgtaagaaaatctctgcggatcaggttgaccaggaagtggaacgtttcctgtctggtcgtgcgaaggcttccgcgcagctggagactatcaaaaccaaagctggtgaaaccttcggcgaagaaaaagaagcaatttttgaaggtcacatcatgctgctggaagatgaagagctggaacaggagatcatcgctctgatcaaagataaacacatgaccgccgatgctgcggcgcatgaagtaatcgagggtcaggcttctgcacttgaagaactggatgatgaatacctgaaagagcgtgcagctgacgttcgtgacatcggcaaacgtctgttgcgcaacattctggggctgaagatcattgatctgagcgccattcaggacgaagtcattcttgttgctgctgatctgacgccgtctgaaaccgctcagctgaacctgaaaaaagttctgggttttatcactgatgcaggcggccgtactagccacacttccattatggcacgttctctggaactgccggcaatcgttggtactggcagcgtgaccagccaggttaaaaacgatgactatctgatccttgacgctgtaaacaaccaggtttacgttaatccaaccaacgaagttatcgacaaaatgcgtgctgttcaggaacaagttgcaagcgagaaagccgaactggcgaaattgaaagacctgccggcgatcaccctcgacggccaccaggtagaagtttgcgcaaacatcggcaccgttcgcgacgtcgaaggcgctgaacgtaacggcgcagaaggcgtgggtctgtaccgcaccgaattcctgttcatggatcgcgatgcgttgccgactgaagaagagcagttcgcggcttacaaagcagttgcggaagcgtgcggttctcaggcggtgattgtgcgtaccatggatatcggtggtgacaaagaactgccttacatgaacttcccgaaagaagaaaacccgttcctcggctggcgtgctatccgtattgcgatggaccgtcgtgaaatcctgcgtgatcaactgcgcgctattctgcgtgccagcgcattcggtaaactgcgcattatgttcccgatgattatctccgttgaagaggtacgtgcactgcgtaaagagattgaaatttataaacaagaattgcgtgacgaagggaaagcgttcgacgaatctatcgaaatcggtgtgatggttgaaactccggctgcagcgaccatcgcgcgtcacctggctaaagaggttgatttcttctctattggtaccaatgacctgacccagtacaccctggcagtagaccgtggtaacgacatgatcagccatctgtatcagccgatgtctccgtccgtactgaatctgattaaacaggtgatcgacgcgtctcacgctgaaggtaaatggaccggtatgtgtggcgagcttgctggcgacgagcgcgcaaccttgttgctgctgggcatgggcctggacgaattttctatgagcgcgatttccatcccgcgtatcaagaaaattattcgtaacaccaacttcgaagacgcaaaagtgctggcagagcaagcgctggcgcaaccgaccaccgatgagctgatgactctggttaacaaattcatcgaagaaaaaactatttgctga

SEQ ID NO: 1883 - DNA, 510 bp, Artificial Sequence
  Optimized genes for E. coli.
atgggtctgtttgataaactgaaatctctggtttctgacgacaaaaaagacactggcaccattgaaatcatcgcgccgctgtctggtgaaatcgttaacatcgaagacgttccggatgttgtgttcgcggaaaaaattgtcggcgacggcatcgctatcaaaccgaccggtaacaaaatggttgctccggttgacggtaccatcggtaaaatcttcgaaaccaaccacgcgttctctatcgaaagcgactccggtgttgaactgttcgttcacttcggtatcgacaccgtagaactgaaaggcgaaggcttcaaacgcattgctgaagaaggtcagcgtgtgaaagttggtgataccgttatcgagttcgacctgccgctgctggaagagaaagcgaaatccaccctgaccccggtggtgatctccaacatggatgagatcaaagagctgatcaagctgagcggttctgttactgttggcgaaactccggtaatccgtattaaaaagtaa

SEQ ID NO: 1884 - DNA, 879 bp, Artificial Sequence
  Optimized genes for E. coli.
atgttcaccggttctatcgttgctatcgtgaccccgatggatgaaaaaggcaacgtgtgccgtgcttccctgaaaaaactgatcgactaccacgttgccagcggtacttccgcgattgtttctgtgggcaccaccggtgaaagcgcaacgctgaaccacgacgaacacgctgatgtggtgatgatgactctggatctggctgacggtcgcattccggttattgctggtaccggcgcgaacgcgaccgcggaagctatttctctgactcagcgtttcaacgactccggtatcgttggctgcctgaccgtaactccgtactacaaccgtccgtctcaggaaggtctgtaccagcacttcaaagcgatcgctgagcacaccgacctgccgcagattctgtataacgttccgagccgtactggttgcgacctgttgccggaaaccgttggtcgtctggcgaaagtgaaaaacatcatcggtattaaagaagcaaccggtaacctgacccgtgtgaatcagatcaaagaactggtatctgacgattttgttctgctgtctggcgacgacgcttctgcactggacttcatgcagctgggcggtcacggcgtgatctccgtaaccgctaacgtagctgcacgtgatatggcgcagatgtgtaaactggcagcagaaggccacttcgctgaagcgcgtgttatcaaccagcgcctgatgccgctgcacaacaaactgttcgttgaaccgaacccgatcccggtaaaatgggcgtgcaaagagctgggtctggttgcgactgacaccctgcgtctgccgatgaccccaatcaccgattccggccgtgaaactgttcgtgcggcgctgaaacacgcgggcctgctgtaa

SEQ ID NO: 1885 - DNA, 324 bp, Artificial Sequence
  Optimized genes for E. coli.
atgtctatcaccctgtctgactccgcagcggcgcgtgttaacaccttcctggctaaccgtggtaaaggctttggcctgcgtctgggcgttcgtaccagcggctgttctggtatggcttacgttctggaatttgttgatgaaccgactccggaagatatcgtttttgaagacaaaggtgtgaaagtggttgttgacggcaaatctctgcagttcctggatggtactcagctggacttcgttaaagaaggtctgaacgaaggcttcaaattcaccaacccgaacgtaaaagacgaatgtggttgcggtgaaagcttccacgtttaa

SEQ ID NO: 1886 - DNA, 651 bp, Artificial Sequence
  Optimized genes for E. coli.
atgcagaaagaacaactgtctgcgctgatggatggcgaaacgctggattccgagctgctgaacgaactggcgcacaacccggaaatgcaaaaaacctgggaaagctatcacctgatccgtgacagcatgcgtggcgacaccccagaagttctgcacttcgacatctccagccgtgtgatggcagctatcgaagaagagccggttcgtcagccggcaaccctgattccggaagcacaaccggcgccgcaccagtggcagaaaatgccgttctggcagaaagtgcgtccgtgggcggcacagctgactcagatgggcgttgctgcttgcgtgagcctggctgttatcgttggtgtgcagcactacaacggccagtctgaaacctctcagcagcctgaaactccggtattcaacaccctgccgatgatgggtaaagcttctccggtttctctgggtgttccgagcgaagcgaccgctaacaacggtcagcaacagcaggttcaggaacagcgtcgccgtatcaacgcgatgctgcaggattacgaactgcaacgtcgtctgcacagcgagcagttgcagttcgaacaggcgcagacccagcaggcagcggtacaggtgccgggtatccagactctgggcacccagagccagtaa

SEQ ID NO: 1887 - DNA, 342 bp, Artificial Sequence
  Optimized genes for E. coli.
atgaccatgaacatcaccagcaaacagatggaaatcactccggcaatccgtcagcacgttgctgaccgtctggcgaaactggaaaaatggcagactcacctgattaacccgcacatcatcctgtctaaagaaccgcagggcttcgttgcagacgcaaccatcaacaccccgaacggcgttctggttgcttctggtaaacacgaagatatgtacaccgctatcaacgaactgatcaacaagctggagcgccagctgaacaaactgcaacacaaaggcgaagcgcgtcgtgctgcgacctctgttaaagacgctaacttcgtagaagaagttgaagaagagtaa

SEQ ID NO: 1888 - DNA, 348 bp, Artificial Sequence
  Optimized genes for E. coli.
atgagcaacatcatcaagcagctggaacaggaacagatgaaacaggacgttccgtccttccgtccgggcgacaccgttgaagttaaagtctgggtggtagaaggcagcaaaaaacgtctgcaggcgtttgaaggcgtggttatcgctatccgtaaccgtggtctgcacagcgcgttcaccgtacgcaaaatctccaacggtgaaggtgttgagcgtgtgttccagactcactctccggttgttgactccatctctgtgaaacgccgtggcgctgttcgtaaagcgaaactgtactacctgcgtgaacgtaccggtaaagcagcgcgtatcaaagagcgcctgaactaa

SEQ ID NO: 1889 - DNA, 768 bp, Artificial Sequence
  Optimized genes for E. coli.
atgtggatcggcatcatctccctgttcccggaaatgttccgtgctatcaccgactacggtgttaccggtcgcgctgttaaaaacggtctgctttccatccagtcctggagcccgcgtgacttcactcacgaccgtcaccgtaccgttgatgatcgcccgtacggcggtggcccgggtatgctgatgatggttcagccgctgcgcgatgcgatccacgcggctaaagcggcagctggcgaaggcgcgaaagttatctacctgtctccgcagggccgtaaactggatcaggcgggcgtttctgaactggcaaccaaccagaaactgattctggtttgcggtcgttacgaaggtatcgacgaacgtgtgattcagaccgaaatcgatgaagagtggtctatcggtgattacgttctttctggtggtgaactgccggcaatgaccctgatcgacagcgtcagccgtttcatcccgggcgtactgggtcacgaagcttctgcaactgaagattccttcgcggaaggcctgctggactgcccgcactacacccgtccggaagtgctggaaggtatggaagttccgccggttctgctgagcggtaaccacgcagaaattcgtcgctggcgtctgaaacagtctctgggccgcacctggctgcgtcgtcctgagctgctcgaaaacctggcgctgaccgaagaacaggcacgcctgctggctgaattcaaaaccgagcacgctcagcagcagcacaaacacgatggcatggcgtaa

SEQ ID NO: 1890 - DNA, 549 bp, Artificial Sequence
  Optimized genes for E. coli.
atgagcaaacagttgaccgctcaggcgccggtagacccgatcgttctgggcaaaatgggcagctcttacggtattcgtggctggctgcgtgtgttctcttctactgaagatgctgaatctatcttcgactaccagccgtggttcatccagaaagcaggtcagtggcagcaggttcagctggaatcctggaaacaccacaaccaggatatgatcatcaaactgaaaggcgttgatgaccgtgacgctgctaacctgctgaccaactgcgaaatcgtggttgactccagccagctgccgcagcttgaagaaggtgattactactggaaagatctgatgggttgccaggttgttaccaccgaaggctacgacctgggtaaagtggtggacatgatggaaaccggttctaacgatgtgctggttattaaagcgaacctgaaagacgcattcggtatcaaagaacgtctggtaccgttcctggatggccaggtgatcaagaaagttgatctgactacccgttccatcgaagttgactgggatccgggtttctaa

SEQ ID NO: 1891 - DNA, 249 bp, Artificial Sequence
  Optimized genes for E. coli.
atggttaccattcgcctggcacgtcacggtgcgaaaaaacgtccgttctaccaggttgttgtagctgacagccgcaacgcgcgtaacggtcgtttcatcgaacgtgttggcttcttcaacccgatcgcttctgaaaaagaagaaggtactcgtctggatctggaccgtatcgcgcactgggttggtcagggcgcaaccatctctgaccgcgttgctgcgctgatcaaagaggttaacaaagcggcgtaa

SEQ ID NO: 1892 - DNA, 186 bp, Artificial Sequence
  Optimized genes for E. coli.
atgctgatcctgacccgtcgtgttggtgaaaccctgatgatcggcgacgaagtgaccgtaaccgttctgggcgtgaaaggcaaccaggttcgtatcggtgttaacgcaccgaaagaagtttctgttcaccgtgaagaaatctaccagcgtattcaggctgaaaaatctcagcagtcttcttactaa

SEQ ID NO: 1893 - DNA, 2631 bp, Artificial Sequence
  Optimized genes for E. coli.
atgagcaaatccactgctgaaatccgtcaggcatttctggacttcttccactctaaaggtcaccaggttgttgccagctcttccctggttccgcacaatgatccgactctgttattcaccaacgctgggatgaaccagtttaaagatgtgttcctgggcctcgataaacgcaactacagccgcgctaccaccagccagcgctgcgtgcgtgctggcgggaaacataacgatctggaaaacgttggctacaccgctcgtcaccacactttctttgaaatgctgggcaacttctccttcggtgactacttcaaacacgacgctattcagttcgcctgggaactgctgacctctgagaaatggttcgcactgccaaaagagcgtctgtgggtaaccgtttatgaatctgatgacgaagcttacgaaatttgggaaaaagaagttggtatcccgcgtgaacgcattattcgtattggcgataacaagggtgctccgtacgcttctgacaacttctggcagatgggcgacaccggtccttgcggtccgtgcaccgaaatcttctatgaccacggcgatcacatctggggcggcccgccgggttcccctgaagaagatggtgatcgttacatcgagatctggaacatcgttttcatgcagttcaaccgtcaggctgacggtacgatggaaccgctgccgaaaccaagcgtggataccggtatgggtctggagcgtatcgccgcagtgctgcagcacgttaacagcaactatgatatcgacctgttccgtacccttatccaggccgttgctaaagttaccggcgcgaccgatctttccaacaaatctttgcgtgttatcgctgatcacattcgttcctgcgcgttcctgattgctgacggcgtaatgccgtctaacgaaaatcgtggttatgtgctgcgtcgcatcatccgtcgggcagttcgccacggtaacatgctgggtgccaaagaaaccttcttctacaaactggttggtccgctgattgatgtgatgggttctgctggtgaagacctgaaacgtcagcaggcgcaggtagagcaggtcctcaaaactgaagaggaacaatttgcacgcaccctggaacgtggcctggctttgctggacgaagagctggctaaactttctggcgacacgctggatggcgaaacggcattccgtctgtacgatacctatggtttcccggtagatctgactgcggatgtttgccgtgagcgtaacatcaaagttgatgaagccggcttcgaagcagctatggaagaacagcgtcgccgtgcgcgcgaagcttccggttttggcgccgattacaacgcaatgatccgcgttgattccgcaagcgagttcaaaggttacgaccatcttgagctgaacggtaaagtgaccgcattgttcgttgacggcaaagctgttgacgcaatcaacgccggtcaggaagcggtggtggtactggatcagactccgttctacgcagaatccggcggccaggttggcgacaagggggaactgaaaggcgctaactttagcttcgctgttgaagacactcagaaatacggtcaggctatcggtcatatcggtaaactggcagcgggcagcctgaaggtgggcgatgcggttcaggcagacgtcgatgaagcgcgtcgtgcacgtattcgcctgaatcacagcgcgacacatctgatgcacgcggcgctgcgccaggttctgggtacccatgtgtctcagaagggctctctggtaaacgacaaagtcctgcgtttcgatttctctcacaacgaggcgatgaaaccggaagaaatccgcgcagtagaagatctcgtcaacacccagatccgtcgtaacctcccgattgaaactaacattatggatctggaagcagcaaaagcgaaaggcgcaatggcgctgtttggtgaaaaatatgatgagcgcgtacgtgtgctctctatgggcgatttttctaccgagctgtgcggcggtactcacgctagccgtactggtgatattggtctgttccgcattatctctgaaagcggcaccgcggcaggcgttcgtcgtatcgaagcggtaactggcgaaggtgcgattgcaactgttcacgccgactccgaccgtctctccgaagtggctcacctgctgaaaggtgacagcaacaacctggcggacaaagttcgttctgttctggaacgtacccgtcaactggagaaagaattgcagcagttgaaagagcaagcggctgcacaggagtctgcaaacctgagctccaaagccattgacgtgaacggcgtgaagctgctggtcagcgaactgtctggtgttgagccgaaaatgttgcgcaccatggtggacgacctgaaaaaccagctggggtccaccatcattgttctggcaaccgtggttgaaggcaaagtgtcgctgatcgcaggtgtttctaaagacgttactgatcgcgtgaaagcaggcgaactgatcggcatggttgcgcaacaggtgggtggtaaaggtggcggtcgtccggatatggctcaggcgggtggtaccgacgccgctgctctgccggcagccctggcgtccgttaaaggctgggtgtccgcgaaactgcagtaa

SEQ ID NO: 1894 - DNA, 993 bp, Artificial Sequence
  Optimized genes for E. coli.
atgagccagaacaccctgaaagttcacgacctgaacgaagatgctgaatttgatgaaaacggcgttgaagtgttcgacgaaaaagcactggtagaacaggaaccaagcgataacgatctggcagaagaggaactgctgtctcagggtgcgacccagcgtgtgctggacgcaactcagctgtacctgggcgaaatcggctacagcccgctgctgactgccgaagaagaggtttacttcgctcgccgtgcgctgcgcggcgacgtagcttctcgtcgtcgtatgatcgagtctaacctgcgcctggttgttaaaatcgcgcgtcgttacggcaaccgtggtctggctctgctcgacctgatcgaagaaggtaacctcggcctgattcgcgctgttgagaaattcgatccggagcgcggtttccgtttctctacctacgcaacctggtggattcgtcagaccattgaacgtgctatcatgaaccagactcgtaccatccgtctgccgatccacatcgttaaagagctgaacgtttatctgcgtactgcacgtgaactctctcacaaactggatcacgaaccgtctgcggaagaaatcgctgaacaactggacaaaccggttgatgatgtttctcgcatgctgcgtctgaacgagcgtatcaccagcgttgacaccccgctgggcggcgattctgaaaaagcgctgctggatatcctggctgacgagaaagaaaacggtccggaagataccactcaggacgacgatatgaaacaatctatcgtgaaatggctgtttgaactgaatgcgaaacagcgcgaagttctggcgcgccgcttcggtttgctgggttacgaagctgcaacgctggaagacgttggtcgtgagatcggtctgacccgtgaacgcgttcgccagatccaggttgaaggcctgcgtcgcttgcgtgaaattctgcaaacccagggcctcaacatcgaagcgctgttccgcgagtaa

SEQ ID NO: 1895 - DNA, 1140 bp, Artificial Sequence
  Optimized genes for E. coli.
atgagcgcgggcagcccgaaattcaccgttcgtcgtatcgcggcgctgtctctggttagcctgtggctggcaggctgttctgacacctccaacccaccggctccggtatcttctgttaacggcaacgcaccggcgaacaccaacagcggtatgctgattaccccgccgccaaaaatgggtactacttctactgctcagcagccgcaaattcagccagtacagcagccgcagatccaggctacccagcagccgcagattcagccggtacaaccggttgcccagcaaccggttcagatggaaaacggtcgtattgtttacaaccgtcagtacggcaacattccgaagggctcttactctggttctacttacaccgtgaaaaaaggcgacactctgttctacatcgcctggatcactggtaatgacttccgtgacctggcgcagcgtaacaacatccaggcgccgtacgctctgaacgttggtcagaccctgcaggttggcaacgcttccggtaccccaatcaccggtggcaatgctatcactcaggcagacgctgctgaacagggcgtggtgattaaaccggcacagaactccaccgtagctgttgcttctcagcctaccatcacctacagcgaaagctctggcgagcagtctgctaacaaaatgctgccgaacaacaagccgactgcgaccactgttaccgcaccagtgaccgttccgaccgccagcaccaccgagccgacggtttcttccacctctaccagcactccgatctccacctggcgttggccgaccgaaggcaaagttatcgaaaccttcggtgcgtctgaaggtggtaacaaaggtatcgacatcgctggttccaaaggccaagcgatcattgcaaccgctgacggccgtgttgtttatgcgggtaacgccctgcgtggttacggtaacctgatcatcatcaaacacaacgacgactatctgagcgcttacgcacataacgataccatgctggtacgtgaacaacaggaagttaaagctggccagaaaatcgcgacgatgggctccactggcacttccagcacccgtctgcacttcgaaatccgttacaaaggtaaatctgtaaacccgctgcgctacctgccacaacgttaa

SEQ ID NO: 1896 - DNA, 1299 bp, Artificial Sequence
  Optimized genes for E. coli.
atgagcaaaattgttaaaatcattggccgtgaaattatcgattctcgtggtaacccgaccgttgaagccgaagttcatctggaaggcggctttgttgggatggctgctgcgccgtctggcgcttccaccggcagccgtgaggcgcttgaactgcgtgatggcgataaatcccgtttcctcggtaaaggtgtgaccaaagctgttgctgccgttaacggtccgattgcgcaggcgctgatcggcaaagacgcgaaagatcaggcaggcatcgacaaaatcatgattgatctggacggcaccgaaaacaaatctaaattcggtgcgaacgcgattctggcagtatctctggcaaacgccaaagcggccgcagcagcgaagggcatgccgctgtacgaacacatcgcggaactgaacggcactccgggtaaatacagcatgccagttccgatgatgaacatcatcaacggcggtgagcacgctgacaacaacgttgacatccaggaatttatgatccagccggttggtgctaaaactgtaaaagaagctatccgtatgggttctgaagtgttccaccacctggctaaagttctgaaagcgaaaggtatgaataccgcggttggcgacgaaggtggttacgctccgaacctgggctccaacgcagaagcactggccgtgatcgctgaagcggtgaaagccgctggttatgagctgggtaaagatatcaccctggcgatggactgcgcagcttctgagttctacaaagacggtaagtacgttctggcgggcgaaggcaacaaggcattcacttccgaagaattcacccacttcctggaagaattgactaaacagtatccgatcgtttctatcgaagacggtctggatgaaagcgactgggatggttttgcttaccagaccaaagtgctgggtgataagattcagctggttggtgacgacctgttcgttaccaacaccaagatcctgaaagagggtatcgaaaaaggcattgctaacagcattcttatcaagttcaaccagatcggtagcctgactgaaacccttgcggcgatcaaaatggcgaaagacgctggctacaccgcagttatctctcaccgttctggtgaaacggaagatgcgaccatcgccgatctggctgtgggtactgctgcaggtcagattaaaaccggttccatgtctcgctctgaccgtgttgcaaaatataaccaactgattcgtattgaagaggctctgggcgagaaagcaccgtacaacggtcgtaaagaaatcaaaggccaggcttaa

SEQ ID NO: 1897 - DNA, 1638 bp, Artificial Sequence
  Optimized genes for E. coli.
atgaccactaactacatcttcgtgaccggcggcgtggtgtcttctctgggcaaaggcatcgctgctgcaagcctggcagcaatcctggaagcacgcggtctgaacgtaaccattatgaaactcgacccgtacatcaacgttgatccgggcacgatgagcccgattcagcacggcgaagtcttcgttactgaagatggcgctgaaaccgatctggatctcggtcactacgaacgcttcatccgtactaaaatgtcccgtcgtaacaacttcaccaccggtcgtatctattctgatgtgctgcgtaaagagcgccgtggtgattacctgggcgcgaccgttcaggttatcccgcacatcaccaacgccattaaagaacgcgttctggaaggcggcgaaggtcatgacgtagttttagtagagatcggtggtactgttggcgacatcgagtctttgccgttcctggaggcgattcgtcagatggctgttgaaattggccgcgaacacactctgttcatgcacctgaccctggtgccttacatggcggccagcggtgaagttaaaaccaaaccgactcagcacagcgtgaaagaattgctgtctattggtatccagccggacattctgatctgccgttccgaccgtgcggtaccggcaaacgaacgtgctaaaattgctctgttctgtaacgtgccggagaaagcggtgatctccctgaaagacgttgactctatctacaaaatcccgggtctgctgaagtctcagggcctggatgactatatttgtaaacgtttctctctcaactgcccggaagccaacctgtccgaatgggaacaggtgattttcgaagaagctaacccggtatctgaagtgactatcggcatggttggtaaatatatcgaactgccggatgcctataaatccgttattgaagcgctgaaacacggtggtctgaaaaaccgtgtttctgttaacatcaaactgattgattcccaggacgtggaaactcgtggcgttgaaatccttaagggcctggacgctatcctcgtaccaggcggtttcggttaccgcggcgtagaagggatgatcactaccgcacgttttgcgcgtgaaaacaacattccgtatctgggtatttgcctgggtatgcaggttgcactgatcgactacgctcgtcacgttgcgaacatggaaaatgctaacagcaccgaatttgttcctgactgcaaatacccggttgttgctttgattaccgagtggcgtgatgaaaacggtaacgtcgaagtacgtagcgaaaaatctgacctgggtggcaccatgcgtctgggcgcacagcagtgccagctggtagacgactccctggttcgtcaactgtacaacgcgccgaccatcgttgagcgtcatcgccaccgttatgaagtgaacaatatgctgctgaaacagatcgaagacgcgggtttgcgtgtggcaggccgttctggcgatgatcagctggttgaaatcatcgaagttccgaaccacccgtggttcgttgcctgtcagttccaccctgaattcacttccactccgcgtgacggccatccgctgtttgctggcttcgtaaaagcagcttctgagttccagaaacgccaggcgaaataa

SEQ ID NO: 1898 - DNA, 1098 bp, Artificial Sequence
  Optimized genes for E. coli.
atgtttgaaatcaatccggttaacaaccgtattcaggatctgaccgaacgttccgatgtgctgcgcggttatctggattacgatgcgaagaaagagcgtcttgaagaagtgaacgctgaacttgagcagccggatgtctggaacgaaccggagcgtgcacaggcactgggtaaagaacgtagctctctggaagcagttgttgacaccctggatcagatgaagcagggcctggaagacgtttctggtctgctggaactggcagtagaagcggatgatgaagaaaccttcaacgaagccgttgctgagctggacgcgctggaagaaaaactggctcagctggaattccgtcgtatgttcagcggtgaatacgacagcgctgactgctacctggatatccaggctggttccggtggcaccgaggcgcaggactgggcatctatgctggagcgcatgtacctgcgctgggcggaatcccgtggtttcaaaaccgaaatcatcgaagagtctgaaggcgaagtcgctggcatcaaatctgttaccatcaaaatctctggcgactacgcttacggctggctgcgtacggaaactggtgttcaccgtctggttcgtaaaagcccgttcgactccggcggtcgtcgtcacacctccttctcttctgcattcgtttatccggaagttgatgacgacatcgacattgagatcaacccggcagacctgcgtatcgatgtttaccgtaccagcggcgcaggtggtcagcacgttaatcgtactgaaagcgcggtacgtatcactcacatcccgaccggtatcgttactcagtgccagaacgatcgctctcagcataaaaacaaagatcaggcgatgaaacaaatgaaagcaaagctgtacgaactggaaatgcagaaaaaaaatgcagagaaacaggcaatggaagataacaaatccgacatcggttggggcagccagatccgttcttacgttcttgacgatagccgcattaaagacttgcgcactggcgttgaaacccgtaacacccaggcggttctggacggttctctcgaccagttcatcgaagcttccctgaaagcgggtctgtaa

SEQ ID NO: 1899 - DNA, 390 bp, Artificial Sequence
  Optimized genes for E. coli.
atgagcaacgttccggcagagctgaaatacagcaaagagcatgaatggctgcgtaaagaagctgacggtacttacaccgttggtatcaccgaacacgcgcaggaattgctgggcgatatggttttcgttgacctgccggaagttggcgcaaccgtgtctgcaggcgacgactgcgcagttgctgaatctgttaaagcagcttctgacatctacgcaccggtttctggtgaaatcgttgcggtaaacgatgcactgtccgacagcccggaactggttaactctgaaccgtacgctggcggctggatcttcaaaatcaaagcgagcgacgaaagcgaactggagtctctgctggatgcgaccgcttacgaagcgctgctggaagatgagtaa

SEQ ID NO: 1900 - DNA, 1233 bp, Artificial Sequence
  Optimized genes for E. coli.
atggcaaaagtttctctcgaaaaagacaaaattaaattcctgctggttgaaggcgtacatcagaaagcactggaaagcctgcgtgctgcgggctacaccaacatcgaattccacaaaggcgcgctggatgatgagcagctgaaagagtctatccgtgatgcgcacttcatcggcctgcgtagccgtactcacctcaccgaagacgttatcaacgctgctgaaaaactggtagcaatcggttgcttctgtatcggcaccaaccaggtggatctggacgcagcagcgaaacgtggtatcccggttttcaacgcgccgttctctaacacccgttctgttgccgagctggtgattggcgaactgttactgttgctgcgcggcgttccggaagccaacgcgaaagctcaccgtggcgtctggaacaaactggctgcaggcagctttgaagcgcgtggtaaaaaactggggatcatcggttacggtcacatcggtactcagctgggcatcctggcggaatctctgggtatgtacgtttacttctacgacatcgagaacaagctcccgctgggtaacgcaacccaggttcagcacctgagcgacctgctgaatatgtctgacgtagtttcgctgcacgttcctgaaaacccgtctaccaaaaacatgatgggcgctaaagaaatctccctgatgaaaccgggttcactgcttatcaacgccagccgcggtaccgttgttgatatccctgcgctgtgcgacgcgttagcaagcaaacatctggcaggtgcagctatcgacgtgttcccgactgaaccggcaactaacagcgatccgtttaccagcccgctgtgtgaatttgacaacgttctgctgactccgcacattggtggttccacccaagaagcacaggaaaatattggtctggaagttgctggcaagctgatcaaatacagcgataacggttctactctgtctgcagtaaacttcccggaagtgtctctgccgttacacggcggtcgtcgtctgatgcacatccacgaaaaccgtccgggcgtgctgaccgctctgaacaaaatcttcgctgaacagggtgttaacatcgccgctcagtacctgcagacctctgcgcagatgggttatgtggtgatcgatattgaagctgacgaagatgtggcagagaaagccttgcaggcgatgaaagcgattccgggaaccatccgcgctcgcctgctgtactaa

SEQ ID NO: 1901 - DNA, 1164 bp, Artificial Sequence
  Optimized genes for E. coli.
atgagcgttatcaaaatgaccgatctcgacctggctggcaaacgtgttttcatccgtgccgatctgaacgtaccggttaaagacggcaaagttaccagcgacgcacgtattcgtgcatctctgccgaccatcgaactggcgctgaaacagggcgcaaaagtgatggtgacctctcacctgggccgcccgactgaaggcgaatacaacgaagagttcagcctgttgcctgttgtaaactacctgaaagataaactgtctaacccggtacgtctggtaaaagattaccttgacggtgttgacgtagcagaaggtgaattggttgttctggaaaacgttcgtttcaacaaaggcgaaaaaaaagacgacgaaacgctgagcaagaaatacgcagcactgtgcgacgtgttcgttatggatgcattcggcaccgctcaccgtgcgcaggcttctactcacggcatcggtaaattcgctgatgttgcctgtgcgggcccgctgctggcagctgagctggacgcgctgggtaaagctctgaaagaaccggcgcgtccgatggttgcgatcgttggcggttctaaagtctctaccaaactgactgtgctggattcccttagcaaaatcgcagatcagctgatcgtgggcggcggtatcgctaacaccttcattgctgcacagggtcacgacgttggtaaatccctgtacgaagcggatctggttgatgaagccaaacgcctgctgaccacctgtaacatcccggttccgtctgacgttcgcgttgctaccgaattctctgaaaccgcaccggcaaccttgaaatctgttaacgatgtgaaagcggacgagcagatcctggatatcggcgatgcgtctgctcaggaactggctgaaatcctcaaaaacgcgaaaaccattctgtggaacggtccggtgggtgtgtttgaattcccgaacttccgtaaaggtactgagatcgtcgcgaacgctatcgctgacagcgaagcattttctatcgccggtggcggcgacaccctggccgcaatcgacctgttcggtattgcagacaaaatttcttacatctccaccggtggtggtgcgttcctggagtttgttgaagggaaagtactgccagctgttgcaatgctggaagaacgtgctaaaaagtaa

SEQ ID NO: 1902 - DNA, 216 bp, Artificial Sequence
  Optimized genes for E. coli.
atgccggttatcaaagtgcgtgagaacgaaccgttcgacgttgcgctgcgtcgtttcaaacgctcctgcgagaaagcgggcgttctggctgaagttcgtcgccgcgaattctacgaaaaaccgaccaccgaacgtaagcgtgctaaagcttctgcagtgaaacgtcacgcgaaaaaactggcacgtgaaaacgcgcgtcgtacccgtctgtactaa

SEQ ID NO: 1903 - DNA, 369 bp, Artificial Sequence
  Optimized genes for E. coli.
atgaaataccgtattgcactggcggtttctctgttcgctctgagcgcgggttcttacgcaaccaccctgtgccaggagaaagagcagaacatcctgaaagaaatctcctacgcggaaaaacaccagaaccagaaccgtatcgacggtctgaacaaagcgctgtctgaagttcgtgcgaactgctctgacagccagctgcgtgctgaccatcagaagaaaattgccaaacagaaagacgaagtggcagagcgtcagcaggacctggctgaagcgaaacaaaaaggcgacgcagacaaaatcgctaaacgtgaacgtaaactggcagaagctcaggaagaactgaaaaaactggaagcacgtgattactaa

SEQ ID NO: 1904 - DNA, 306 bp, Artificial Sequence
  Optimized genes for E. coli.
atgagcaaagagcacaccaccgaacacctgcgtgcggaactgaaatctctgtctgacaccctggaagaagttctgagctcttctggtgaaaaatccaaagaagagctgtcgaaaatccgttctaaagctgaacaggcgctgaagcagagccgttaccgtctgggcgaaaccggcgacgctatcgctaaacagacccgtgttgctgctgcgcgtgctgacgaatacgttcgtgaaaacccgtggaccggtgttggtatcggcgcagcgatcggtgtagtactgggtgtgctgctgtcccgtcgttaa

SEQ ID NO: 1905 - DNA, 1488 bp, Artificial Sequence
  Optimized genes for E. coli.
atgaacaaagaaatcctggcggtggtggaagcggtttctaacgaaaaagcattgccgcgcgagaaaatcttcgaagcgctggaaagcgcgttagccaccgcaactaaaaagaaatatgaacaagaaatcgacgttcgcgttcagattgaccgtaaatctggtgatttcgacacctttcgtcgctggctggttgttgacgaagtaacccagccgaccaaagaaatcactctggaagcggcgcgttacgaagacgaatctctgaatctgggcgattacgttgaagatcagatcgaatccgtgaccttcgatcgcattaccactcagaccgccaaacaggttatcgtacagaaagtgcgtgaagctgagcgtgcgatggttgtggaccagttccgcgaacacgaaggcgagatcatcaccggtgtggttaaaaaagttaaccgtgacaacattagcctggatctcggcaacaacgccgaagccgttattctgcgtgaggatatgctgccgcgtgaaaacttccgtccgggcgaccgcgtacgtggcgtactgtacagcgttcgtcctgaagcccgtggcgctcagttgttcgttacccgttctaaaccggaaatgttgatcgaactgttccgtatcgaagtgccggaaattggtgaagaagttatcgagatcaaagccgctgctcgcgacccgggttcccgtgctaaaattgctgtgaaaaccaacgacaaacgtattgatccggttggtgcttgcgtgggtatgcgtggtgcacgtgtgcaggctgtatccaccgaactgggtggcgaacgtatcgacatcgtgctgtgggatgataacccggcacagtttgtgatcaacgcaatggcgccggctgacgtagcttctatcgttgtcgacgaagataaacacaccatggatatcgctgttgaagcaggtaacctggcacaagctatcggtcgcaacggtcagaacgttcgtctggccagccagctgtctggctgggaactgaacgtgatgaccgtagacgacctgcaagcgaaacatcaggcagaagctcacgctgcaatcgacactttcaccaaatacctggacattgatgaagacttcgcgaccgttctggtagaagaaggtttctctaccctggaggagctggcttacgttccgatgaaagagctgctggaaattgaaggcctggatgagccgactgttgaggcactgcgcgaacgcgcaaaaaacgctctggcaaccatcgcccaggcgcaggaagagtccctgggcgacaataaaccagcagacgatttgctgaacctggaaggtgttgatcgtgatctggcgttcaaactggcagcacgcggcgtttgcactctcgaagatctggctgaacagggtatcgatgacctggctgatattgagggtctgaccgatgaaaaagcgggtgcgctgatcatggcagcgcgtaacatctgctggttcggtgacgaggcgtaa

SEQ ID NO: 1906 - DNA, 312 bp, Artificial Sequence
  Optimized genes for E. coli.
atgtacgcagtgttccagtctggtggtaaacagcaccgcgtttctgaaggtcagactgttcgtctggaaaaactggatatcgcgaccggcgaaaccgttgaatttgctgaagttctgatgatcgctaacggtgaagaagtaaaaattggcgttccgttcgttgacggcggtgttatcaaagcggaagtggttgctcacggtcgtggtgagaaagtgaaaatcgttaaattccgtcgtcgcaaacactaccgtaagcagcagggtcaccgtcagtggttcaccgacgttaagatcaccggtatctccgcgtaa

SEQ ID NO: 1907 - DNA, 4461 bp, Artificial Sequence
  Optimized genes for E. coli.
atgctgtacgacaaatcgctggaacgtgacaactgtggttttggccttatcgctcacattgaaggtgagccgtctcataaagttgttcgcactgcaatccacgcgctggctcgtatgcagcatcgcggtgctattcttgccgacggcaaaaccggtgacggttgcggtctgctgctgcagaagccggaccgtttcttccgtatcgtcgcgcaggaacgtggctggcgtctggcaaaaaactatgctgtagggatgttgttcctgaacaaagatccggaacttgctgctgccgcacgccgcattgttgaagaagagttgcagcgtgagacgctgtccatcgtgggttggcgtgacgttccgactaacgaaggcgtactgggcgagatcgctctgagcagcctgccgcgtatcgagcagattttcgttaatgcgccggctggctggcgcccgcgcgacatggaacgacgcctgtttattgcccgtcgtcgcatcgaaaagcgcctggaagccgataaagacttctatgtttgttctctcagcaatctggtcaacatctacaaaggcctgtgtatgccgaccgatcttcctcgcttctacctggacctcgcggacctgcgtctggaatccgctatctgcctgttccaccagcgtttctccaccaataccgttccgcgctggccgctggcacaaccgttccgttatctggcccacaacggcgaaattaacacgatcactggtaaccgtcagtgggcgcgtgcgcgtacctacaaattccagaccccactgatcccggatctgcacgatgctgcaccgtttgttaacgaaaccggttctgactccagctctatggataacatgctggagctgcttcttgcaggcggtatggacatcattcgcgcgatgcgtctgctggtaccgccagcctggcagaacaatccggatatggatccagagctgcgcgcattctttgacttcaacagcatgcacatggaaccgtgggatggtccggcaggtattgtaatgagcgacggccgttttgccgcttgcaacctggatcgtaatggcctgcgtccggcgcgctatgtgattaccaaagacaaactcatcacctgtgcgagcgaagtaggtatctgggactatcagcctgacgaagtggttgaaaaaggtcgcgttggtccgggggaactgatggtgatcgacactcgttccggtcgtatcctgcactctgctgaaactgatgacgatctgaaatcccgccacccgtataaagagtggatggagaaaaatgtgcgtcgtctggtgccgtttgaagacctgccggacgaggaagtcggcagccgtgaattagatgatgatactctggcatcttaccagaaacagttcaattacagtgctgaagaactcgactctgttatccgtgtgctgggtgaaaatggtcaggaagcagttggttccatgggtgatgacaccccgttcgccgttctctccagtcagccgcgtattatttatgactacttccgccagcagtttgcacaggtaaccaacccaccgatcgatccgctgcgtgaagcacacgttatgtctctggctacctctatcggtcgtgaaatgaacgtgttctgtgaagcggaaggccaggcgcaccgcttaagctttaagtccccgattctgctctactccgactttaaacaactgaccaccatgaaagaagagcactaccgtgctgataccctggatattacctttgacgtaaccaaaacgactcttgaagccactgttaaagaactgtgcgataaagccgaaaaaatggttcgttctggtaccgttttactggttctttcagaccgtaacattgcaaaggatcgcctaccagttcctgctccgatggcggtgggcgccatccagactcgcctggttgaccagtctctgcgctgcgacgcaaacatcatcgttgagaccgcttccgcacgtgatccgcaccacttcgctgttctgttgggcttcggtgcaaccgcaatctatccgtacctggcatacgaaacgctggggcgtctggttgacactcacgctatcgcgaaagattaccgtaccgtgatgctcaactaccgcaacggtatcaacaaaggcctctataaaattatgtccaaaatgggcatttctaccattgctagctatcgttgctccaagctgttcgaagcggttggtctgcatgacgacgttgtgggtttgtgtttccaaggcgctgtcagccgtattggtggtgccagcttcgaagatttccagcaggatctgctgaacctgtctaaacgtgcatggctggcgcgtaaaccgatctctcagggcggtctgttaaaatacgttcacggcggggagtaccatgcctacaacccggatgtggtgcgcaccctccagcaagcggtacaatccggcgaatactctgattatcaggagtatgccaaactggtgaatgaacgccctgcgactaccttgcgcgatctgctggcgattactccgggtgaaaacgcagtcaatattgctgacgtcgaaccagcttctgaactgttcaagcgtttcgacacggcggcaatgagcattggcgcactgtcgccggaagctcatgaagcgctggctgaagctatgaactccattggtggtaattccaactctggcgaaggcggcgaagacccggcacgttacggcacgaataaagtctcccgtatcaagcaggttgcgtcaggccgcttcggtgtgacgccggcctatctggtaaacgccgatgttattcagatcaaagtggcgcagggtgctaaaccgggtgaaggtggtcagctgcctggcgacaaggtcaccccttacattgcgaaactgcgctacagcgtgccaggcgtgaccctgattagcccgccgccacatcacgacatttacagcatcgaagatctggctcagctgatttttgatttgaaacaggttaacccgaaagcaatgatctccgtgaaactggtttccgaaccgggcgttggtactatcgcaacgggtgttgctaaggcttacgcagacctgatcaccatcgccggttacgatggcggtacgggcgcgtctccgctgtcttccgttaagtacgctggctgcccgtgggaactgggtctggtggaaactcagcaggctctggtcgccaacggtctgcgtcacaaaatccgtctgcaggtggatggcggcctgaaaactggtgttgatatcatcaaagcggcgatcctgggcgctgagtcttttggtttcggcaccggcccgatggtcgctctcggctgcaaatatctccgcatttgccacctgaacaactgcgcaactggcgttgccacccaggacgacaaattgcgtaagaaccactatcacgggctgccattcaaagtaaccaactactttgaattcatcgctcgcgaaacccgcgaactgatggctcagcttggcgttacccgtcttgtagacctgatcggtcgtactgacctgctgaaagagctggacggtttcaccgcgaagcaacagaaactggcgttgagcaagctgctggaaaccgccgagccgcatccgggtaaagcattgtattgtaccgaaaacaacccgccgttcgacaacggcctgctgaatgctcaattgctgcaacaagctaaacctttcgtagatgagcgtcagagcaaaaccttctggttcgatatccgcaacaccgaccgcagcgttggcgcaagcctttccggctacatcgcgcaaacccacggtgatcagggcctggcagctgacccgattaaagcttatttcaacggcactgcggggcaaagttttggtgtctggaacgctggtggtgtagagctgtacctcaccggggatgcgaacgattacgtcggtaaaggtatggcaggtggcttgatcgccattcgtccgccggttggctccgcgttccgttctcacgaggcttctattatcggcaacacctgcctgtacggtgcgaccggtggccgtctgtatgcagcgggtcgggcaggcgagcgctttggcgtacgtaacagcggtgcgatcaccgtagtagaagggatcggcgataacggttgcgaatacatgactggcggcatcgtttgcattctgggcaagactggcgtgaacttcggcgcgggcatgaccggcggctttgcttacgtgctggatgaaagcggcgattttcgcaaacgcgtaaatccagaactggttgaagttctgagcgtcgacgcgctggcgattcacgaagaacatctgcgtggtctgatcactgaacacgtacagcacaccggtagccagcgcggcgaagaaatcctcgctaactggtctactttcgcgactaaatttgcgctggtaaaaccaaaatcttctgacgtgaaagcgcttctgggtcaccgtagccgctctgcagcagaactgcgtgttcaggcacagtaa

SEQ ID NO: 1908 - DNA, 1419 bp, Artificial Sequence
  Optimized genes for E. coli.
atgtctcagaacgtttatcagttcatcgacctgcagcgtgttgatccgccgaaaaaaccgctgaaaattcgtaaaatcgaattcgttgaaatctacgaaccattcagcgaaggtcaggcgaaagcgcaggctgaccgctgcctgtcctgcggtaatccgtactgcgaatggaaatgtccggttcacaactacatcccgaactggctgaagctggctaacgaaggccgtatcttcgaagcggctgaactgtctcaccagaccaacacgctgcctgaagtctgtggtcgcgtgtgcccgcaggatcgtctgtgtgaaggcagctgcaccctgaacgatgagtttggcgcggtgaccatcggtaacatcgaacgttatatcaacgacaaagcttttgaaatgggctggcgtccggatatgagcggtgttaaacaaaccggcaagaaagtggcaatcatcggcgctggtccggcaggcctggcgtgcgcagacgtactgactcgtaacggcgtgaaagcagtggtgttcgaccgtcacccggagattggtggtttgctgaccttcggcattccggcgttcaaactggaaaaagaagtgatgacccgccgtcgcgaaattttcaccggtatgggtatcgagttcaaactgaatactgaagttggccgcgacgttcagctggatgatctgctgagcgattacgacgctgttttcctcggcgttggtacttaccagagcatgcgtggtggtctggaaaatgaagatgcggatggcgtttacgcagcgctgccgttcctgatcgccaacaccaaacagctgatgggcttcggtgaaacccgtgacgaaccgtttgtttctatggaaggtaaacgcgttgttgtgctgggcggtggcgacaccgcaatggactgcgtgcgtacttccgtacgtcagggcgcaaagcacgttacctgcgcttaccgccgcgatgaagaaaacatgccgggtagccgtcgtgaagtaaaaaacgcgcgtgaagagggcgtagaatttaaattcaacgtacagccgctgggtattgaagttaacggcaacggtaaagtttccggtgtgaaaatggttcgtaccgaaatgggcgaacccgatgctaaaggccgccgtcgtgcggaaatcgtggcgggttctgaacacatcgttccggctgatgcagttattatggcgtttggtttccgtccgcacaatatggagtggctggcaaaacactctgttgagctggacagccagggtcgtattatcgctccggaaggctctgacaacgcattccagacttctaacccgaagatctttgctggcggcgatatcgtccgtggctccgacctggttgtaaccgctatcgcagaaggtcgtaaggcggcggacggtatcatgaactggctcgaagtgtag

SEQ ID NO: 1909 - DNA, 393 bp, Artificial Sequence
  Optimized genes for E. coli.
atggctgaaaaccaatactacggtactggccgtcgtaaatcttctgcagctcgtgtgttcatcaaaccgggtaacggtaaaatcgttatcaaccagcgttccctggaacagtacttcggtcgtgaaaccgcacgtatggttgttcgtcagccgctggagctggttgatatggtggaaaaactggatctgtacatcactgttaaaggcggtggtatttctggtcaggcgggtgctatccgtcacggtatcacccgtgcgctgatggaatacgacgaaagcctgcgttctgaactgcgcaaagcaggcttcgttactcgtgatgcgcgccaggttgaacgtaagaaagttggtctgcgtaaagcgcgtcgccgtccgcagttctctaaacgttaa

SEQ ID NO: 1910 - DNA, 429 bp, Artificial Sequence
  Optimized genes for E. coli.
atgaaaaccttcaccgcgaaaccagaaaccgttaaacgcgactggtacgttgttgatgcgactggcaaaacgctgggccgtctggcaaccgaactggcgcgtcgcctgcgtggtaaacacaaagctgaatacaccccgcacgttgacaccggcgattacatcatcgtgctgaacgctgacaaagtcgcggtgaccggcaacaaacgtaccgataaagtgtactaccaccacaccggtcacatcggtggtatcaaacaggcgacctttgaagaaatgatcgcccgtcgtccggaacgtgttatcgaaatcgctgtgaaaggtatgctgccgaaaggcccgctgggtcgtgcgatgttccgtaaactgaaagtttacgctggtaacgaacacaaccacgctgctcagcagccgcaggttctggatatctaa

SEQ ID NO: 1911 - DNA, 939 bp, Artificial Sequence
  Optimized genes for E. coli.
atgaaagttgcggtactgggtgctgcaggtggcattggtcaggcgctggcactgttgctgaaaactcagctgccaagcggttctgaactgtcgctgtacgatatcgcgccggtaactccgggcgtggcggttgacctctctcacatcccgaccgctgttaaaatcaaaggcttctctggcgaagatgcgaccccggcactggagggcgctgacgttgtgctgatctccgcgggtgtcgctcgcaaaccgggtatggatcgttctgacctgttcaacgttaatgctggtatcgttaagaacctggttcagcaggtggctaaaacctgcccgaaagcgtgtatcggtattatcaccaacccggttaacaccaccgttgctatcgctgctgaagttctgaagaaagctggcgtttacgacaaaaacaaactgtttggtgtaaccactctggacatcatccgtagcaataccttcgttgcagagctgaaaggtaaacaaccgggtgaagtagaggttcctgttatcggcggtcactctggtgttaccatcctgccgctgctgagccaggttccgggcgtatccttcaccgagcaggaagttgccgatctgaccaaacgtattcagaatgcgggcaccgaagtggttgaagcgaaagcaggcggcggcagcgcaacgctgtccatgggtcaggcagcggcgcgcttcggtctgtctctggtacgtgctctgcagggtgaacagggcgttgttgaatgcgcttacgtagaaggtgatggccagtacgcgcgtttcttctcccagccgctgctgctcggcaaaaacggtgtggaagaacgtaaatctatcggtactctttctgcattcgaacagaacgccctggaaggcatgctggataccctgaaaaaagacattgcgctgggcgaagagttcgtaaacaagtaa

SEQ ID NO: 1912 - DNA, 471 bp, Artificial Sequence
  Optimized genes for E. coli.
atggatatccgtaaaatcaaaaaactgatcgaactggtggaagagtccggtatctctgagctggaaatttctgaaggcgaagaatctgttcgtatctcccgtgctgctccggctgccagcttcccggtaatgcaacaggcttacgcagcgccgatgatgcagcagcctgcgcagagcaacgccgctgcaccggcgaccgttccgtctatggaagccccggcagcagctgaaatcagcggtcacatcgtgcgttctccgatggttggcaccttctaccgtactccgagcccggatgcgaaagcgttcatcgaagttggtcagaaagttaacgtgggcgacaccctgtgtatcgttgaagcgatgaaaatgatgaaccagattgaagctgacaaatctggtactgttaaagctatcctggtagaaagcggccagccggttgagttcgacgaaccgctggttgttatcgagtaa

SEQ ID NO: 1913 - DNA, 297 bp, Artificial Sequence
  Optimized genes for E. coli.
atgttcgaacagcgtgtaaactctgacgtgctgaccgtatccaccgttaacagccaggaccaggttactcagaaaccgctgcgcgattccgtgaaacaggcactgaaaaactacttcgcgcagctgaacggtcaggatgtgaacgatctgtacgaactggttctggctgaagttgagcagccgctgctggatatggtgatgcagtacacccgcggtaaccagacccgtgctgcgctgatgatgggtatcaaccgtggtactctgcgtaaaaaactgaagaaatacggtatgaactaa

SEQ ID NO: 1914 - DNA, 384 bp, Artificial Sequence
  Optimized genes for E. coli.
atgcgtcaccgtaaatctggtcgtcagctgaaccgtaacagctctcaccgccaggcgatgttccgcaacatggcgggcagcctggtacgtcatgaaatcatcaaaaccactctgccgaaagctaaagaactgcgtcgtgttgttgaaccgctgatcaccctggcgaaaactgactccgttgctaaccgccgtctggcattcgcgcgtactcgtgataacgaaatcgttgcaaaactgttcaacgagctgggtccgcgtttcgcttctcgtgctggcggctacacccgtatcctgaaatgtggtttccgtgcaggcgacaacgcaccgatggcttacatcgaactggttgaccgttctgaaaaagcggaagcggcagctgagtaa

SEQ ID NO: 1915 - DNA, 990 bp, Artificial Sequence
  Optimized genes for E. coli.
atgcagggttctgttaccgaattcctgaagccgcgtctggttgacatcgaacaggtttcttccacccacgcgaaagttacgctggaaccgctggagcgtggcttcggtcacaccctgggcaacgcgctgcgccgtattctgctgagctctatgccgggttgcgcagtgaccgaagttgaaatcgacggcgtgctgcacgaatactctaccaaagagggcgttcaggaagacattcttgaaattctgctgaatctgaaaggcctggcggttcgcgttcagggcaaagacgaagttatcctgactctgaacaaatccggtatcggtccggttactgctgctgatatcactcacgatggcgatgtggaaatcgttaaaccgcagcacgttatttgccacctgaccgacgaaaacgcctctatctccatgcgcatcaaagtgcagcgcggtcgtggttacgttccggcttctactcgtatccactctgaagaagatgaacgtccgatcggtcgcctgctggtggatgcgtgctacagcccggtggagcgcattgcttacaacgttgaagcagcgcgtgttgagcaacgtaccgatctggacaaactggtcattgaaatggaaaccaacggcaccatcgatccggaagaggctatccgtcgtgctgcaactatcctggcagagcagctggaagcgttcgttgatctgcgtgacgttcgtcagccggaagtgaaagaagaaaaaccagagttcgacccgattttactgcgtccggtagatgacctggaactgaccgtacgttctgctaactgcctgaaagctgaagccattcactacatcggcgacctggtacagcgtactgaagtagaattgctgaaaaccccgaacctgggtaaaaaatctctgaccgagattaaagatgttctggctagccgtggtctgtctcttggtatgcgtctggagaactggccgccggcatccatcgctgacgagtaa

SEQ ID NO: 1916 - DNA, 621 bp, Artificial Sequence
  Optimized genes for E. coli.
atggcacgttacctgggtccgaaattgaaactgagccgtcgcgaaggcaccgatctgttcctgaaatctggcgtacgtgctatcgacaccaaatgcaaaatcgaacaggcgccgggtcagcacggcgctcgtaaaccgcgtctgtccgattacggtgttcagctgcgtgaaaagcagaaagttcgtcgtatctacggcgttctggaacgccagttccgtaactactacaaagaagctgcacgcctgaaaggcaacaccggtgaaaacctgctggcgctgctcgaaggtcgtctggataacgttgtttaccgtatgggtttcggtgcgacccgtgctgaagcgcgtcagctggtttctcacaaagcaatcatggttaacggccgtgtggtgaacatcgcttcttaccaggttagcccgaacgacgttgtatctatccgtgaaaaagcgaaaaaacagagccgcgttaaagctgctctggagctggctgagcagcgtgagaaaccaacctggctggaagttgatgcgggtaaaatggaaggtaccttcaaacgtaagccggaacgttctgacctgtctgctgacatcaacgaacacctgatcgttgaactgtacagcaaataa

SEQ ID NO: 1917 - DNA, 390 bp, Artificial Sequence
  Optimized genes for E. coli.
atggcgaaagcgccgatccgtgcgcgtaaacgcgttcgtaaacaggtttctgacggcgttgctcacatccacgcttccttcaacaacaccatcgttactatcaccgaccgtcagggcaacgcgctgggctgggcgaccgctggcggcagcggtttccgtggttctcgcaaatctactccgttcgcggcgcaggtggctgctgaacgttgcgcagacgcagtgaaagaatacggtatcaaaaacctggaagtgatggttaaaggtccgggcccgggtcgtgaatccaccattcgtgctctgaacgccgcaggcttccgcattaccaacatcactgacgttaccccgattccgcacaacggttgccgtccgccgaaaaaacgtcgtgtttaa

SEQ ID NO: 1918 - DNA, 117 bp, Artificial Sequence
  Optimized genes for E. coli.
atgaaagttcgtgcttctgtgaaaaaactgtgccgtaactgcaaaatcgttaaacgtgacggcgttatccgtgtgatctgctccgctgaaccgaaacacaaacagcgtcagggttaa

SEQ ID NO: 1919 - DNA, 1332 bp, Artificial Sequence
  Optimized genes for E. coli.
atggcaaaacagcctggcctggacttccagagcgccaaaggtggtctgggtgaactgaaacgtcgcctgctgtttgtgattggcgcactgatcgttttccgtatcggttcttttatcccgatccctggtatcgacgcagcggttctggctaaactgctggaacaacagcgtggcactatcatcgaaatgttcaacatgttctctggtggcgcgctgagccgtgctagcatttttgctctggggatcatgccgtacatcagcgcgtctatcattattcagctgttaaccgttgttcacccgacccttgctgaaatcaaaaaagaaggcgaaagcggtcgccgtaaaatctctcagtacacccgttacggtacgctggtactggcgatcttccagtcgattggtatcgcgaccggtttgccgaacatgccaggtatgcaggggctggttatcaacccgggtttcgcgttctacttcaccgcagttgtttccctggtaactggcaccatgtttctgatgtggctgggcgaacagatcaccgaacgtggtatcggcaacggcatctccattatcatctttgccggtattgttgctggtctgccgccggcgattgctcacaccatcgagcaggcgcgtcagggcgacctgcacttcctggtgttgctgctggttgcggtgctggtcttcgctgttactttcttcgtagtgtttgttgaacgcggccagcgccgcattgtcgttaactacgcgaaacgccagcagggtcgtcgtgtttacgcagctcagtctactcacctgccgctgaaagttaatatggctggcgtgatcccggcaatcttcgccagctccatcatcctgttcccggctaccattgcctcctggttcggtggtggaaccggctggaactggctgactactatttctctgtacctgcagccaggtcagccgctgtatgttctgctgtacgcttctgctatcattttcttctgcttcttttataccgccctggtgttcaatccgcgtgaaaccgctgacaacctgaaaaaatctggcgctttcgttccgggcattcgtccgggcgagcagaccgcgaaatacatcgataaagtgatgactcgtctgaccctggttggtgcgctctacattaccttcatctgcctgattccggaatttatgcgtgatgcgatgaaagtaccgttctatttcggcggtaccagcctgttgatcgtcgtggtggttattatggatttcatggcgcaggttcagactctgatgatgagcagccagtatgaatctgcgctgaagaaagcgaacctcaaaggctacggccgttaa

SEQ ID NO: 1920 - DNA, 435 bp, Artificial Sequence
  Optimized genes for E. coli.
atgcgtctgaatactctgagcccggctgaaggttctaaaaaagcaggcaaacgtctgggccgtggtatcggcagcggcctgggtaaaaccggtggtcgtggtcacaaaggtcagaaatcccgttctggtggcggcgttcgtcgtggctttgaaggcggccagatgccgctgtaccgtcgcctgccgaaattcggtttcaccagccgtaaagcggcaatcaccgcagaaatccgtctgtctgatctggcgaaagttgaaggcggtgttgttgacctgaacaccctgaaagctgcaaacatcatcggtattcagatcgaatttgctaaagtgattctggctggcgaagtgaccactccggttaccgttcgcggtctgcgtgtaaccaaaggcgcgcgtgctgctatcgaagcggcgggtggtaaaattgaagagtaa

SEQ ID NO: 1921 - DNA, 180 bp, Artificial Sequence
  Optimized genes for E. coli.
atggcgaaaaccatcaaaatcacccagacccgttctgcgattggtcgtctgccgaaacacaaagcgaccctgctgggtctgggcctgcgtcgtatcggtcacaccgttgagcgtgaagataccccggcaatccgtggtatgatcaacgccgtttccttcatggttaaagttgaagagtaa

SEQ ID NO: 1922 - DNA, 504 bp, Artificial Sequence
  Optimized genes for E. coli.
atggcgcacatcgaaaaacaggcgggtgaactgcaggaaaaactgatcgccgttaaccgtgtttctaaaaccgtgaaaggtggtcgtatcttctctttcaccgcactgaccgttgtgggcgacggcaacggtcgcgttggtttcggttacggtaaagcgcgtgaagttccggcagcgattcagaaagcaatggaaaaggcacgtcgtaacatgatcaacgtagcgctgaacaacggcaccctgcagcacccggttaaaggcgttcacaccggttctcgtgtgttcatgcagccggcttctgaaggtactggtatcatcgctggcggcgcgatgcgtgctgttctggaagtggcaggcgtacacaacgtgctggcgaaagcttacggctccaccaacccgatcaacgttgttcgtgcgaccatcgacggtctggaaaacatgaacagcccggaaatggttgctgctaaacgtggtaaatctgttgaagaaatcctgggcaaataa

SEQ ID NO: 1923 - DNA, 354 bp, Artificial Sequence
  Optimized genes for E. coli.
atggataaaaaatctgcacgtatccgtcgcgctactcgtgcgcgtcgtaaactgcaggaactgggcgcaacccgtctggtggttcaccgtactccgcgtcacatctacgctcaggttatcgcgccgaacggttctgaagttctggttgctgcttctaccgttgagaaagctatcgctgaacagctgaaatacaccggtaacaaagacgcagcggcagctgttggtaaagcggttgcggaacgtgctctggaaaaaggtatcaaagatgtttccttcgaccgttctggtttccagtatcacggtcgtgttcaggcgctggctgacgctgcccgtgaagcgggtctgcagttctaa

SEQ ID NO: 1924 - DNA, 534 bp, Artificial Sequence
  Optimized genes for E. coli.
atgagccgtgttgctaaagcgccggtagttgttccggctggcgttgacgtgaaaatcaacggtcaggtgatcaccatcaaaggtaaaaacggcgaactgactcgtactctgaatgacgctgttgaagttaaacacgctgataacaccctgaccttcggtccgcgtgacggttatgccgatggctgggcgcaggcaggcaccgcgcgtgcgctgctgaacagcatggttattggcgtgactgaaggcttcaccaagaaactgcaactggttggtgttggctaccgtgcagcagtaaaaggtaacgttatcaacctgtctctgggtttctctcacccggttgatcaccagctgccggcaggtatcactgctgaatgcccgacccagaccgaaatcgttctgaaaggcgcagacaaacaggtaatcggtcaggttgcggcggatctgcgtgcttaccgccgtccggaaccgtacaaaggcaaaggcgtacgttacgctgacgaagtggttcgtaccaaagaagcgaaaaaaaagtaa

SEQ ID NO: 1925 - DNA, 393 bp, Artificial Sequence
  Optimized genes for E. coli.
atgagcatgcaggatccgatcgctgatatgctgacccgtattcgtaacggtcaggctgctaacaaagcggcggtgaccatgccgtcttccaaactgaaggttgctatcgccaacgttctgaaagaagaaggtttcatcgaagacttcaaagttgaaggcgacaccaaaccggaactggaactgactctgaaatacttccagggtaaagctgttgtagaaagcattcagcgtgttagccgtccgggtctgcgtatctacaaacgtaaagatgagctgccgaaagtgatggctggcctgggtatcgcggttgtttctaccagcaaaggcgttatgaccgaccgtgctgcgcgtcaggcgggtctgggcggcgaaatcatctgctacgttgcgtaa

SEQ ID NO: 1926 - DNA, 306 bp, Artificial Sequence
  Optimized genes for E. coli.
atggcgaaacagtctatgaaagcgcgtgaagttaaacgcgttgcgctggctgacaaatacttcgctaaacgtgctgaactgaaagcaatcatctccgacgttaacgcttctgacgaagatcgctggaacgccgttctgaaactgcagactctgccgcgtgactccagcccgtctcgccagcgtaaccgttgccgtcagaccggtcgtccgcacggcttcctgcgtaaattcggtctgagccgtatcaaagttcgcgaagcggcgatgcgtggtgaaatcccgggcctgaagaaagcttcctggtaa

SEQ ID NO: 1927 - DNA, 540 bp, Artificial Sequence
  Optimized genes for E. coli.
atggcgaagctgcacgattactacaaagacgaagttgttaaaaaactgatgaccgagttcaactacaacagcgtgatgcaggttccgcgcgttgaaaaaattactctgaacatgggcgttggtgaagcgatcgctgacaagaaactgctggacaacgccgctgcagacctggctgctatctccggtcagaaaccgctgattaccaaagcgcgtaaatctgttgctggcttcaaaatccgtcagggctacccgatcggttgcaaagtgaccctgcgtggtgagcgtatgtgggaattcttcgaacgtctgatcactatcgcggtaccgcgtattcgtgacttccgcggcctgtctgctaaaagcttcgacggccgtggcaactacagcatgggtgttcgtgaacagatcatcttcccggaaatcgactacgacaaagttgaccgtgtgcgcggtctggatatcaccatcaccaccactgcgaaatccgatgaagaaggtcgtgcgctgctggcagcgttcgatttcccgttccgtaagtaa

SEQ ID NO: 1928 - DNA, 315 bp, Artificial Sequence
  Optimized genes for E. coli.
atggcagcgaaaatccgtcgtgacgacgaagttattgttctgaccggcaaagacaaaggcaaacgtggtaaagtgaaaaacgtgctgtcttctggtaaagttatcgtagaaggtatcaacctggttaaaaaacaccagaaaccggttccggcgctgaaccagccgggcggcatcgttgaaaaagaagcggcgattcaggtttctaacgttgctatcttcaacgccgcaaccggtaaagctgaccgtgttggtttccgttttgaagatggcaagaaagtacgtttcttcaaatccaacagcgaaaccatcaaataa

SEQ ID NO: 1929 - DNA, 372 bp, Artificial Sequence
  Optimized genes for E. coli.
atgatccaggaacagaccatgctgaacgttgctgacaacagcggtgcgcgtcgcgtgatgtgtatcaaagtgctgggtggttctcaccgtcgttacgctggcgttggtgatatcatcaaaatcaccattaaagaagcgatcccgcgtggtaaagttaagaaaggcgacgtactgaaagcggtggttgttcgtaccaaaaaaggtgttcgccgtccggatggcagcgttatccgtttcgacggtaacgcctgcgtgctgctgaataacaactccgagcagccgatcggtactcgtatcttcggtccggttacccgtgaactgcgttctgaaaaattcatgaaaattatttctctggcaccggaagttctgtaa

SEQ ID NO: 1930 - DNA, 255 bp, Artificial Sequence
  Optimized genes for E. coli.
atgaccgacaaaattcgtactctgcagggtcgtgtggtttctgataaaatggaaaaatctatcgttgttgctatcgaacgtttcgttaaacacccgatctacggtaaattcatcaaacgtaccactaaactgcacgttcacgacgaaaacaacgaatgtggtatcggcgacgttgttgaaatccgtgaatgccgtccgctgagcaaaaccaaatcctggaccctggttcgtgttgttgagaaagcggttctgtaa

SEQ ID NO: 1931 - DNA, 192 bp, Artificial Sequence
  Optimized genes for E. coli.
atgaaagcgaaagagctgcgcgagaaatctgttgaagaactgaacaccgaactgctgaatctgctgcgtgaacagttcaacctgcgtatgcaggctgcttctggtcagctgcagcagtctcacctgctgaaacaggttcgtcgtgacgttgcgcgtgtgaaaaccctgctgaacgaaaaagcaggcgcgtaa

SEQ ID NO: 1932 - DNA, 411 bp, Artificial Sequence
  Optimized genes for E. coli.
atgctgcaaccgaaacgtaccaaattccgtaaaatgcacaaaggtcgtaaccgtggcctggctcagggtactgacgtttccttcggttcttttggtctgaaagcggttggccgtggtcgtctgaccgcacgtcagatcgaagctgctcgtcgtgcgatgacccgtgctgttaaacgccagggcaaaatctggatccgtgtgttcccggacaaaccaatcaccgaaaaaccgctggccgttcgtatgggtaagggtaaaggcaacgttgaatactgggtggcgctgatccagccgggtaaagttctgtacgaaatggatggcgttccggaagaactggcgcgtgaagcgttcaaactggcagcggcgaaactgccgatcaaaaccaccttcgttactaaaactgtgatgtaa

SEQ ID NO: 1933 - DNA, 702 bp, Artificial Sequence
  Optimized genes for E. coli.
atgggtcagaaagttcacccgaacggtattcgcctgggcattgttaaaccgtggaactccacctggttcgctaacactaaagaatttgctgataacctggattctgacttcaaagtacgtcagtacctgaccaaagagctggctaaagcgtctgtttctcgtatcgtgatcgaacgcccggcgaaatctatccgtgtgaccatccataccgcgcgtccgggtatcgttatcggtaaaaaaggtgaagacgttgagaaactgcgcaaagtggttgccgatatcgcaggcgtaccggcacagatcaacatcgctgaagttcgtaagccggaactggacgcgaagctggttgctgactccatcaccagccagctggaacgtcgcgtgatgttccgtcgtgcgatgaaacgtgctgttcagaacgcaatgcgtctgggcgcaaaaggcatcaaagttgaagtgtctggtcgtctgggtggtgctgagatcgcccgtaccgagtggtaccgtgaaggccgtgttccgctgcacacgctgcgtgcagacatcgactacaacacctctgaagcgcacaccacctacggtgttattggcgtgaaagtctggatcttcaagggcgaaatcctgggcggtatggcggcggtagaacagccagaaaaaccagcagcgcagccgaagaaacagcagcgtaaaggccgcaagtaa

SEQ ID NO: 1934 - DNA, 333 bp, Artificial Sequence
  Optimized genes for E. coli.
atggaaaccatcgcgaaacaccgtcacgcgcgttcttctgcgcagaaagttcgtctggttgctgatctgatccgtggtaaaaaagtcagccaggcgctggatatcctgacctacaccaacaaaaaagcggcggtgctggtgaagaaagttctggaaagcgctatcgctaacgctgaacacaacgacggtgctgacatcgacgacctgaaagtgaccaaaatcttcgttgacgaaggtccgtctatgaaacgtatcatgccgcgtgctaaaggtcgtgcggatcgtattctgaagcgtacctctcacatcaccgttgttgtttctgaccgttaa

SEQ ID NO: 1935 - DNA, 279 bp, Artificial Sequence
  Optimized genes for E. coli.
atgccgcgttctctgaagaaaggtccgttcatcgacctgcacctgctgaaaaaagttgaaaaagcagttgagtctggcgataaaaaaccgctgcgtacctggagccgtcgttccaccatcttcccgaacatgatcggtctgaccattgctgttcacaacggtcgtcagcacgttccggttttcgttaccgacgaaatggttggtcataaactgggcgaatttgctccgacccgtacttaccgtggtcacgctgctgacaaaaaagcgaaaaagaagtaa

SEQ ID NO: 1936 - DNA, 822 bp, Artificial Sequence
  Optimized genes for E. coli.
atggcggtggttaaatgcaaaccgaccagcccgggtcgccgtcatgtggtgaaagttgttaacccggaactgcacaaaggcaagccgttcgctccgctgctggaaaaaaacagcaaatctggcggccgtaataacaacggtcgtatcaccactcgtcacatcggtggcggtcacaagcaggcttaccgtattgttgacttcaaacgcaataaagatggtatcccggcagtggtagaacgtcttgaatacgatccgaaccgttctgctaacattgcgctggttctgtacaaagacggcgagcgtcgttacatcctggcgccgaaaggcctgaaagcaggcgatcagattcagtctggtgttgatgctgctatcaaaccaggtaacaccctgccgatgcgcaacatccctgttggttctaccgttcacaacgttgaaatgaaaccgggcaaaggtggtcagctggcacgttccgcaggtacttacgttcagatcgtcgcgcgtgacggtgcttatgtgacgctgcgtctgcgcagcggtgaaatgcgtaaagtggaagctgactgccgtgctactctgggcgaagttggcaacgctgaacacatgctgcgtgtgctgggtaaagcgggcgcagcgcgctggcgtggtgtgcgtccgactgtacgtggcaccgcaatgaacccggtagaccatccgcacggtggtggcgaaggtcgtaacttcggtaaacacccggttactccgtggggcgtacagaccaaaggtaaaaaaacccgtagcaacaaacgtaccgacaaattcatcgttcgtcgtcgctccaaataa

SEQ ID NO: 1937 - DNA, 303 bp, Artificial Sequence
  Optimized genes for E. coli.
atgatccgtgaagaacgtctgctgaaggtgctgcgtgctccgcacgtttctgagaaagcgtctaccgcaatggaaaaatccaacaccatcgttctgaaagttgcgaaagatgcgaccaaagctgaaatcaaagcagctgttcagaaactgttcgaagtagaagttgaagtggttaacacgctggttgttaaaggtaaagtgaaacgtcacggccagcgtatcggtcgtcgttctgactggaaaaaagcttacgttaccctgaaagaaggtcagaacctggacttcgttggtggtgctgagtaa

SEQ ID NO: 1938 - DNA, 606 bp, Artificial Sequence
  Optimized genes for E. coli.
atggaactggtactgaaagacgcgcagtctgcgctgaccgtttctgaaaccaccttcggtcgtgacttcaacgaagcgctggttcaccaggtggttgttgcttacgcagctggcgcacgccagggcacccgtgctcagaaaactcgtgctgaagttactggttctggtaaaaaaccgtggcgccaaaaaggtaccggccgtgcgcgttccggttccatcaaatctccgatctggcgttctggcggcgttacctttgctgcacgtccgcaggatcacagccagaaagttaacaaaaaaatgtaccgtggtgcactgaagtctatcctgtctgagctggtgcgtcaggaccgtctgatcgttgtagaaaaattctctgttgaagcaccgaaaaccaaactgctggcacagaagctgaaagatatggctctggaagatgtgctgatcatcactggcgaactggacgaaaacctgttcctggctgctcgtaacctgcacaaagttgacgttcgtgatgcgaccggtatcgatccggtatctctgattgcattcgacaaagtggtgatgaccgctgacgctgttaaacaggttgaagaaatgctggcgtaa

SEQ ID NO: 1939 - DNA, 630 bp, Artificial Sequence
  Optimized genes for E. coli.
atgatcggcctggttggtaagaaagtcggtatgacccgtatcttcaccgaagatggcgtttccatcccggtaactgttatcgaagttgaagcgaaccgtgtgacccaggtgaaagacctggctaacgacggttaccgtgctatccaggttaccactggcgctaaaaaagccaaccgcgtaaccaaaccggaagctggtcacttcgcgaaagcaggcgtggaagcaggtcgtggtctgtgggaattccgtctggcagaaggcgaagaatttaccgtgggccagtctatctccgtagaactgttcgctgacgttaagaaagtggatgtgactggtacttccaaaggtaaaggttttgctggcaccgttaaacgctggaacttccgcactcaggacgcaactcacggtaactctctgtctcaccgtgttccgggcagcatcggtcagaaccagactccgggtaaagttttcaaaggcaaaaaaatggcgggtcagatgggcaacgaacgcgttactgttcagagcctggatgttgttcgtgttgacgctgaacgtaacctgctgctggtgaaaggcgcggttcctggcgcaaccggttctgatctgatcgttaagccggcagtaaaagcgtaa

SEQ ID NO: 1940 - DNA, 312 bp, Artificial Sequence
  Optimized genes for E. coli.
atgcagaaccagcgtatccgtattcgcctgaaagcgttcgaccaccgtctgatcgaccaggcgaccgctgaaatcgtagaaaccgcgaaacgtaccggtgcgcaggttcgtggtccgatcccgctgccgactcgtaaagaacgtttcaccgtgctgatttctccgcacgttaacaaagatgcgcgtgatcagtacgaaattcgtactcacctgcgtctggttgatatcgttgaaccgaccgaaaaaaccgttgacgcgctgatgcgtctggatctggctgctggcgtggacgttcagatctctctgggctga

SEQ ID NO: 1941 - DNA, 2115 bp, Artificial Sequence
  Optimized genes for E. coli.
atggcacgtaccacgccgattgcccgttaccgtaacatcggtatctccgctcacatcgatgcgggtaaaactaccaccactgaacgtatcctgttctacactggtgtaaaccacaaaatcggtgaagttcacgacggtgcggcaacgatggactggatggaacaagagcaggaacgcggtatcactatcacctctgctgcaaccaccgcgttctggtctggtatggcgaaacagtatgaaccgcaccgtatcaacattattgacaccccgggccacgtagacttcaccattgaagttgaacgtagcatgcgtgtactggacggcgcggtgatggtttactgcgcagtaggtggcgtacagccgcaatccgaaaccgtgtggcgtcaggctaacaagtacaaagtgccgcgtattgcttttgttaacaaaatggatcgcatgggtgctaacttcctgaaagtagtcaaccagatcaagacccgtctgggtgccaacccagttccgctgcagcttgcaatcggcgctgaagaacacttcactggcgtggttgatctggttaagatgaaagcgatcaactggaacgatgctgatcagggcgttacctttgaatacgaagacatcccggcggacatggtagaactggcgaacgagtggcaccagaacctgatcgagtctgcagctgaagcttctgaagaactgatggagaaatacctgggcggcgaagagctgaccgaagccgaaatcaaaggcgcactgcgccagcgtgttctgaacaacgaaatcatcctggtgacctgcggtagcgccttcaaaaacaaaggcgtgcaggcaatgctcgacgcagtgatcgactatctgccgtctccggtagatgtaccggctattaacggcatcctcgatgatggcaaggacactccggcagagcgtcacgcatctgacgacgaaccattctctgcgctggcattcaagatcgcgaccgacccgttcgttggtaacctcaccttcttccgtgtgtacagcggcgtcgtgaacagcggtgataccgttctgaattctgttaaagcagcacgcgagcgctttggtcgcatcgttcagatgcacgccaataaacgtgaagagatcaaagaggttcgtgcaggcgatatcgccgctgctatcggcctgaaagacgtaactacgggtgacacgctgtgcgatccggatgcaccaatcattctggaacgtatggaattcccggaaccggttatttccatcgctgtagagccaaaaaccaaagctgaccaggaaaaaatgggtctggctctgggccgcctggcaaaagaagatccaagcttccgcgtctggaccgatgaggaaagcaatcagactattatcgctggtatgggcgaactgcacctggatatcatcgtcgaccgtatgaagcgtgagttcaacgttgaggcaaacgtgggtaaaccgcaggttgcttaccgcgaaaccatccgtcagaaagtcactgatgtggaaggcaaacacgctaaacaatccggtggtcgtggccagtacggtcacgttgtgattgatatgtacccgcttgagccgggttccaacccgaaaggttacgaattcatcaacgacattaaaggcggtgttatcccaggcgagtacatccctgctgttgacaaaggtattcaggagcaactgaaagccggtccgctggcgggttatccggttgttgatatgggcattcgtctgcatttcggttcttaccatgacgttgactccagcgagctggcgtttaaactggctgcgtctatcgcatttaaagaaggtttcaaaaaagcgaagccggtgctgctggaaccgatcatgaaagttgaagtcgaaactcctgaagaaaacaccggcgacgtcattggcgacctgtctcgtcgtcgcggcatgctgaagggtcaggaatctgaagtaaccggtgtgaaaattcacgcggaagtgccgctgagcgaaatgttcggctacgcaactcagctgcgttctctgactaaaggccgtgcttcctacaccatggaatttttgaaatatgatgaagcaccgagcaacgtagcgcaggcggttatcgaagcgcgtggtaagtaa

SEQ ID NO: 1942 - DNA, 540 bp, Artificial Sequence
  Optimized genes for E. coli.
atgccgcgtcgtcgtgttatcggtcagcgtaaaattctgccggatccgaaattcggttccgagctgctggcgaaatttgttaacatcctgatggttgacggtaaaaaatccaccgcggaaagcattgtttacagcgcgcttgaaaccctggcgcaacgttctggcaaatctgaactggaagcattcgaagttgcgctggaaaacgttcgtccgaccgttgaagtgaaaagccgtcgcgttggtggttctacctaccaggttccggttgaggttcgcccggtacgccgtaacgctctggcaatgcgttggatcgttgaagctgcgcgtaagcgtggcgacaaatctatggcgctgcgtctggctaacgaactgtctgacgctgctgaaaataaaggcaccgctgttaagaaacgtgaagacgttcaccgtatggcagaagcgaacaaagcgtttgctcactaccgctggctgagcctgcgcagcttctctcaccaggcgggcgcaagcagcaaacagccggcactgggctacctgaactaa

SEQ ID NO: 1943 - DNA, 375 bp, Artificial Sequence
  Optimized genes for E. coli.
atggcgaccgttaaccagctggttcgtaagccgcgtgctcgcaaagtggcgaaatccaacgttccggcgctggaagcgtgcccgcagaaacgcggcgtttgtactcgtgtttacaccaccactccgaagaaaccgaacagcgcactgcgtaaagtttgccgtgtgcgtctgaccaacggttttgaagttacctcttacatcggtggtgaaggtcacaacctgcaggaacactctgttatcctgatccgtggcggtcgtgtaaaagatctgccgggcgtgcgttatcacaccgtacgtggtgctctggactgctccggtgttaaagaccgtaaacaggcgcgttctaaatacggtgtgaaacgtccgaaagcgtaa

SEQ ID NO: 1944 - DNA, 633 bp, Artificial Sequence
  Optimized genes for E. coli.
atggttctgggcaaaccgcagaccgatccgacccttgagtggttcctgtctcactgccacatccacaaatatccgtctaaatctactctgatccatcagggcgagaaagcggaaacgctgtactacatcgtgaaaggttctgttgccgtgctgatcaaagacgaagaaggtaaagaaatgatcctctcttacctgaaccagggtgacttcatcggcgaactgggtctgttcgaagaaggccaggagcgttctgcctgggttcgtgctaaaactgcgtgtgaagttgctgaaattagctacaaaaaattccgtcagctgattcaggttaacccggatatcctgatgcgcctgtccgctcagatggcgcgtcgtctgcaggtgacctctgaaaaagttggtaacctggcattcctggacgttaccggtcgtatcgctcaaaccctgctgaatctggcgaaacagccggatgcgatgactcacccggacggtatgcagattaaaatcacccgccaggaaatcggtcagatcgtcggttgctcccgtgaaaccgttggccgtattctgaaaatgctggaagatcagaacctgatttctgctcacggtaaaaccatcgttgtttacggtactcgttaa

SEQ ID NO: 1945 - DNA, 1104 bp, Artificial Sequence
  Optimized genes for E. coli.
atgaaaaacgttggtttcatcggctggcgtggtatggtgggttctgttctgatgcagcgtatggttgaagagcgtgattttgacgcgattcgtccggtgttcttctctacttcccaactgggtcaggcagcgccgtccttcggcggcaccactggtaccctgcaggatgcattcgacctggaagcgctgaaagctctggacatcatcgttacctgccagggtggcgattacaccaacgaaatttatccgaaactgcgtgaaagcggttggcagggctactggatcgacgcagcaagctctctgcgcatgaaagacgatgcgatcattatcctcgatccggttaaccaggacgttattaccgacggtctgaacaacggtatccgtaccttcgttggtggtaactgcactgttagcttgatgctgatgagcctgggcggtctgttcgctaacgatctggttgactgggtttccgttgcaacctatcaggcggcttctggcggcggtgcgcgtcacatgcgcgagctgctgacccagatgggtcacctgtacggccacgttgctgacgaactggcgaccccgtcttctgctatcctggatatcgaacgtaaagtgaccacgctgacccgttctggtgaactgccggttgataacttcggtgtgccgctggctggttccctgattccgtggattgataaacagctcgacaacggccagagccgtgaagaatggaaaggccaagcggaaaccaacaaaattctgaacaccagcagcgttatccctgtcgatggcctgtgcgttcgtgtgggcgcactgcgttgccacagccaggctttcaccatcaaactgaaaaaagatgtttctatcccgaccgtagaagaactgttggcggcgcacaacccgtgggcgaaagttgttccgaacgaccgcgaaatcaccatgcgtgagctgactccggcagctgtaaccggtactctgacgacgccggtaggtcgtctgcgcaaactcaacatgggcccggaattcctgtctgcgtttaccgttggcgaccagctgctgtggggcgctgctgaaccgctgcgtcgtatgttgcgtcagctggcataa

SEQ ID NO: 1946 - DNA, 1104 bp, Artificial Sequence
  Optimized genes for E. coli.
atgaacattaaaggtaaagcgctgttggcaggctgtatcgctctggctttctccaacatggcgctggcagaagacatcaaagttgctgttgttggcgcgatgagcggtccggtagcgcagtatggcgaccaggaattcaccggtgctgagcaggctgtagccgatatcaacgcgaaaggcggcattaaaggtaacaaactgcagatcgttaaatatgatgatgcctgtgatccgaagcaggccgttgcggtggctaacaaagtagttaacgatggtatcaagtacgttatcggtcacctgtgctcctcttctactcagccggcatctgacatttacgaagatgaaggtattctgatgatcaccccggcggcaaccgctccggaactgactgcccgtggttaccagctgatcctgcgcaccactggcctggattccgatcagggcccgaccgcagcgaaatacatcctggaaaaagtgaaaccgcagcgtattgctatcgttcacgacaaacagcagtacggcgaaggcctggcgcgtgcggttcaggacggtctgaagaaaggcaacgccaacgttgtgttcttcgacggcatcactgctggtgagaaagatttctctaccctggtagctcgtctgaaaaaagaaaacatcgacttcgtttactacggtggctaccatccggaaatgggccagattctgcgtcaggcacgtgctgctggcttgaaaacccagttcatgggtcctgaaggtgttgctaacgtcagcctgtctaacatcgccggtgaaagcgcggaaggcctgctggttaccaaaccgaaaaactacgatcaggttccggccaacaagccgattgttgatgcgatcaaagctaaaaaacaggatccgtctggtgcgttcgtctggaccacctacgctgcactgcaatctctgcaggcgggtctgaaccagagcgatgacccggctgaaatcgcaaaatacctgaaagcaaacagcgttgacaccgtgatgggtccgctgacctgggatgagaagggcgatctgaaaggctttgaatttggcgtgtttgactggcacgcgaacggcaccgcgaccgatgctaagtaa

SEQ ID NO: 1947 - DNA, 435 bp, Artificial Sequence
  Optimized genes for E. coli.
atggcttacaaacacatcctgatcgctgttgatctgagcccggaaagcaaagtgctggttgaaaaagcggttagcatggcgcgtccgtacaacgcgaaagtttctctgattcacgtagacgttaactacagcgacctgtacaccggtctgatcgacgtaaacctgggcgatatgcagaaacgtatctctgaagaaactcaccacgcgctgactgaactgtccaccaacgccggttatccgatcaccgaaaccctgtctggttctggcgacctgggtcaggttctggtagatgctatcaaaaaatacgatatggatctggtggtttgcggtcaccatcaggacttctggtctaaactgatgagctctgcacgtcagctgatcaacaccgttcacgttgacatgctgatcgttccgctgcgtgacgaagaagagtaa

SEQ ID NO: 1948 - DNA, 333 bp, Artificial Sequence
  Optimized genes for E. coli.
atgaaaaaagtgctgggcgttatcctgggtggtctgttgctgctgccggtagtttctaacgctgctgatgcgcagaaagcggctgacaacaagaaaccggttaactcctggacctgcgaagatttcctggctgttgacgaaagcttccagccgaccgcagttggtttcgctgaagcgctgaacaacaaagacaagccggaagacgcggttctggatgtgcagggtatcgctaccgttactccggcaatcgttcaggcgtgtactcaggacaaacaggctaacttcaaagacaaagttaaaggcgaatgggataaaatcaaaaaagatatgtaa

SEQ ID NO: 1949 - DNA, 252 bp, Artificial Sequence
  Optimized genes for E. coli.
atggctaacgttgaaatctacaccaaagaaacctgcccgtactgccaccgtgcgaaagcgctgctgagcagcaaaggcgtttccttccaggaactgccgatcgacggtaacgctgctaaacgcgaagaaatgatcaaacgttctggtcgtaccaccgttccgcagatcttcatcgatgcgcagcacatcggcggttgcgacgacctgtacgcactggacgcgcgtggtggtctggatccgctgctgaaataa

SEQ ID NO: 1950 - DNA, 168 bp, Artificial Sequence
  Optimized genes for E. coli.
atggctaaaggtatccgtgaaaaaatcaaactggtttcttctgcaggcaccggtcacttctacaccaccactaaaaacaaacgtaccaaaccggaaaagctggaactgaaaaaattcgatccggttgttcgtcagcacgttatctacaaagaagcgaaaattaaataa

SEQ ID NO: 1951 - DNA, 237 bp, Artificial Sequence
  Optimized genes for E. coli.
atgagccgtgtttgccaggttaccggtaaacgtccggtaaccggcaacaaccgttctcacgcgctgaacgcaaccaaacgccgcttcctgccgaacctgcacagccaccgtttctgggttgaaagcgaaaagcgttttgttacgctgcgcgtttctgcgaaaggcatgcgtgttatcgacaaaaaaggtatcgataccgttctggctgaactgcgtgcgcgtggtgaaaaatactaa

SEQ ID NO: 1952 - DNA, 276 bp, Artificial Sequence
  Optimized genes for E. coli.
atggcgcgtgtgaccgttcaggacgctgttgaaaaaatcggtaaccgtttcgacctggtgctggttgctgcacgtcgtgctcgccagatgcaggttggtggtaaagatccgctggtaccggaagaaaacgacaaaaccactgttatcgcgctgcgtgaaatcgaagaaggtctgatcaacaaccagatcctggacgttcgtgagcgtcaggagcagcaggaacaggaagcggcggaactgcaggcggttaccgctatcgctgaaggccgccgttaa

SEQ ID NO: 1953 - DNA, 99 bp, Artificial Sequence
  Optimized genes for E. coli.
atgaccaccagcatgctgaacgcgaaactgctgccgaccgcaccgtctgcagctgttgttgtagttcgtgttgttgtggtggttggtaacgccccctaa

SEQ ID NO: 1954 - DNA, 141 bp, Artificial Sequence
  Optimized genes for E. coli.
atgaaacgcaccttccagccgtctgtgctgaaacgtaaccgttctcacggtttccgtgctcgtatggcgaccaaaaacggtcgtcaggttctggcgcgtcgtcgcgcgaaaggccgtgcacgtctgaccgtttctaaataa

SEQ ID NO: 1955 - DNA, 1371 bp, Artificial Sequence
  Optimized genes for E. coli.
atgctgaataacgcgatgagcgttgttattcttgcagctggcaaaggtacccgtatgtacagcgatctgccgaaagttctgcacactctggcaggtaaagctatggttcagcacgtgatcgacgcagccaacgaactgggtgcggcgcacgttcatctggtctatggtcacggcggcgatctcctgaaacaggcgctgaaagacgataacctgaactgggtgctgcaggccgagcagctcggcaccggtcatgcaatgcagcaggctgcgccgttcttcgctgacgacgaagacatcctgatgctgtacggcgatgtgccgctgatctccgtagaaaccttgcagcgtctgcgcgatgctaaaccgcagggcggtatcggtctgctgaccgttaagctggatgatccgaccggctacggtcgtatcacccgcgaaaacggcaaagtgaccggcatcgttgaacacaaagatgcaaccgatgaacaacgtcagatccaggagatcaacaccggtattctgattgctaacggtgccgatatgaaacgctggctggcgaaactgactaacaacaatgcgcagggtgaatactacatcactgatatcattgcactggcttaccaggaaggtcgtgaaatcgtcgctgttcacccgcaacgcctgtctgaagttgagggcgttaacaaccgtctgcaactgagccgtcttgaacgtgtttatcagagcgaacaggcagaaaaactgttgctggcaggcgtgatgttgcgcgacccggcgcgtttcgacctgcgtggtacgctgactcacggtcgtgacgttgaaatcgataccaacgtaatcatcgaaggcaacgttaccctgggccaccgtgtgaaaatcggtactggctgcgttatcaaaaacagcgtgattggtgatgactgcgaaatctctccgtacaccgtggtggaagatgcgaacctggctgcagcgtgtactatcggtccgtttgctcgtctgcgtccgggtgctgagctgctggaaggtgcacacgtaggtaacttcgttgaaatgaaaaaagcacgtctgggtaaaggcagcaaagcgggtcacctgacctacctgggcgacgctgaaattggcgacaacgtcaacatcggcgcgggcactattacctgtaactacgacggcgcaaacaaattcaaaaccattattggtgacgacgtatttgttggttctgacacccagctggttgctccggtaaccgttggcaagggcgctaccatcgctgctggtaccaccgtaactcgtaacgtgggcgaaaatgctctggcgatttctcgcgttccgcagactcagaaagaaggctggcgtcgtccggttaaaaagaaataa

SEQ ID NO: 1956 - DNA, 864 bp, Artificial Sequence
  Optimized genes for E. coli.
atggctggcgcgaaagaaatccgttccaaaattgcttctgttcagaacacccagaaaatcaccaaagcgatggaaatggtggctgctagcaaaatgcgcaaatctcaggatcgtatggcggcgagccgtccgtacgctgaaaccatgcgtaaagttatcggtcacctggctcacggtaacctggaatacaaacatccgtatctggaagatcgcgacgttaaacgtgttggttacctggtggtgtctactgaccgtggtctgtgcggtggcctgaacatcaacctgttcaaaaaactgctggcggaaatgaaaacctggaccgacaaaggtgtacagtgcgacctggcaatgatcggctctaaaggcgtttccttcttcaacagcgttggcggcaacgttgttgcgcaggtaaccggtatgggcgacaacccgtctctgtctgaactgattggtccggtgaaagtgatgctgcaggcttacgacgaaggtcgtctggataaactctacatcgttagcaacaaattcatcaacacgatgagccaggttccgaccatctcccagctgttgccgctgccggcatctgacgacgatgatctgaaacacaaatcctgggattacctgtacgaaccggatccgaaagcgctgctggacaccctgctgcgtcgttacgttgaaagccaggtgtaccagggcgtggtagaaaacctcgccagcgaacaggcggcacgcatggttgctatgaaagcagcgaccgataacggtggtagcctgatcaaagagctgcaactggtttacaacaaggcgcgtcaggcatctatcactcaggaactgaccgaaattgtttctggtgctgcagctgtttga

SEQ ID NO: 1957 - DNA, 1542 bp, Artificial Sequence
  Optimized genes for E. coli.
atgcagctgaacagcaccgaaattagcgaactgatcaaacaacgcattgctcagttcaacgtggtttctgaagcgcacaacgaaggcaccattgtttccgtatctgatggcgtgatccgtatccacggtctggctgactgcatgcaaggcgaaatgatctccctgcctggcaaccgttatgcaatcgcgctgaatctggagcgcgacagcgtgggcgcggtggtgatgggtccgtatgccgatctggcagaaggtatgaaagttaaatgcactggccgtattctggaagttccggtaggtcgtggcctgctgggccgcgttgtaaacaccctgggtgcgccaatcgacggtaaaggcccgctggaccacgatggtttctccgcggtagaagctatcgctccgggcgttatcgagcgtcagtctgttgatcagccggttcagaccggttacaaagcagtggattctatgattccgatcggccgcggtcagcgcgaactgatcattggcgaccgtcagactgggaaaaccgccctggccattgatgcgatcatcaaccagcgtgactccggtattaaatgtatctacgtcgcgattggtcaaaaagcgtctaccatcagcaacgtagttcgtaagctggaagaacacggcgcactggctaacactatcgttgttgttgctaccgcttccgaaagcgccgcgctgcagtatctggcgccgtacgctggttgcgcaatgggcgagtacttccgtgatcgtggtgaagatgctctgattatctatgatgatctttctaaacaggcggttgcctaccgccagatttcgctgctgctgcgtcgtccgccgggtcgtgaagcgttcccgggtgatgtgttctacctgcactctcgtctgctcgaacgtgctgcgcgtgtgaacgcggaatacgtggaagcattcaccaaaggcgaagtgaaaggtaaaacgggttctctgaccgcactgccgattattgaaactcaggctggcgatgtcagcgcgtttgtaccgactaacgttatttctatcaccgacggccagatcttcctggaaaccaacctgtttaacgcaggcatccgcccggcagttaacccgggtatctctgtaagccgtgttggtggtgcagcgcaaaccaagatcatgaagaaactgtctggcggcattcgtactgcgctggcacagtaccgtgagctggcggctttctctcagtttgcttctgacctggatgacgcaacccgtaaacaactggaccatggtcagaaagtgactgaattgctgaaacagaagcagtacgcaccgatgagcgttgcgcagcagagcctggttctgttcgctgctgaacgtggttatcttgcagacgttgaactgagcaaaatcggttcctttgaagccgctctgttggcttacgttgaccgcgatcacgcgccgctgatgcaggaaatcaaccaaactggtggctacaacgacgaaatcgaaggcaaactgaaaggtatcctggattccttcaaagccacccagtcctggtaa

SEQ ID NO: 1958 - DNA, 534 bp, Artificial Sequence
  Optimized genes for E. coli.
atgagcgaatttatcaccgttgcgcgtccgtacgctaaagcggcgttcgacttcgcggttgaacaccagagcgttgagcgctggcaggatatgctggcattcgctgcggaagtgaccaaaaacgaacagatggcagaactgctgtccggtgctctggcaccggaaaccctggctgaaagcttcattgccgtttgcggtgaacaactggacgaaaacggccagaacctgatccgtgtgatggctgagaacggtcgtctgaatgcactgccggacgttctggagcagttcatccacctgcgtgctgtttccgaagcgaccgctgaagttgatgtgatctccgcagcagcgctgtctgaacagcagctggcgaaaatttctgctgcaatggaaaaacgcctgagccgtaaagtgaaactgaactgcaaaatcgataaatccgttatggcgggcgttattattcgtgcaggcgacatggttatcgacggttctgttcgtggccgtctggaacgtcttgctgacgtgctgcagtcttaa

SEQ ID NO: 1959 - DNA, 240 bp, Artificial Sequence
  Optimized genes for E. coli.
atggaaaacctgaacatggatctgctgtacatggcggctgctgtaatgatgggcctggcagcgattggcgcagctatcggtatcggcatcctgggcggtaaattcctggaaggcgcggcgcgtcagccggacctgatcccgctgctgcgtactcagttcttcatcgttatgggtctggttgacgcaattccgatgatcgctgttggtctgggtctgtatgtgatgttcgcggttgcgtaa

SEQ ID NO: 1960 - DNA, 816 bp, Artificial Sequence
  Optimized genes for E. coli.
atggcttctgaaaacatgaccccacaggattacattggtcaccacctgaacaacctgcagctggatctgcgtactttctctctggttgatccgcagaacccgccggcaaccttctggaccatcaacatcgacagcatgttcttcagcgtggtactgggtctgctgtttctggtgctgttccgttctgttgcgaaaaaagcgaccagcggcgtaccgggcaaattccagaccgctatcgaactggtaatcggcttcgttaacggttctgtgaaagatatgtatcacggtaaatccaaactgattgctccgctggcactgactattttcgtctgggtgttcctgatgaacttgatggacctgttgccgatcgatctgctgccgtacatcgccgagcacgttctggggctgccggctctgcgcgttgttccgtctgctgacgttaacgttacgctgtccatggcgctgggcgtgtttatcctgattcttttctacagcatcaaaatgaaaggtatcggtggtttcaccaaagagctgaccttgcagccgttcaaccactgggcattcatcccggtaaacctgattctggaaggcgttagcctgctgagcaaaccggtttctctcggcctgcgtctgttcggtaacatgtacgctggcgaactgatctttattctgatcgctggtctgttaccgtggtggagccagtggatcctcaacgtgccgtgggcgatcttccacatcctgatcatcaccctgcaagcgttcatcttcatggttcttactatcgtttacctgtctatggcaagcgaagaacactaa

SEQ ID NO: 1961 - DNA, 891 bp, Artificial Sequence
  Optimized genes for E. coli.
atgaacatgaaaaaacttgcgaccctggtatccgcagttgctctgtctgcaactgtttccgccaacgcaatggcgaaagataccatcgcgctggtggtttcaacgctgaacaacccgttcttcgtttctctgaaagacggcgctcagaaagaagctgacaaactgggttacaacctcgtagttctggacagccagaacaatccggcgaaagagctggcaaacgtgcaggatctgaccgttcgtggcactaaaattctgctgatcaacccgaccgattccgacgctgttggtaacgccgtgaaaatggctaaccaggcgaacatcccggtaatcaccctcgaccgtcaggcaaccaaaggtgaagttgtatctcacatcgccagcgataacgttctcggcggcaaaatcgctggcgattacatcgcgaagaaagcaggcgagggtgctaaagttatcgaactgcagggtatcgcaggtaccagcgcagcgcgtgaacgtggtgaaggtttccagcaggcggtggcggcgcacaaattcaacgtactggcttctcagccggcagacttcgatcgtatcaaaggtctgaatgtgatgcagaacctgttgaccgctcacccggacgtacaggctgtgttcgcgcagaatgacgaaatggcactgggcgcgctgcgtgctttgcagaccgcgggtaaatctgacgttatggttgtgggcttcgacggtactccggatggcgaaaaagcggttaacgatggtaaactggcggctaccattgcacagctgccggatcagatcggtgcaaaaggcgttgaaaccgccgataaagtgctgaaaggcgaaaaggttcaggccaaatatccggttgacctgaagctggttgttaaacagtaa

SEQ ID NO: 1962 - DNA, 99 bp, Artificial Sequence
  Optimized genes for E. coli.
atgaccgcgctgctgcgtgtgatttctctggttgttatctccgtggtggttattatcatcccgccgtgcggtgctgcactgggtcgtggtaaagcgtaa

SEQ ID NO: 1963 - DNA, 330 bp, Artificial Sequence
  Optimized genes for E. coli.
atgtctgacaaaatcatccacctgaccgatgactccttcgacaccgacgttctgaaagctgacggcgcgattctggttgacttctgggcggaatggtgtggtccgtgcaaaatgatcgcgccgatcctggacgaaatcgctgatgaataccagggtaaattaaccgttgctaaactgaacatcgaccagaacccgggtactgcaccgaaatacggtattcgtggtatcccgaccctgctgctgttcaaaaacggcgaagttgcggcgaccaaagttggtgcgctgagcaaaggtcagctgaaagaattcctggatgctaacctggcgtaa

SEQ ID NO: 1964 - DNA, 2262 bp, Artificial Sequence
  Optimized genes for E. coli.
atgactatcctgaaccacacgctgggtttcccgcgcgtgggcctgcgtcgcgagctgaagaaagcgcaggagtcctactgggcaggtaacagcactcgtgaagaattgctggcagtgggtcgtgagctgcgcgcgcgtcactgggaccagcagaaacaggctggcatcgacctgttgccggttggtgacttcgcgtggtacgaccacgttctgacgacctctctgcttctgggcaacgttccggcacgccaccagaacaaagacggttctgtcgatattgacaccctgttccgtattggtcgcggccgcgcaccaactggcgaaccagctgctgccgctgaaatgaccaaatggttcaacaccaactatcactacatggtcccggaatttgttaaaggccagcagttcaaactgacctggactcagctgctggatgaagttgatgaagccctggcgctgggtcacaaagttaagccggtgctgctggggccggttacctggctgtggctgggtaaagtgaaaggcgaacagtttgaccgtctgtccctgctgaacgatatcctgcctgtttatcagcaagttctcgccgaactggcgaagcgtggcattgagtgggttcagatcgacgaaccggcgctggtactggagctgccgcaagcctggcttgacgcttacaaaccggcctatgacgcattgcagggtcaggttaaattactgttaaccacctatttcgaaggcgtgaccccaaacctggataccatcaccgctttaccagttcagggcctgcatgttgacctggttcatggtaaagatgacgttgctgaactgcacaagcgcctgccaagcgactggctgctgagcgccggtctgatcaacggtcgtaacgtctggcgtgctgacctcaccgaaaaatacgcacaaattaaagacatcgttggcaaacgtgatctctgggtggcttcttcttgttcactgctgcacagcccgatcgatctgtctgtagaaacccgtctcgacgcggaagtaaaatcctggtttgcattcgctctgcaaaaatgccatgaactggctctgctgcgcgatgcgctcaactctggcgacactgcggcactggcagagtggtctgcaccgatccaagctcgccgtcattctacccgcgttcacaacccagcggttgagaaacgcctggctgctatcactgctcaggacagccagcgcgccaacgtgtacgaagtgcgtgcagaagcacagcgtgcgcgctttaaactgccggcatggccgactaccacgatcggttccttcccgcagaccactgaaattcgtactctgcgtctggatttcaagaagggtaatctggacgctaacaactaccgtaccggtattgccgagcacatcaaacaagcgatcgtcgagcaggaacgcctgggcctcgatgttctggtgcacggtgaagctgagcgtaatgacatggttgaatacttcggtgaacacctggacggcttcgttttcacccagaacggctgggtacagtcttacggtagccgttgcgtgaagccgccgattgttatcggcgatatctctcgtccggcgccgattaccgttgaatgggcgaaatatgcccagagcctgactgacaaaccagtgaaaggtatgctgaccggcccggtaaccattctgtgctggagcttcccgcgtgaagatgtcagccgcgaaaccatcgccaagcagatcgctctggccttgcgtgacgaagttgccgatctggaagcagcgggtatcggtatcatccagattgatgagccggcactgcgtgaaggtctgccgctgcgtcgttctgactgggatgcctacctgcagtggggcgttgaagcgttccgcattaacgccgcagttgcgaaagatgatacgcaaatccatactcacatgtgctactgcgaattcaacgacatcatggattctatcgcagcacttgatgctgatgtgattactattgaaacttcccgttccgatatggaactgctggaaagctttgaagagttcgattacccgaacgaaatcggtccgggtgtttacgatatccactctccgaacgtaccgtctgtggaatggatcgaagcgctgctgaaaaaagcagctaaacgtatcccggctgaacgtctgtgggttaacccggactgcggtctgaaaacccgtggttggcctgaaacgcgcgctgcactggcaaacatggtgcaggcggcgcaaaacctgcgtcgtggctga

SEQ ID NO: 1965 - DNA, 213 bp, Artificial Sequence
  Optimized genes for E. coli.
atgaagaaagatatccacccgaaatacgaagaaatcaccgccagctgctcctgcggtaacgtgatgaaaatccgttctaccgttggtcacgacctgaacctggatgtttgttctaaatgccatccgttcttcaccggtaaacagcgtgacgttgctactggcggtcgtgttgaccgtttcaacaaacgttttaacatcccgggtagcaaataa

SEQ ID NO: 1966 - DNA, 429 bp, Artificial Sequence
  Optimized genes for E. coli.
atggcgaagaaagtgcaggcttacgttaaactgcaggttgctgctggtatggctaacccgtctccgccggttggtccggcgctgggtcagcagggcgttaacatcatggaattttgcaaagcgttcaacgcgaaaaccgattctatcgaaaaaggcctgccgatcccggtagttatcaccgtttacgctgaccgttctttcaccttcgttaccaaaactccgccagcagctgttctgctgaaaaaagcagcgggtatcaaatctggcagcggtaaaccgaacaaagacaaagttggcaaaatctcccgtgcgcagctgcaggaaatcgctcagactaaagctgccgatatgaccggtgctgatatcgaagcgatgactcgttccattgaaggcaccgcgcgtagcatgggtctggttgttgaagattaa

SEQ ID NO: 1967 - DNA, 705 bp, Artificial Sequence
  Optimized genes for E. coli.
atggcgaagctgaccaaacgtatgcgtgttatccgtgaaaaagtggatgctactaaacagtacgatatcaacgaagcaatcgctctgttgaaagagctggcgaccgctaaattcgttgaaagcgttgacgttgccgttaacctcggtatcgacgcgcgtaaatctgatcagaacgtacgtggcgcaaccgttctgccgcacggtaccggtcgttctgttcgtgtggcagtgttcactcagggcgctaacgcagaagctgcgaaagctgctggtgcggaactggttggtatggaagatctggctgaccagatcaagaaaggcgaaatgaacttcgatgttgttattgcttctccggatgcgatgcgcgtggtgggccagctgggtcaggtgctgggcccgcgtggtctgatgccgaacccgaaagttggcaccgtaaccccaaacgttgctgaagcggtgaaaaatgccaaagcgggtcaggttcgctaccgtaacgacaaaaacggcatcatccacactaccatcggtaaagtagacttcgacgctgataaactgaaagaaaacctggaagccctgctggtggcgctgaaaaaagcaaaaccgacccaggcgaaaggtgtttacatcaaaaaggtttctatctccaccaccatgggtgctggcgttgcggttgatcaggcaggcctgtctgccagcgtaaactaa

SEQ ID NO: 1968 - DNA, 498 bp, Artificial Sequence
  Optimized genes for E. coli.
atggcactgaacctgcaggacaaacaggcgatcgttgctgaagtgtctgaagtagctaaaggcgcgctgtctgcagtggtggctgacagccgtggtgtgaccgttgataaaatgaccgagctgcgcaaagcaggtcgtgaagccggtgtttacatgcgtgttgttcgtaacaccctgctgcgtcgtgcggttgaaggtactccgttcgaatgcctgaaagatgcgttcgttggtccgaccctgatcgcttacagcatggaacacccgggtgcggcagcacgcctgttcaaagagttcgcgaaagcgaacgccaaattcgaagttaaagctgcagcgtttgaaggcgaactgattccggcaagccagatcgaccgtctggcaacgctgccgacttacgaagaagctatcgcgcgtctgatggcgaccatgaaagaagcatccgctggtaaactggtacgtactctggctgctgttcgcgatgcaaaagaagcggcgtaa

SEQ ID NO: 1969 - DNA, 366 bp, Artificial Sequence
  Optimized genes for E. coli.
atgtctatcaccaaagatcagatcatcgaagctgttgcggcgatgagcgtgatggatgttgttgaactgatctccgcaatggaagagaaattcggtgtttctgcggcagctgcagttgccgttgctgctggtccggtagaagccgcagaagaaaaaaccgaatttgacgttatcctgaaagcagcaggcgctaacaaagttgcagtgatcaaagcggttcgtggtgcgaccggtctgggcctgaaagaggcgaaagacctggttgaaagcgcgccggcagcgctgaaagaaggcgttagcaaagatgatgcggaagcactgaagaaagctctggaagaagcgggtgctgaagtggaagttaaataa

SEQ ID NO: 1970 - DNA, 4029 bp, Artificial Sequence
  Optimized genes for E. coli.
atggtttacagctataccgaaaaaaagcgcattcgtaaagattttggcaagcgtccgcaagttcttgatgttccgtacctgttgagcattcagctggattccttccagaaatttattgagcaggacccggaagggcaatacggcctggaagctgcattccgtagcgtcttcccgatccagtcttattccggtaatagcgaattgcagtatgtttcctaccgtctgggggaaccggtgtttgacgttcaggaatgccagatccgcggcgtaacttactctgcaccgctgcgcgtaaagctgcgcctggtgatttacgaacgtgaagcgccggagggcaccgtgaaagatatcaaagagcaggaagtatacatgggtgaaatcccgttgatgaccgataacggcacctttgtaattaatggtactgaacgtgtgatcgtgtcgcagctgcaccgttctccgggcgtgttcttcgactccgataaaggtaaaacccacagcagcggcaaagtcctgtacaacgcccgtattatcccgtaccgcggttcctggctggacttcgaattcgatccgaaggataacctgtttgttcgcatcgaccgtcgccgcaagctgccggcaaccatcatcctgcgtgccctgaactacaccaccgagcagatccttgacctgttctttgaaaaagtaatctttgaaattcgcgacaacaagctgcaaatggaactggtaccggaacgtcttcgtggcgaaaccgccagcttcgacatcgaggcaaacggcaaagtttatgtcgaaaaaggccgccgtattaccgctcgccacattcgccagctggagaaagatgacgtaaaactgatcgaagtgccggttgagtacatcgccggtaaagtggttgcgaaagattacatcgacgagtccactggtgaattgatttgcgcagccaacatggaactgtcgctggatctgcttgcaaaactctctcaatccggccacaaacgcatcgaaactttattcaccaacgacctggaccacggcccatatatctccgaaaccttgcgtgtagatccgaccaacgatcgtctgtctgcgctggttgaaatctatcgcatgatgcgtcctggcgaaccgccgactcgtgaagcagcggaaagcctgtttgagaacctgttcttctctgaagaccgctacgatctgagcgccgttgggcgtatgaaattcaaccgcagcttgctgcgtgaagaaatcgaaggcagcggtatcctcagcaaagacgatatcattgacgtgatgaaaaaactgattgatattcgtaacggaaaaggtgaagttgatgatatcgatcacctgggtaaccgtcgtatccgttccgttggcgagatggcagaaaaccagttccgcgtgggtctggtacgcgttgaacgtgctgttaaggagcgcctgagtcttggcgacctcgacaccctgatgccgcaggatatgatcaacgctaaaccgatctctgccgcagtgaaagagtttttcggtagctctcagcttagccagttcatggaccagaacaacccgctgtctgagattactcataaacgccgcatttccgctctgggtccgggtggtttaacccgcgaacgtgcgggcttcgaagttcgtgacgttcacccgacgcactatggccgtgtttgcccgattgaaacgccagaaggtccgaacatcggcctgatcaacagcctgagcgtgtacgcgcagaccaatgaatacggtttcctggaaaccccgtatcgcaaagtgaccgacggtgttgttactgacgaaattcactacctctccgcgatcgaagaaggcaactacgttatcgctcaggcgaactccaacctcgatgaagaaggtcacttcgttgaagatctggttacctgccgttccaagggcgaatccagtttgttctctcgcgatcaggttgactatatggatgtcagcactcagcaggttgtatctgttggcgcgtctctgattccgttcctcgaacacgacgatgcgaatcgtgcactgatgggcgctaacatgcagcgtcaggcagtaccaacgctgcgcgctgataagccgttagttggtacggggatggaacgcgcggtggcggttgacagtggtgtaaccgcagttgccaaacgtggtggtgtggtacagtacgtcgatgcttctcgtatcgtcattaaagtaaacgaagatgaaatgtatccgggagaagcaggtattgatatctacaacctgaccaaatacacccgtagcaaccaaaacacctgtatcaatcagatgccgtgcgtgtctctgggtgagccggtagagcgtggtgatgtgctggcagacggcccgtctactgatctgggcgaactggctcttggtcagaatatgcgcgttgcttttatgccgtggaacggttataacttcgaagattctatcctggtttctgaacgggttgtccaggaagaccgtttcactactatccacatccaggagctggcgtgtgttagccgcgataccaaactgggcccggaagagatcactgctgacattccgaacgtgggcgaagccgcgctgtccaaactggatgagtctggtatcgtttacattggcgcagaagttaccggcggcgatattctggtcggtaaagtgactccgaaaggcgaaactcagctgacgcctgaagagaagctgctgcgtgctatcttcggtgaaaaagcgagcgatgttaaagacagcagtttgcgcgtgccaaacggcgtttcaggcactgttatcgatgtgcaggtatttacccgtgacggcgtggaaaaagacaaacgtgcactggagatcgaagaaatgcaactgaaacaagcgaaaaaagacctgtcagaagagctgcagattctggaagcgggtctgttcagccgtatccgtgctgtactggtcgctggcggcgtagaagcggagaaactggacaagctgccgcgtgatcgctggctggaactcggtctgaccgatgaagagaaacagaaccagttggaacaactggctgaacagtacgacgaactgaaacacgaatttgaaaagaaactggaagcaaaacgtcgtaagatcacccagggcgatgatctcgctccgggtgttctcaagattgtcaaagtttatctggccgtgaagcgtcgtattcagccaggtgacaaaatggctggtcgtcacggtaacaaaggcgttatttctaaaattaacccgattgaagacatgccttacgacgaaaacggtaccccagttgacatcgttctgaatccgctgggcgttccgtcccgtatgaacattggtcagattcttgagactcacctgggtatggcggcgaaggggatcggtgataaaatcaacgcaatgttgaagcagcagcaagaagtggctaaactgcgtgagttcatccaacgcgcttatgatttaggtgccgatgtacgtcaaaaagtcgacctttccaccttctccgacgaagaagtaatgcgtctggcagaaaatctgcgtaaaggtatgccaatcgcaacgccggtttttgatggtgcgaaagaagctgaaatcaaagaactgctgaagctcggcgacctgccaacctctggccaaattcgtctgtatgacggtcgcactggcgagcaatttgaacgcccggtcaccgttggttacatgtacatgctgaaactgaaccatctggttgatgacaaaatgcacgcgcgttctaccggttcttactccctggtgacgcaacagccgctgggcggtaaagcacagtttggtggccagcgcttcggcgaaatggaagtctgggcgctggaagcctatggtgctgcttacactctgcaggaaatgctgactgttaaatctgacgacgttaacggtcgtactaaaatgtacaaaaacattgttgatggcaaccaccagatggagccaggcatgcccgaatcttttaacgttctgctgaaagaaatccgttcactgggcatcaacatcgagcttgaagatgagtaa

SEQ ID NO: 1971 - DNA, 273 bp, Artificial Sequence
  Optimized genes for E. coli.
atgaacaaaactcagctgatcgacgttatcgctgaaaaagcagaactgagcaaaacccaggcgaaagctgcactggaatccaccctggctgctatcaccgaaagcctgaaagaaggcgacgctgttcagctggttggtttcggtaccttcaaagttaaccaccgtgcggaacgtactggtcgtaacccgcagaccggtaaagagatcaaaatcgccgcagctaacgttccggcattcgtttctggcaaagcgctgaaagatgcggtgaaataa

SEQ ID NO: 1972 - DNA, 1602 bp, Artificial Sequence
  Optimized genes for E. coli.
atgaccgagcaggcgactaccaccgatgaactggcatttacccgtccgtacggtgaacaggagaaacagatcctgaccgcggaagcagttgaattcctcactgaactggttactcacttcaccccgcagcgtaacaaactgctggctgcgcgtatccagcaacagcaggacatcgataacggcacgctgccggatttcatttctgaaaccgcttctatccgtgatgctgactggaaaattcgtggtatccctgccgatctggaagaccgtcgtgtagaaatcaccggtccggttgagcgcaaaatggttatcaacgccctcaacgcgaacgtgaaagtgttcatggcggattttgaagacagcctggcaccggactggaacaaggtgatcgacggtcagattaacctgcgcgacgcggttaacggtactatctcttacaccaacgaagctggcaaaatctatcagctgaagccgaacccggcagtgctgatctgccgtgttcgtgggctgcacctgccggaaaaacacgttacctggcgtggcgaagcgattccgggcagcttgttcgactttgctctgtacttcttccataactaccaggctttgctggcgaaaggttctggcccgtatttctacctgccgaaaactcagtcctggcaggaagcggcatggtggtccgaagttttctcctacgctgaagatcgcttcaacctcccgcgcggtaccatcaaagcaaccctgttgattgaaactctgcctgcggtattccagatggatgagattctgcatgcactgcgtgaccacatcgttggtctgaactgcggtcgctgggattacatcttcagctacattaaaacgctgaaaaactatccggaccgcgtactgccagatcgtcaggcagtgaccatggacaaaccgttcctgaatgcttacagccgtctgctgatcaaaacctgccacaaacgtggtgcattcgcgatgggcggcatggcagcgttcatcccgtctaaagacgaagaacacaacaaccaggttctgaacaaagttaaagctgataaatctctggaagcaaacaatggtcacgatggcacctggatcgctcacccgggtctggctgacaccgcaatggctgtatttaacgatatcctgggttcccgtaaaaatcagcttgaagtgatgcgtgaacaggatgcgccgatcactgcggatcagctgcttgctccgtgcgacggcgaacgtaccgaagaaggtatgcgcgctaacatccgcgttgctgttcagtacatcgaagcctggatttccggtaacggctgcgttccgatttacggcctgatggaagatgcagcaactgcagaaatctcccgcaccagcatctggcagtggatccaccaccagaaaaccctgtctaacggtaaaccggtaaccaaagcgctgttccgtcaaatgctgggcgaggaaatgaaagtaatcgccagcgaactcggtgaagagcgtttctctcagggtcgttttgacgacgctgctcgcctgatggaacaaattaccacttctgacgagctgattgacttcctgactttgcctggctaccgtctgctggcgtaa

SEQ ID NO: 1973 - DNA, 1305 bp, Artificial Sequence
  Optimized genes for E. coli.
atgaaaacccgtacgcaacagatcgaagagctgcaaaaagaatggactcagccgcgctgggaaggcattactcgtccgtacagcgcggaagatgtggttaaactgcgtggcagcgttaacccggaatgtactcttgcgcaactgggcgcagcgaaaatgtggcgtctgctgcacggtgaaagcaagaaaggctacatcaacagcctgggtgcactgaccggtggtcaggcgctgcagcaggccaaagcgggtattgaagccgtttacctgtctggctggcaggttgcagctgatgctaacctggcagccagcatgtacccggatcagtctctgtacccggcaaactccgttcctgcggttgttgaacgtatcaacaacaccttccgccgtgcagatcagattcagtggtctgcaggcatcgaaccgggcgatccgcgttacgttgattacttcctgccgatcgttgctgacgctgaagcgggcttcggtggcgtgctgaacgcgtttgaactgatgaaggcgatgatcgaagctggcgcggcagcagttcacttcgaagaccagctggcaagcgtgaaaaaatgtggtcacatgggcggtaaagtactggtgccgacccaggaagcaatccagaaactggttgcggcgcgcctggctgctgacgttactggtgttccgactctgctggtagctcgcaccgacgcggatgcggccgatctgatcacttccgactgcgacccgtacgactctgaattcatcaccggtgagcgtaccagcgaaggtttcttccgtactcacgccggtatcgagcaggcaatttctcgtggtctggcctacgcaccgtatgcagacctggtctggtgtgaaacctctactccggacctggaactggcgcgtcgtttcgcgcaggctattcacgctaaatatccgggtaagctgttggcttacaactgcagcccgtcttttaactggcagaaaaacctggatgataaaactatcgcttccttccagcagcagctgagcgatatgggttacaaattccagtttattaccctggctggtatccactctatgtggttcaacatgttcgatctggcgaacgcctatgctcagggcgaaggtatgaaacactacgtagaaaaagttcagcaaccggagttcgctgctgcaaaagacggttatacctttgtttctcaccagcaagaagttggtaccggctatttcgacaaagtgaccaccatcatccagggtggtacttcttctgttaccgctctgactggctccaccgaagaatctcagttctaa

SEQ ID NO: 1974 - DNA, 294 bp, Artificial Sequence
  Optimized genes for E. coli.
atgaacatccgtccgctgcacgaccgtgttatcgtcaaacgtaaagaagtcgaaaccaaatctgctggcggtatcgtactgaccggttctgcagcggcgaaatccacccgtggtgaagttctggctgttggcaacggtcgtattctggaaaacggcgaagtaaaaccgctggatgtgaaagttggtgatatcgtgatcttcaacgacggttacggtgttaaaagcgaaaaaatcgacaacgaagaagtgctgatcatgtctgaatctgacatcctggcaatcgttgaagcgtaa

SEQ ID NO: 1975 - DNA, 951 bp, Artificial Sequence
  Optimized genes for E. coli.
atgtctgacatttctaaagcttctctgccgaaagcgattttcctgatgggtccgaccgccagcggtaaaaccgcactggcaatcgaactgcgtaaaatcctgccagttgaattgatctccgtagactccgcgctgatctacaaaggtatggatatcggcaccgcgaaaccaaacgccgaagaactgttggcagcaccgcatcgtctgctggacatccgcgatccaagccaggcttacagcgccgctgacttccgtcgtgacgcactggcagaaatggctgatatcactgcggcgggtcgtatcccgctgctggttggcggtaccatgctgtacttcaaagcattgctggagggtctgtctccgctgccttctgccgatccggaagttcgtgctcgcattgaacagcaggcagctgaacagggctgggaaagcctgcaccgtcagttgcaggaagttgacccggttgctgctgcacgtattcacccgaacgatccgcagcgcctgagccgcgctctggaagtgttcttcatctctggcaaaacgctgaccgagctgactcagaccagcggcgatgcgctgccgtaccaggtacaccagttcgctatcgctccggcaagccgtgaactgctgcatcagcgtatcgaacaacgtttccaccagatgctggcgtctggttttgaagcggaagtacgtgcgctgttcgcccgtggtgatctgcacaccgacctgccgtctatccgttgcgtgggctaccgtcaaatgtggtcttacctggaaggcgaaatcagctacgacgaaatggtttatcgtggcgtttgcgcaacccgtcagctggctaaacgccagatcacctggctgcgcggttgggaaggtgttcactggctggattctgaaaaaccggagcaggcgcgtgatgaagtgctgcaggttgttggtgcgatcgccggttaa

SEQ ID NO: 1976 - DNA, 309 bp, Artificial Sequence
  Optimized genes for E. coli.
atggcgaaaggccagtctctgcaggatccgttcctgaacgcgctgcgtcgtgaacgtgttccggtatctatctacctggttaacggtatcaaactgcaaggtcagatcgaaagcttcgaccagttcgttatcctgctgaaaaacactgttagccagatggtttacaaacacgctatctccaccgttgtaccgtctcgtccggtttctcaccacagcaacaacgccggtggtggcacctcttccaactaccatcacggttcttctgcgcagaacaccagcgctcagcaggactctgaagaaaccgagtaa

SEQ ID NO: 1977 - DNA, 396 bp, Artificial Sequence
  Optimized genes for E. coli.
atgcgccactacgaaatcgttttcatggttcacccggatcagagcgaacaggttccgggtatgatcgaacgttacaccgctgctatcaccggtgcggaaggtaaaatccaccgtctggaagactggggccgccgtcagctggcttacccgatcaacaaactgcacaaagctcactatgttctgatgaacgttgaagcgccgcaggaagttatcgacgaactggaaaccaccttccgtttcaacgacgcagtgatccgttctatggtgatgcgtaccaaacacgcggtgaccgaagccagcccgatggttaaagcgaaagatgagcgtcgtgaacgccgcgatgacttcgctaacgaaactgctgacgacgctgaagctggcgactctgaagagtaa

SEQ ID NO: 1978 - DNA, 315 bp, Artificial Sequence
  Optimized genes for E. coli.
atgaccaaccgtctggttctgtctggcaccgtttgccgtgctccgctgcgtaaagtttctccgtctggtatcccgcactgtcagttcgtactggaacaccgttctgtacaggaagaagcgggtttccaccgtcaggcatggtgccagatgccggttatcgtttccggtcacgaaaaccaggcgattactcactctatcaccgtgggcagccgtatcactgttcagggcttcatctcctgccacaaagcgaaaaacggtctgagcaaaatggtgctgcacgctgaacagatcgaactgatcgacagcggcgactaa

SEQ ID NO: 1979 - DNA, 228 bp, Artificial Sequence
  Optimized genes for E. coli.
atggcgcgttacttccgtcgtcgtaaattctgccgtttcaccgctgaaggcgttcaggaaatcgactacaaagatatcgctaccctgaaaaactacatcaccgaaagcggtaaaatcgttccgtctcgtattaccggtactcgtgcgaaataccagcgtcagctggcacgtgctatcaaacgtgcacgctacctgtctctgctgccgtacaccgaccgtcaccagtaa

SEQ ID NO: 1980 - DNA, 387 bp, Artificial Sequence
  Optimized genes for E. coli.
atgagcaaaaccatcgctactgaaaacgcaccggcggcaatcggtccgtacgttcagggcgttgatctgggtaacatgatcatcacctctggtcagatcccggtaaacccgaagaccggtgaagttccggctgacgttgctgctcaggcgcgtcagtctctggataacgttaaagctatcgttgaagctgcaggtctgaaagttggcgatatcgtcaaaaccaccgtgttcgttaaagacctgaacgacttcgcaaccgttaacgcgacctacgaagcattcttcaccgaacacaacgccaccttcccggcacgttcctgcgtggaagtggctcgtctgccgaaagatgtgaaaattgaaatcgaagcgatcgccgttcgtcgttaa

SEQ ID NO: 1981 - DNA, 936 bp, Artificial Sequence
  Optimized genes for E. coli.
atggcaaacccgctgtatcagaaacacatcatctctatcaacgatctgagccgtgatgatctgaatctggtactggcaaccgctgcgaaactgaaagcaaatccgcaaccggaactgctgaagcacaaagtgatcgcgtcctgcttcttcgaagcttctacccgtactcgtctgtcttttgaaacttctatgcaccgtctgggcgcgtctgttgttggtttctctgacagcgccaacaccagcctgggtaaaaaaggcgaaaccctggctgacaccatcagcgttatctccacctacgttgacgctatcgttatgcgtcacccacaggaaggcgcagcgcgtctggcgaccgaattctccggtaacgttccggttctgaacgctggcgacggttctaaccagcacccgacccagactctgctggacctgttcaccattcaggagactcagggccgcctggataacctgcacgttgcaatggttggcgatctgaaatacggtcgtaccgttcactctctgacccaagctctggctaaattcgacggcaaccgcttctactttattgctccggatgcgctggcgatgccgcagtacatcctcgatatgctggatgaaaaaggtatcgcctggtccctgcacagctccatcgaagaagtgatggctgaagttgatatcctgtacatgacccgcgttcagaaagaacgtcttgatccgtctgaatacgcgaacgtgaaagcgcagttcgttctgcgtgcttccgacctccacaacgcaaaagctaacatgaaagttctgcatccgctgccgcgtgttgacgaaatcgctaccgatgtggacaaaaccccgcacgcgtggtacttccagcaggctggtaacggcatcttcgctcgtcaggcgttgctggcactggttctgaaccgtgacctggtgctgtaa

SEQ ID NO: 1982 - DNA, 417 bp, Artificial Sequence
  Optimized genes for E. coli.
atggctaacccggaacaactggaagaacagcgtgaagaaactcgtctgattattgaagaactgctggaagacggttctgacccggatgcgctgtacaccatcgaacaccacctgagcgctgacgatctggaaaccctggagaaagcggcggttgaagcgttcaaactgggctacgaagtgaccgatccagaagagctggaagttgaagatggtgatatcgttatctgctgcgacatcctgtctgaatgcgcactgaacgccgacctgatcgacgcgcaggttgagcagctgatgactctggctgaaaaattcgacgtagaatacgatggctggggcacctacttcgaagatccgaacggtgaagacggcgacgacgaagacttcgttgatgaagatgatgacggcgttcgtcactaa

SEQ ID NO: 1983 - DNA, 954 bp, Artificial Sequence
  Optimized genes for E. coli.
atgactgacaaactgactagcctgcgtcagtacactaccgttgttgcagacacgggcgacatcgctgccatgaaactgtaccagccgcaggatgcgaccacgaacccctcgctgatcctgaacgctgcgcagattccggaataccgtaaactgattgatgacgcggttgcgtgggcgaaacagcaatcaaacgatcgtgctcagcaaatcgtagatgctaccgataaactggctgtgaatatcggtcttgaaatccttaaactggtgccgggtcgtatctccactgaggtagatgcgcgtttgtcctatgacaccgaggcttctatcgctaaagctaaacgtctgatcaagctgtacaacgatgcaggcatttctaacgatcgcattttaatcaaactggccagcacctggcagggcatccgtgcagcagaacagctggaaaaagaaggtattaattgcaacctgaccctgctgttctctttcgcgcaggcgcgtgcctgcgcggaagccggggtgttcttaatctccccgtttgttggtcgcattttggactggtataaggcaaataccgacaaaaaagagtacgccccagcagaggatccaggagtcgtctctgttagcgaaatctatcaatattacaaagaacacggctatgaaaccgtagtgatgggtgcgtccttccgcaacattggcgaaattctggaactggcgggttgtgaccgtctgaccatcgctcctgcactccttaaagaactggcggaatctgaaggcgcaattgagcgcaagctgagttacacaggtgaagttaaggcacgtccggcccgtatcactgaaagcgagttcctgtggcagcataaccaagatccgatggctgttgacaaactggcagagggtattcgcaaatttgctatcgaccaggaaaagctggaaaaaatgatcggcgacctcctgtaa

SEQ ID NO: 1984 - DNA, 1917 bp, Artificial Sequence
  Optimized genes for E. coli.
atgggcaaaatcattggcatagatctgggcactactaattcgtgcgtcgcgatcatggacggaaccacaccgcgtgtactagagaatgctgaaggcgaccgcactacgccaagtattatcgcatatacccaagatggtgagacgctggtcggtcaaccggctaaacgtcaggctgtaacgaatccgcagaacactctctttgctattaaacgtctgattgggcgccgtttccaggatgaagaagttcaacgtgacgtttctatcatgccattcaaaatcatcgctgcggataacggcgacgcgtgggtggaagtgaaaggccagaaaatggcgccgccgcagatcagcgcagaagtgctgaaaaaaatgaagaagactgccgaggattacctgggcgaacccgttactgaagcggttatcacggttccggcctacttcaatgatgctcagcgtcaggcaaccaaagatgcaggtcgtattgccggcctggaggttaaacgcatcattaacgaaccaaccgctgccgcgcttgcgtatggcttagacaaaggcaccggtaaccgcaccatcgcggtttacgacttgggtggtggcaccttcgatatttcgatcatcgaaatcgatgaggtagatggcgaaaagacctttgaagttctggctaccaatggcgatacacacctgggcggcgaggactttgactcccgtcttatcaactacctggtagaagagttcaaaaaagaccaaggcattgacctgcgtaacgacccgcttgctatgcagcgtctgaaagaagcagcagaaaaggctaaaatcgagctgtcttccgctcagcagactgatgttaacctgccttatatcaccgcagatgccactggtccgaagcatatgaacatcaaagtgacccgcgcaaagctggaatctttagtagaagacctcgttaaccgctccatcgagccgctgaaagtcgcgctgcaagacgcgggtctgagtgtctccgatattgacgacgttatcctggtgggcggccagacccgcatgccgatggtccagaaaaaagtggctgaattctttggtaaagaaccgcgcaaagatgtcaacccagacgaggctgtagcaattggtgcagcagtgcaaggcggtgtattgactggcgatgttaaggacgttctgctgcttgatgtgaccccgctgtccttgggtatcgaaactatgggaggtgttatgaccaccctgattgcgaagaacactaccattcctaccaaacactctcaagttttcagcaccgctgaagacaaccaatctgccgttactattcacgttctgcagggtgaacgtaaacgtgccgcggacaacaaatcactggggcaattcaacctggatggtattaacccggctccgcgtggtatgccgcagatcgaagtcaccttcgatattgatgcagacggtatcttacacgtgtccgctaaagacaaaaactctggtaaagaacagaaaatcaccatcaaagctagcagcgggctgaatgaggatgaaattcaaaaaatggttcgtgacgcagaagcgaatgcggaagcagatcgcaaatttgaagaactcgtacagacccgtaaccagggtgatcacctgctgcatagcacacggaaacaggttgaagaagcaggtgataaactgcctgcagacgacaagactgccattgaatcagcactgacggccctggaaaccgcgctgaaaggtgaagacaaagctgcgatcgaagcgaagatgcaggaactggcgcaggtatctcagaaactcatggaaatcgcccagcagcagcatgcccagcagcagacggccggtgctgacgctagcgcgaacaacgcaaaggacgatgatgtggtggatgcggaattcgaggaggtaaaggacaaaaaataa

SEQ ID NO: 1985 - DNA, 1152 bp, Artificial Sequence
  Optimized genes for E. coli.
atgttcgaacctatggaactgacaaatgacgctgttattaaggtcatcggtgttggaggtggtggcggtaacgccgtggagcacatggtgcgtgaacgtattgaaggcgtggaattttttgcagttaacaccgatgcacaggcgctgcgtaaaaccgcagttggccagaccattcagattggcagtggcatcactaaaggtctgggggcgggtgccaacccggaagttggtcgcaatgcggcagacgaagatcgtgatgcactgcgcgccgctctcgagggcgctgatatggtatttattgctgcgggcatgggtggcggcaccggcaccggcgcggcaccggttgtagcagaggtagcgaaagacttaggtatccttactgttgcggtcgtcaccaaacctttcaacttcgaaggtaaaaagcgtatggcgttcgcggaacagggcatcactgaattgtcaaaacatgtagactccttaatcactatcccgaacgataaactgctgaaggttctgggtcgtgggatttctctgctggatgcattcggtgccgctaacgacgtactcaaaggcgctgtacagggtatcgcggaacttatcactcgtccaggtctgatgaacgtggacttcgctgacgtgcgcaccgtcatgtccgaaatgggatacgccatgatgggtagcggcgtggcctcgggcgaagaccgtgctgaagaagcagctgagatggcgatcagctccccgctgctggaagatatcgacctgagcggcgcacgtggtgtgctggtgaacatcacggctggcttcgatctgcgtctggatgagttcgagacagttggtaacacgattcgcgcgtttgcctctgataacgcgaccgtagtaattggtacttctctggaccccgatatgaatgacgaactgcgtgtcaccgttgttgctacgggtatcgggatggataaacgtccggaaatcaccttggtgaccaataaacaagttcaacagccggttatggaccgctaccagcagcacggtatggctccgctgactcaagaacagaaaccagttgcaaaagttgttaacgataacgcaccgcaaaccgccaaagagccggactatctggacatcccggcgtttctgcgcaagcaggctgattaa

SEQ ID NO: 1986 - DNA, 2664 bp, Artificial Sequence
  Optimized genes for E. coli.
atgtctgaacgttttccaaacgatgttgacccaatcgagacccgcgactggctgcaggctattgaatccgttattcgtgaagaaggtgtggaacgcgcacagtatctgatcgaccagcttctggcagaggcccgcaaaggcggcgttaacgttgcagcgggcaccggtatctcaaactacattaataccatccctgtggaagaacaaccagaatacccgggtaacctggaactggaacgtcgtatccgtagcgccattcgctggaatgccatcatgaccgttttgcgtgctagcaagaaagatctggaactgggcggtcacatggcctcttttcagtcttccgcaacgatctacgacgtttgcttcaaccacttcttccgtgcgcgtaacgaacaggatggtggcgacctcgtttacttccaaggccacatttccccgggcgtgtacgctcgcgcgtttctggagggccgtttgacgcaggagcagctggataacttccgccaggaagtccatggtaacggcctctcctcatatccgcacccgaagctgatgccagaattctggcaattcccgactgtttcgatgggcctgggcccgatcggtgcgatttaccaggcaaaattcctgaaatatttagaacaccgtggtctgaaggacaccagcaaacagactgtatacgcttttctgggcgacggtgaaatggatgaaccggagagcaaaggtgcgattaccatcgctacccgtgaaaagctggacaatctggtgttcgtgatcaactgtaatctgcagcgtctggacgggccggttacgggcaacggcaaaattattaatgaactggagggtatcttcgaaggggcaggctggaacgtaatcaaagttatgtgggggagtagatgggacgagttgttacgtaaagatactagcggcaaactgattcagcttatgaacgaaactgttgatggtgactaccaaacttttaaaagcaaagatggcgcgtatgttcgtgaacacttctttggaaaatacccggagaccgccgcgctggtagcggattggaccgatgaacagatctgggccctgaatcgcggaggtcacgacccgaagaaaatttacgctgcatttaaaaaggcgcaagagaccaaagggaaagcgactgttatcctcgcccacactattaaaggctacggtatgggcgacgcggcagaaggtaaaaatattgcgcaccaggtcaaaaaaatgaacatggatggcgtgcgtcatattcgcgatcgtttcaacgtccccgtgtctgatgctgacatcgagaagctgccttacatcaccttcccggagggtagcgaagagcacacctacttacatgctcagcgtcagaaactgcacggctatttaccttcccgtcaaccgaacttcactgaaaagctggaactcccttccctgcaagacttcggtgccctactggaagaacagtctaaagaaatctctactaccatcgcgttcgtacgtgcgcttaacgtgatgctgaaaaacaaatctatcaaagaccgtctggtgccgatcattgccgatgaagctcgcaccttcggcatggaaggtcttttccgccaaatcggcatctactctccgaatggccagcagtataccccgcaagaccgcgaacaggtggcttattacaaggaagatgaaaaaggtcaaattctgcaagaaggcatcaatgaactcggtgcaggttgtagctggctggctgctgccacttcttactccacgaataaccttccgatgatcccgttctatatctactattcgatgtttggtttccagcgcatcggtgatctgtgctgggccgcaggcgaccagcaggctcgtggtttcttgattggcggtacaagtggtcgtacaaccctgaacggtgaaggcctgcagcacgaagatggtcactctcacattcagtccctgactatcccaaactgcattagctacgacccggcgtatgcttatgaagtcgctgtcatcatgcatgatggcctggaacgtatgtatggcgagaaacaggaaaacgtttattactatatcacgaccctgaacgaaaactatcatatgccggccatgccggagggtgcagaggagggtatccgcaagggtatatacaaactggagaccattgaaggatctaaaggcaaagttcagctgctgggttcaggttccatcctgcggcatgtccgtgaagcagcagaaattctggcaaaggactacggggtaggctctgatgtgtatagtgtaacctcttttactgaactggcacgtgatggtcaggactgcgaacgctggaacatgctgcatcccctggaaaccccgcgtgttccgtacattgcacaggtgatgaacgacgcgcctgctgttgcatcgacagattacatgaaactgttcgcggaacaggtccgcacgtacgttccggcggacgattaccgtgtattgggtaccgatggttttggtcgaagcgactcccgcgaaaacctgcgtcaccattttgaagtagatgcgagctacgtagttgttgcggctctgggcgagctggcaaaacgtggcgaaatcgataaaaaagtggttgctgacgcgatcgctaaatttaacatcgatgctgacaaagtaaacccacgcctggcataa

SEQ ID NO: 1987 - DNA, 1893 bp, Artificial Sequence
  Optimized genes for E. coli.
atggcgatcgaaataaaagtgcctgatattggtgcggatgaagtagaaatcaccgaaatcctggtgaaagtgggcgataaggtggaagcggagcaatccctgattacggtggaaggcgacaaagcgagcatggaagttccttctccgcaggcgggtatcgttaaagagattaaagtctctgttggtgacaaaacgcaaaccggtgcgctgattatgatcttcgattctgccgatggtgctgcagacgccgcaccggctcaggcagaagagaaaaaggaggcagcaccagctgccgctccggctgcggcggcagcgaaagacgttaacgttcccgacatcggttctgatgaagtggaagttaccgaaattctggttaaagttggtgacaaggtggaagccgaacagtctttaatcactgttgaaggcgataaggcttcaatggaagttccggcaccgtttgctgggactgtaaaagaaatcaaagtcaacgtaggtgataaagtttccactggttctctgattatggtatttgaagttgcaggcgaagctggcgcggcggctccggcagcgaaacaggaagcagccccggcggcggcacctgccccggctgcaggcgttaaagaagtcaatgttcctgatatcggcggagacgaagtcgaggtcaccgaagttatggtgaaagttggtgacaaagttgcagccgaacagtccctgatcaccgtagaaggtgacaaagctagtatggaggtaccggcaccgttcgcgggtgtggtgaaagagctcaaggtcaacgtaggagacaaagtcaagactggcagcctgatcatgatcttcgaagtggaaggcgcagcgccggcggctgctccggccaagcaagaggcggctgcaccggctccagcggccaaagcagaagcgcctgctgctgcaccggctgccaaagcggaaggcaaatcagaattcgctgagaatgacgcctatgttcacgctacgccgcttatccgtcgtttggctcgtgaattcggtgtgaacctggcaaaggtaaaaggtactggtcgcaaaggtcgtatcctgcgtgaggatgttcaagcgtacgttaaagaagcgatcaagcgcgcagaggccgcgcccgcagcgaccggcggtgggatcccgggcatgctgccatggccgaaagtagatttctccaaattcggtgaaattgaggaagtggaattaggtcgtattcagaaaattagcggcgccaacctgagtcgcaactgggtgatgattccgcacgttacgcattttgataaaaccgacatcaccgaactggaagctttccgcaagcagcagaacgaagaagcagccaaacgcaaacttgacgtgaaaatcaccccggttgtctttattatgaaagcagtagcggcagctctggaacagatgccgcgtttcaactcctctctgagcgaggacggccagcgtctgactctgaaaaaatacatcaatatcggcgtagccgttgataccccgaacgggctggttgttccggtgtttaaggacgtcaacaaaaaaggcattattgagctgtctcgtgaactgatgaccatttccaaaaaggctcgcgacggtaaactgaccgctggtgaaatgcagggtggttgcttcaccatcagctcgattggcggcttgggcactacacattttgctccgatcgtaaacgctccagaggtggcgatcctcggcgtttcgaaaagcgcaatggaaccagtttggaatggcaaagaattcgttccgcgtctgatgctgccaattagcctgtcctttgatcaccgtgtcatcgatggcgccgatggtgcgcgtttcatcactatcattaacaacacactgtctgacatccgccgtcttgtaatgtaa

SEQ ID NO: 1988 - DNA, 1425 bp, Artificial Sequence
  Optimized genes for E. coli.
atgtccacagaaatcaaaacccaggtcgtggtgctgggcgccggtccggcaggttactccgccgcctttcgttgcgctgatctgggtctggaaactgtaatcgtggaacgttacaacacactgggaggcgtctgtctgaacgtcggttgtatcccgtcgaaggcactgctgcatgttgctaaagtaatcgaagaagctaaggcgctggcggagcatggcattgttttcggtgaacccaaaaccgacatagataaaattcgtacctggaaagaaaaagttattaaccaacttaccggaggtctggcgggcatggcgaaaggtcgtaaagtaaaagttgttaacggcctgggtaaattcacgggcgcaaacactctggaagtagagggcgagaacggtaaaactgtaatcaatttcgataacgctattatcgcggctgggtctcgcccaattcagcttccgtttatcccgcacgaagatccgcgcatctgggacagcaccgacgccttagaactgaaagaagttccggaacgcctcctggtgatgggtggtggcattatcggcctggagatgggtaccgtatatcacgcactgggctctcagatcgacgtggttgaaatgtttgatcaagttattccggcagcagataaggatatcgtcaaagttttcaccaagcgtattagcaagaaattcaatctgatgctggaaacgaaagttaccgcggttgaggcaaaggaagacgggatctatgtaaccatggaaggcaaaaaagctcctgctgaaccgcagcgttacgacgcggtgctggttgctattggccgtgttccaaacggcaaaaatctggatgcgggtaaagccggtgtggaagttgatgatcgcggttttattcgcgttgacaaacagttgcgtactaacgttccgcacatcttcgcaatcggcgacattgtgggccagcctatgctcgctcataaaggtgtccatgagggtcacgtcgcagcggaagtgatcgctggtaagaagcactactttgacccaaaagttatcccgagtatcgcctatacggaaccggaagtggcgtgggtaggtctgaccgaaaaagaagcaaaagaaaaaggcatcagctacgagaccgccaccttcccgtgggcggcatctggtcgtgcgatcgcttccgactgcgcagacggcatgacgaaactgatcttcgacaaggagtcacaccgtgttattggtggcgctattgtgggcactaacggcggggaactcctgggcgaaatcggtcttgcaatcgaaatgggttgcgacgcggaagatattgccttgactatccatgctcacccaactctgcacgagtctgttggtctggcggctgaagtattcgagggcagcattactgatttaccgaatccgaaagcgaaaaaaaaataa

SEQ ID NO: 1989 - DNA, 663 bp, Artificial Sequence
  Optimized genes for E. coli.
atgaaggatatcgatactctgattagcaacaacgctctgtggtcgaaaatgttggttgaggaagatccgggttttttcgaaaaattagcacaggcgcaaaaaccgcgttttctgtggattggttgtagtgactcccgtgtaccggcggaacgtctgacgggactggaaccgggtgaactgttcgtacaccgcaacgtcgcgaatctggtgatccacaccgacctgaattgcctcagcgttgtacagtatgcagtggatgttctggaagttgagcacatcatcatctgcggccactatggttgcggcggtgtccaggctgccgtggaaaacccagagctgggcctgattaacaactggctgctccacattcgtgacatctggttcaaacattcatctctgctgggcgaaatgcctcaggaacgccgcctggacaccctgtgtgaattgaatgttatggaacaggtttacaacctgggtcacagcacaatcatgcagtctgcttggaaacgtggccaaaaagttaccatccacggctgggcatacggtattcacgacggccttcttcgcgatctggacgtgactgccaccaaccgtgaaactctggagcagcgttaccgtcatgggatctccaacctgaaactgaagcatgcgaaccataaataa

SEQ ID NO: 1990 - DNA, 726 bp, Artificial Sequence
  Optimized genes for E. coli.
atggcaactgtgtctatgcgcgatatgttaaaagcaggcgttcacttcggtcaccaaacgcgttactggaacccgaagatgaagccgttcatctttggggctcgtaacaaagttcacatcatcaatctcgagaagactgttccgatgttcaacgaagcgctggccgaacttaataagatcgcgagccgtaaaggtaaaatcctgttcgttggcacaaaacgtgccgcgagtgaagccgtcaaagacgctgcgctgtcctgcgaccagtttttcgtaaatcatcgctggctgggcggtatgctcactaactggaaaactgttcgtcagtcgattaaacgtcttaaagatctggaaacccagtcccaagacggtacgtttgataaactgaccaaaaaagaagcgctgatgcgcacccgcgaactggaaaaactggaaaactctctgggcggtatcaaagatatgggtggtctgccggatgcattgttcgtgatcgatgctgaccacgagcatattgcgatcaaagaggctaacaacctgggaattccagtcttcgctattgtagacaccaacagcgaccctgacggcgttgactttgttatcccgggtaacgatgacgcaattcgtgcggtgaccctgtatctgggcgcagtggctgctaccgtacgtgagggccgttctcaggatctggcctcacaggcagaagaaagcttcgttgaagcagaataa

SEQ ID NO: 1991 - DNA, 852 bp, Artificial Sequence
  Optimized genes for E. coli.
atggctgaaattacggcctctctggttaaagagttgcgtgaacgtacaggtgcgggtatgatggattgtaaaaaggcactcaccgaagcgaacggtgatatcgaactggctatcgagaacatgcgcaaatctggtgcgattaaggcagcgaaaaaagcaggtaatgttgcagcagatggggtaatcaaaactaagatcgatggcaactacggcatcattcttgaagtgaactgccagaccgacttcgttgccaaagacgcaggcttccaggctttcgcggacaaagttctggacgcggctgtagctggtaaaattacggacgttgaagtcctgaaagctcaatttgaagaagaacgtgtggcgctggtcgcgaaaatcggcgaaaacatcaatatccgccgtgttgcagctctggagggagacgtactgggttcttaccagcacggcgctcgtattggcgtgctggttgccgccaaaggcgcagatgaagagctggtgaaacatatcgccatgcacgtagcagccagtaaaccggaattcatcaagccggaagacgtcagcgcggaagtcgtggaaaaagaatatcaggttcagctggatattgcaatgcaatccggcaagcctaaagagattgcggaaaagatggttgagggccgcatgaaaaaattcaccggtgaagtttccctgaccggtcagccatttgttatggagccgtcgaaaactgtgggtcagttactgaaggaacacaacgcggaagtaactggttttatccgtttcgaagtgggcgaaggtatcgagaaagtagaaaccgattttgctgctgaagttgctgcgatgagcaaacaaagctaa

SEQ ID NO: 1992 - DNA, 1026 bp, Artificial Sequence
  Optimized genes for E. coli.
atgccgtctatccgcctggctgacttagcgcagcagctggatgcagaactgcatggtgatggtgatatcgtaatcacgggcgttgctagtatgcaatccgcccagacgggccacatcacctttatggttaatccgaaatatcgtgaacatctgggtctgtgtcaggcatcagctgttgttatgacgcaggacgacctgcctttcgctaaatccgcagcgctggtggtgaaaaacccgtaccttacctacgcgcgtatggctcagatcctcgataccactccgcagccggcgcagaatattgccccgagcgcagtaatcgacgccaccgctaaactgggaaataacgtttctattggcgctaacgcagtgattgaatccggcgtagaactgggtgataatgttatcatcggtgcgggttgtttcgttggtaaaaactctaaaattggcgcaggttctcgcctgtgggcaaacgtgactatttaccacgaaatccagatcggtcaaaactgcctgatccagtctggcaccgtagttggcgcagacggtttcggctatgcgaacgaccgtggtaactgggttaaaataccgcaaatcggacgtgtaatcatcggtgaccgtgtcgaaatcggtgcgtgtaccacaattgaccgcggcgcgcttgatgataccattatcggtaacggggtaatcatcgacaaccaatgccaaattgcacacaacgtggttatcggcgacaacaccgctgtcgccggtggtgttattatggccggctcgctcaaaatcggccgttactgcatgatcgggggcgctagcgtcatcaacggccacatggagatttgcgataaggttactgttactggtatgggtatggtaatgcgccctattaccgaaccaggcgtgtatagctctggcattccgctgcagccaaacaaggtgtggcgtaaaactgcggcgctggtgatgaatattgatgacatgagcaaacgtttgaagtccctggagcgtaaagtcaaccagcaggattaa

SEQ ID NO: 1993 - DNA, 816 bp, Artificial Sequence
  Optimized genes for E. coli.
atggcgtttaagttcaaaaccttcgctgcggttggtgcgctgatcggctctctggcactggtgggctgcggccaggacgaaaaagatcccaatcacattaaagtcggtgtaatcgtgggtgcggaacagcaagttgcagaagttgcacagaaagtcgcgaaagataaatatggcctggatgttgaactggttacattcaacgattatgtgctgccgaacgaggctctgtctaaaggcgatattgacgcaaacgcctttcaacataagccttacctggaccaacagctgaaagatcgtggttacaaattagtggccgttggtaacactttcgtttacccgattgcaggttacagcaaaaagattaaatcgctggacgaacttcaggatggcagccaggtggcagtccctaacgatccgacgaatctgggtcgttcactgctcctgttgcagaaggtaggccttatcaaattaaaagacggtgtgggcctgctgccgaccgttctcgacgttgtagaaaacccgaaaaatctgaagatcgtagaactggaagcgccacagttgccgcgctccctggacgacgcacaaatcgctctggccgtgatcaacaccacttacgctagtcagatcggactgactccggcgaaagacggtatctttgttgaggacaaagaatccccgtacgtgaacctgattgtcacccgtgaagataacaaagacgctgaaaacgtaaaaaagttcgttcaggcctatcagtctgatgaggtttatgaggctgcgaataaagtattcaacgggggtgctgttaaaggctggtaa

SEQ ID NO: 1994 - DNA, 474 bp, Artificial Sequence
  Optimized genes for E. coli.
atgggtcgtattagcagtggcggtatgatgtttaaggctattaccactgttgcagctctggttatcgccacttctgcgatggcgcaggacgatctgactatttcatctctggcgaaaggcgagaccactaaggccgcattcaatcaaatggtacaaggccacaaactgcctgcatgggtcatgaagggcggtacgtacaccccggctcagaccgtgaccttgggagatgaaacctatcaggttatgagcgcgtgtaaaccgcacgactgcggctctcagcgcatcgcggtgatgtggtcggaaaaatccaaccagatgacaggtctgtttagcaccatcgacgaaaaaacctctcaggaaaaattaacttggctgaacgtaaatgatgccctctccatcgatggcaaaaccgttctgttcgcagctctgacggggtcccttgagaaccatccagacggtttcaacttcaaataa

SEQ ID NO: 1995 - DNA, 333 bp, Artificial Sequence
  Optimized genes for E. coli.
atgtctttcttcatttctgacgcggtcgctgcaaccggtgccccggcacaaggcagcccgatgtctctgatcctgatgttagtggtcttcggtctgatcttctactttatgatcctgcgtcctcagcagaaacgcaccaaagaacacaaaaaactgatggattccattgcgaagggtgatgaagtgctcactaacggcggtctggtagggcgtgtaacaaaagttgctgaaaacggctatattgcgatcgccctgaatgacaccacggaggttgttatcaaacgtgactttgttgctgcggtgcttccgaagggcactatgaaagcattgtaa

SEQ ID NO: 1996 - DNA, 645 bp, Artificial Sequence
  Optimized genes for E. coli.
atgcgtattattttactgggcgctcccggtgccggtaaaggcacccaggcgcaattcatcatggagaaatatggcatcccgcagatctctacaggcgatatgctgcgtgctgcggttaaatctgggtctgaactgggtaagcaagcaaaggatatcatggacgcaggcaagctggtaaccgacgaactcgttatcgctctggttaaagaacgcatcgcgcaggaagactgccgtaacggttttctgctggatggtttcccgcgtacgattccgcaggccgatgctatgaaagaggctggtattaacgtcgattacgtgctggaattcgacgtgccggacgaattgatcgtggatcgtattgttggtcgtcgcgtgcacgccccatccggtcgcgtctaccacgtaaaatttaacccaccgaaggttgaaggcaaagacgatgtgacgggcgaagaacttactactcgtaaagacgatcaggaggaaaccgttcgcaaacgtctggtcgagtatcatcagatgaccgcgccgctgatcggctattacagcaaagaagcagaggcgggcaatactaaatacgcaaaagtagacggtaccaaacctgtagcggaagttcgtgcagacctggaaaaaatcctgggataa

SEQ ID NO: 1997 - DNA, 495 bp, Artificial Sequence
  Optimized genes for E. coli.
atggttactttccataccaatcatggtgatattgtaattaagaccttcgacgataaagcaccggaaaccgttaaaaacttcctggattactgtcgtgaaggtttttataataacactatctttcaccgcgtgatcaacgggttcatgatccagggcggcggtttcgagccgggtatgaaacagaaggccacaaaagaacctattaaaaacgaagcaaacaacggactgaagaacacccgcggtacgctggcaatggctcgtacccaggccccgcactctgcgactgctcaattcttcatcaatgtagtcgacaacgactttctgaacttctctggcgaatccctgcagggctggggctactgcgtgtttgctgaggttgttgatggtatggacgttgtcgacaaaattaaaggcgttgcgacgggtcgttctggtatgcaccaagatgtgccaaaagaagacgttatcatcgagtctgtaaccgtgagcgaataa

SEQ ID NO: 1998 - DNA, 954 bp, Artificial Sequence
  Optimized genes for E. coli.
atgcgtgcaaaactgctgggcatcgtgctcaccaccccgatcgcgatttctagctttgcctccactgaaaccctgagctttacaccggacaacattaacgcggacatcagtctgggcaccctgtctggcaaaacgaaggaacgtgtttatctggcggaagagggcggtcgtaaagtttcccagctggattggaaatttaacaacgctgcaattatcaaaggcgctattaactgggacctgatgccacagattagtatcggtgctgcaggttggactacccttggttcgcgtggtggtaacatggttgatcaggactggatggactcttccaacccaggcacttggacagatgagtctcgtcaccctgacactcagttaaactatgcgaatgaattcgatcttaacatcaaggggtggttgctgaacgaaccgaactaccgcctgggcctgatggcggggtaccaggaatctcgttactctttcactgctcgtggtggctcttatatttactcctcagaagaaggtttccgcgacgatatcggttccttcccgaacggtgagcgtgctatcggctataaacaacgtttcaaaatgccgtatatcggtctgaccggtagctatcgctatgaagatttcgagctgggtggcaccttcaaatacagcggatgggtcgaatctagcgacaacgacgaacattacgatccgggcaaacgtatcacgtatcgcagcaaagtaaaggaccaaaactattactccgtagccgttaacgcaggttactacgtgaccccgaatgccaaggtctacgtggaaggtgcttggaatcgcgttactaataaaaaaggcaacacctcactgtacgatcacaacaataatacctcggattacagcaaaaacggtgcaggcatcgaaaactacaactttattactaccgcgggcctgaaatacacgttctaa

SEQ ID NO: 1999 - DNA, 564 bp, Artificial Sequence
  Optimized genes for E. coli.
atgtcattaattaacactaagatcaaaccgtttaagaaccaagcgttcaaaaatggagaattcatcgaaatcaccgagaaagatacagagggtcgctggtccgtattttttttctacccagcagatttcaccttcgtctgtccgactgagctgggcgacgttgctgaccactacgaagagctgcagaaactgggtgttgacgtgtatgcggtctctacggatacccacttcacgcataaagcctggcactcgtccagtgaaaccatcgctaaaattaaatacgccatgattggcgatccgaccggggcactgacccgtaactttgataacatgcgtgaagacgaaggtttggctgaccgtgcgaccttcgtagttgacccgcagggcatcatccaggctatcgaagttactgcggaaggtattggccgcgacgcgagcgatctgctgcgtaaaattaaggcagcacagtatgttgctagccatccgggtgaagtgtgcccggcaaaatggaaagaaggcgaagcgactcttgccccttctctggatctggtgggtaaaatctaa

SEQ ID NO: 2000 - DNA, 210 bp, Artificial Sequence
  Optimized genes for E. coli.
atgtctaagattaagggtaacgttaaatggttcaacgaatccaaaggtttcggctttatcaccccggaagatggctctaaagacgttttcgtgcactttagcgccatccaaacgaacggtttcaaaaccctggctgaaggtcagcgtgtagaattcgagatcactaatggtgctaaaggcccgtctgcggcaaacgtcattgcactgtaa

SEQ ID NO: 2001 - DNA, 1218 bp, Artificial Sequence
  Optimized genes for E. coli.
atgagctctgtagacatcctggtaccggatctgccggaatctgtggcggacgccactgtggcgacctggcacaaaaaaccgggcgatgcggtagttcgcgatgaagtcctggttgaaattgaaaccgacaaagttgttctggaagttccggcaagcgccgatggtatcctggatgctgtactggaagacgaagggactaccgttacatctcgtcaaattcttggtcgtctccgtgaaggcaactcggctggtaaagaaacttccgccaagagcgaagaaaaagcttcgaccccagctcagcgccagcaggcttcactagaagagcaaaataacgacgctctgagcccagctatccgccgtctgttagcagaacataacctggacgcttccgctattaaaggcaccggtgttggcggtcgtttgacgcgcgaagatgtagagaaacacctcgctaaagcgccggccaaagagagcgcaccggcggcggcagcacctgcagctcagcctgcgctggcggcgcgtagtgaaaagcgtgtgccaatgacacgtttgcgtaagcgcgtggcggaacgtctgctggaggccaaaaactccactgccatgctgactacttttaacgaagttaacatgaaaccgatcatggatttacgtaaacagtacggtgaagcatttgaaaaacgccatggtattcgcttgggtttcatgtctttctacgtgaaggcagttgttgaggcgctgaaacgctatccggaagttaacgcaagcatcgacggtgatgatgttgtttaccataactacttcgacgttagtatggcagtgtctacccctcgtggcctggtgactccggtcctgcgtgacgtagacacgctgggtatggcggacatcgagaagaaaatcaaagaactggctgtcaaaggccgtgacggcaaactgaccgtcgaagatctgaccggtggcaactttaccatcaccaatggaggtgtgttcgggtccctgatgtctaccccgattatcaatccgccgcagtcagcaatcctgggcatgcacgcgatcaaagatcgccccatggctgtaaacggccaggtagaaattctgccaatgatgtatcttgccctctcttatgatcaccgtcttattgacggccgtgagtccgtcggtttcctggtgaccatcaaggaactgctggaggatccgacgcggctgctgctggacgtttaa

SEQ ID NO: 2002 - DNA, 1167 bp, Artificial Sequence
  Optimized genes for E. coli.
atgaatctccacgaatatcaggctaaacaactgttcgcacgctacggcctgccggcgccggttggttacgcgtgtaccacgcctcgtgaggctgaggaagcggcgtccaaaattggcgccggaccgtgggttgtaaaatgccaggtacacgcgggtggccgcggcaaggctggcggtgttaaagtcgttaacagtaaagaggatatccgtgcgtttgccgaaaattggttaggtaaacgtctggtgacctaccagaccgacgccaacggccagccggttaaccagatcctggttgaggctgccacggatatcgcaaaggaactgtatctgggtgcggtggttgaccgtagctctcgtcgtgtggttttcatggcctcaaccgagggcggtgtagaaatcgagaaagttgcagaagaaactccgcacctgatccataaagtagccctggacccgctaacaggtccaatgccgtatcagggtcgtgaattggcatttaaactgggcctggaaggcaaattggttcaacagttcactaagatctttatgggactcgcaaccatcttcctggaacgcgatctggcgctgatcgaaattaacccgctggtaatcactaaacagggggacctgatttgtctggacgggaaactgggtgcggacggtaacgctctgttccgtcagcctgacctgcgtgaaatgcgcgatcagagccaggaagatccacgtgaagcacaggctgctcaatgggaacttaactacgttgctcttgacggcaacatcggttgcatggtaaatggtgctggcctggctatgggtaccatggatattgtaaaactgcatggcggtgaaccggcgaactttttggatgtcggtggcggcgctaccaaagaacgcgtgactgaagcattcaaaatcatcttatcggacgataaagttaaggcggttctggtcaacattttcggtgggattgtccgctgcgacctgatcgccgacggtatcattggcgcagtagcggaagtgggcgttaatgttcccgtggttgtccgtctcgaaggtaacaacgcagagcttggcgccaagaaactggctgattccggtctgaacattattgcagcaaagggcctgaccgatgcggcgcaacaggtggtggctgcagtggaaggtaaataa

SEQ ID NO: 2003 - DNA, 522 bp, Artificial Sequence
  Optimized genes for E. coli.
atgcaattaaacaaggttctgaaaggcctgatgattgccctgccggtgatggctattgcagcgtgctctagcaacaaaaatgcctccaatgatggaagcgaaggcatgctgggtgcgggtaccggcatggatgccaacgggggtaacggtaacatgtcgagcgaagaacaggcgcgtctgcagatgcagcagctgcaacaaaataacatcgtatacttcgacctggacaaatatgacatccgctcagatttcgcgcagatgctggacgctcacgcgaactttttgcgttctaacccgagttataaagttactgtagaaggtcatgctgatgaacgtggcaccccggaatacaacatctcccttggtgaacgtcgcgcaaatgcagttaaaatgtatctccagggtaaaggcgtgtccgcggatcagatctctattgtctcttacggcaaagagaagccagcagttctgggtcacgacgaggctgcatacagcaaaaaccgccgtgctgtgctggtctactaa

SEQ ID NO: 2004 - DNA, 792 bp, Artificial Sequence
  Optimized genes for E. coli.
atgtcttccaactttcgtcatcaactgctgtctctgtccctgcttgtgggtatcgctgcgccgtgggccgcattcgcacaggctccaatctcaagcgtgggttcaggctccgttgaagaccgcgtcacccagttagagcgtatctctaacgcacactctcagctgttgactcagctgcagcagcagctgagtgacaatcaatccgacattgattctctgcgtggtcagatccaggaaaaccagtatcagctgaaccaagttgtggaacgccagaaacagatcctgctgcaaattgactctctcagctcggggggtgctgcagcgcagagcactagcggcgaccagtctggtgcagcggcgtcgaccactccgacggctgatgcaggtacggctaacgcgggagctccggttaaaagcggcaacgccaacacagattacaacgctgcgattgcgctcgtgcaggacaagagccgtcaggacgatgcaatggtcgcttttcagaacttcatcaagaactatcctgattctacctatctgccaaatgctaactactggctgggtcaactgaactataacaagggcaaaaaagatgatgcggcatactacttcgcttccgttgttaaaaattacccgaaaagtccgaaagccgccgatgcgatgttcaaagttggcgtaattatgcaagacaagggcgacaccgctaaagcaaaagcagtataccagcaagtaatctccaaatacccgggcaccgatggtgccaaacaggcgcagaaacgtcttaatgcgatgtaa

SEQ ID NO: 2005 - DNA, 753 bp, Artificial Sequence
  Optimized genes for E. coli.
atggctgtaaccaaactggttctggtgcgtcacggcgaaagccagtggaacaaggaaaaccgcttcaccggttggtatgatgtcgatctgtcagaaaaaggtgttagcgaagcgaaagcggcgggaaagctgttgaaagaagagggttattctttcgactttgcttacacttctgttctgaaacgtgctatccacacgctgtggaacgtgctggatgagctggaccaggcctggcttccggtagaaaaatcgtggaaactgaatgagcgtcattacggtgcactgcaaggtctcaataaagcagaaaccgccgaaaagtacggcgatgaacaagttaaacagtggcgtcgtggctttgctgtgaccccaccggagctgactaaggacgatgaacgctatccaggtcacgacccgcgctatgctaaactgtccgaaaaagaactcccgctgacggaatctctggcactgacaatcgatcgtgtgatcccgtactggaatgaaaccattctgccccgcatgaaaagcggcgaacgtgtaatcattgcggcccatggcaactccctgcgtgcgttagtcaaatacctggacaacatgtccgaagaagaaattttggagcttaacatcccgactggtgttcctctggtttacgagttcgacgaaaacttcaaaccgctgaaacgttactatctggggaacgctgacgagatcgcagcgaaggcagctgcagttgccaaccagggcaaagcgaaataa

SEQ ID NO: 2006 - DNA, 747 bp, Artificial Sequence
  Optimized genes for E. coli.
atgaaatcggtcctgaaagtgagcctggctgctctgaccctcgcttttgccgtaagctcccacgcggcggataaaaaactggttgttgcgaccgacaccgctttcgtcccgttcgaattcaagcagggcgataagtacgttggctttgacgtcgatctgtgggcagcaatcgctaaagagctgaaacttgactatgaactgaaaccaatggactttagtggcattattccggctctgcagacgaaaaatgttgacctggcactggcaggtattactatcacggatgaacgcaaaaaagcgatcgacttctccgatggctattataaatccggtctgctggttatggtgaaagccaacaacaacgatgttaaatcagtaaaagacctggatggtaaagttgtagccgttaagtctggtactggaagcgtggattatgcgaaggcaaacatcaagaccaaggatttgcgtcagtttccgaacatcgacaatgcttacatggaactgggtaccaaccgtgctgatgcggtattacatgacaccccgaatattctctacttcatcaagactgcgggcaacggccaattcaaagcggtgggcgactctctggaagcacagcaatacgggatcgcattccctaaaggttctgacgagctgcgcgataaagtgaacggcgccttgaaaacccttcgtgagaacggtacatacaacgaaatttacaaaaaatggttcggtactgaaccgaaataa

SEQ ID NO: 2007 - DNA, 504 bp, Artificial Sequence
  Optimized genes for E. coli.
atgtccactgccaagctggttaaatctaaagcaactaacctcctgtatacacgcaacgacgtttcagacagtgaaaaaaaagctaccgttgaactgctgaatcgccaggtcattcaattcatcgatctgtctctgattaccaagcaggcccattggaacatgcgcggcgctaacttcatcgcggtacacgaaatgctggatggcttccgtaccgctctgatcgaccatttagacactatggctgagcgtgccgtgcagcttggtggtgtagcactgggcaccactcaagtgattaatagcaaaacgccgctgaaatcttacccgctggatatccacaacgtgcaggatcacctgaaggaactggcagatcgttacgcgatcgttgcaaacgatgtccgtaaagcaatcggtgaagcgaaagacgacgacaccgcggatatcttgaccgcggctagccgtgacctggataaatttctgtggtttattgagtcgaacattgaataa

SEQ ID NO: 2008 - DNA, 516 bp, Artificial Sequence
  Optimized genes for E. coli.
atgaaaaaaattgcatgcctcagtgcgctggcggctgtgcttgcgttcacggcaggcacttctgtagctgccacctctaccgtcacgggaggttatgcccagtctgatgcacaaggccagatgaacaagatgggtggttttaacctgaaataccgctacgaggaagacaattccccgctgggcgttatcggtagcttcacctataccgaaaaatcacgcactgcgtcttccggtgactacaacaaaaaccagtactatggcattacagccggcccggcttatcgtattaacgattgggcttccatctacggtgtagttggcgttggctacggtaagttccagaccaccgagtaccctacctacaaacacgatactagcgactatggctttagctacggtgctgggctgcagttcaacccgatggaaaatgtcgcactggacttctcgtacgaacaatctcgtatccgtagcgtggatgttggtacttggatcgcgggtgtgggctatcgtttttaa

SEQ ID NO: 2009 - DNA, 225 bp, Artificial Sequence
  Optimized genes for E. coli.
atggaaaaaggcaccgtgaagtggtttaataacgccaaaggtttcggcttcatctgcccagaagggggtggtgaagatattttcgcgcattactctactatccagatggacggctatcgtaccctgaaagcgggccaaagcgtgcagtttgacgtccaccagggtccgaaaggtaaccacgcatccgttattgttccggtagaggttgaagctgctgtagcataa

SEQ ID NO: 2010 - DNA, 219 bp, Artificial Sequence
  Optimized genes for E. coli.
atggcaaaggaagacaatattgagatgcagggcaccgttctggaaacactgccgaacacgatgtttcgtgtggagctggaaaacggtcatgttgtaactgctcacatctctggcaaaatgcgtaaaaactacattcgtatcctgactggtgacaaagtcaccgtggaactgaccccgtatgatctgtccaaaggtcgcatcgttttccgtagccgctaa

SEQ ID NO: 2011 - DNA, 495 bp, Artificial Sequence
  Optimized genes for E. coli.
atggtcgactctaaaaaacgcccgggtaaggacctggaccgtattgatcgtaacatcctgaatgaactgcagaaagatggccgcatcagcaacgttgaactcagtaagcgtgtaggtctgtcaccgaccccttgcctggaacgcgtgcgtcgcctggaacgtcagggcttcatccagggttataccgccctcttgaacccacactacctggacgcttcccttctggtattcgttgagattaccctgaaccgtggggcgccggacgtatttgaacaattcaacacagcggtccaaaaactggaagagatccaggaatgtcatttggtgtccggcgattttgactacctgcttaaaactcgcgtgccggatatgtcggcataccgtaaactgctgggtgaaactctgctgcgtctgccgggcgttaacgatacgcgtacctatgttgtgatggaagaggttaaacagtctaatcgtttagttattaaaactcgttaa

SEQ ID NO: 2012 - DNA, 2283 bp, Artificial Sequence
  Optimized genes for E. coli.
atgtctgaactgaacgagaaactggccactgcgtgggaaggcttcacaaaaggtgactggcagaacgaggtaaatgttcgtgatttcattcagaagaattatactccgtacgaaggcgatgaatctttcctggccggtgcgacagaagcaaccacgactctgtgggacaaagtgatggaaggtgtgaagttggaaaaccgtacccatgcaccggttgatttcgacacggcggtagcttcgaccatcacttcccacgacgcgggctacatcaataaacagctcgaaaaaatcgtgggtctgcagaccgaagctccgcttaagcgtgcactaatcccgttcggcggtatcaaaatgatcgaaggtagttgtaaagcgtataatcgcgaactggacccaatgatcaaaaaaatctttaccgagtatcgtaagacccacaaccagggcgtgtttgacgtgtatactccggatattctgcgatgccgtaaaagcggtgtactgaccggcctgccggatgcgtacggacgcggccgcattattggcgactaccgtcgtgtagcactgtacggtattgactacctgatgaaagataagctggcgcagttcacgagccttcaagcggatctggaaaacggggttaacctggaacagacaatccgtctgcgtgaagaaattgctgagcaacatcgtgcccttggtcagatgaaagaaatggctgcaaaatacggatacgatatttccggtccggcaactaacgcccaagaagcgatccaatggacttatttcgggtatctggctgccgtgaaatcacagaacggtgcggcgatgtcctttggccgcactagcaccttcctcgacgtctacatcgaacgtgacctgaaggctggcaaaatcactgagcaagaagcacaggagatggtcgaccatctcgttatgaaacttcggatggtccgttttctgagaacgccggaatacgatgaactgttctccggcgacccgatctgggcgaccgaatctatcggcggcatgggtctggatgggcgcactttagtaaccaagaactctttccgttttcttaatacactgtacaccatgggcccttctccagagccgaacatgactattctgtggagcgaaaaactgcccctgaacttcaaaaaattcgccgccaaagtttcgatcgacaccagttccctgcagtacgagaacgacgatctgatgcgcccagacttcaacaatgacgattatgcaatcgcgtgttgcgttagcccgatgatcgtcggcaaacagatgcaattcttcggtgctcgcgcaaacctggccaaaaccatgctgtacgctatcaacggtggcgtcgacgaaaagttgaaaatgcaggtgggccctaagtccgagccgattaaaggcgatgtgctcaactacgacgaggtgatggaacgtatggatcacttcatggattggttagctaaacagtatatcaccgctttgaatataatccactatatgcatgataaatattcctatgaggcaagtctcatggcactgcacgatcgtgatgttattcgcaccatggcatgcggtattgctggtctgtcagtggccgctgattcgctgtctgctattaagtacgcaaaagttaaacctatccgtgacgaagacggtctggctattgactttgaaattgaaggtgaatatccccagttcggtaacaatgatccgcgtgtggacgatttagctgttgatttggtagaacgctttatgaaaaaaatccagaaactgcacacctaccgcgacgcaattccaacgcagtcagttctgacgattacctctaacgtagtttacggtaagaaaaccggcaacactccggacggtcgtcgtgcaggtgctccgttcggtcctggcgcaaacccaatgcacggccgtgatcaaaaaggcgcggttgcaagcctgaccagcgtcgccaaactgccgtttgcctacgctaaagacggtatcagctacaccttctctattgttccgaacgcgctgggcaaggacgatgaagttcgcaaaaccaacctggcgggtctgatggacggttattttcaccacgaagcgtccatcgaaggcggtcagcatctgaacgttaacgtaatgaaccgcgagatgctgctggatgcgatggagaacccggaaaaatacccgcaactgactatccgtgtatctgggtacgctgttcgttttaattctctgaccaaagaacagcagcaggatgttatcacgcgcacctttactcagagcatgtaa

SEQ ID NO: 2013 - DNA, 1674 bp, Artificial Sequence
  Optimized genes for E. coli.
atgaccgagagtttcgctcagctcttcgaagaatcactgaaggaaatcgaaacccgcccgggaagcattgtgcgtggcgttgtcgtggctatcgataaagatgttgttctcgtcgacgcgggcctgaaatcggaaagtgcaatcccggcagagcagttcaaaaatgcgcagggtgaactggaaattcaggtaggggacgaagtggatgttgctctggacgcggtcgaagatggcttcggcgagacgctgctgtctcgtgaaaaagccaagcgacacgaagcctggattaccctagagaaggcttacgaagacgcggaaactgttactggtgttatcaacggtaaggttaagggtggtttcactgtggaactgaatggcatacgtgcatttctgccgggtagcttagttgacgttcgcccggtgcgtgacactctgcacctggagggcaaagagcttgaatttaaagtaattaaactggatcaaaaacggaacaatgtcgtagtctctcgtcgcgcggttatcgaatctgagaactccgctgaacgcgatcagctgcttgaaaatctgcaagaaggtatggaggttaaaggcatcgtaaaaaacttaactgattatggtgcattcgttgacctgggtggcgttgacggcctgctgcacatcactgatatggcatggaaacgcgttaagcatccgtctgaaatcgtaaacgttggtgacgaaatcaccgttaaagttctgaaatttgaccgtgagcgtacccgtgtgtcactgggtctgaaacaactgggcgaagacccatgggttgctattgcaaaacgttatccagaaggtactaaactgaccgggcgtgtgacgaacctgacggattacggctgctttgttgaaattgaagagggcgtagaaggtctggttcacgtgtcggaaatggattggaccaacaagaacatccacccctctaaagtggtcaacgtgggcgatgttgtagaagtaatggtactggacatcgatgaagagcgtcgtcgtatttccctcggattgaaacaatgtaaagctaatccgtggcagcagtttgccgaaacacataataaaggcgatcgcgtagaaggcaaaattaaatccattaccgacttcggtattttcattggccttgacggcggtatcgacggtctggttcatctgtctgacatcagctggaacgtagccggtgaggaggcagttcgtgaatacaaaaaaggtgacgaaatcgctgcagtcgtgctgcaggtggatgcggaacgtgaacgtatcagcctgggcgttaaacagttggcggaagacccttttaacaactgggttgcccttaacaaaaaaggcgcgatcgtgacgggcaaagtgaccgcagtagacgccaaaggtgcgaccgttgagctggcagatggtgtagaaggttacttgcgcgcttccgaagcctcccgcgatcgcgtcgaagatgctacactggtgctgtctgtgggggatgaagtagaagctaaattcaccggtgtcgatcgtaaaaaccgcgcgatcagcctgtccgttcgtgctaaagacgaggctgatgaaaaagacgccattgcaaccgtcaacaagcaggaagatgcaaacttcagcaacaacgcgatggcggaggcgttcaaggcggctaagggtgaataa

SEQ ID NO: 2014 - DNA, 285 bp, Artificial Sequence
  Optimized genes for E. coli.
atgacgaaatctgagctgatcgagcgtctggctactcaacagtcccacatcccggctaagaccgtggaagacgcggttaaagagatgctcgaacacatggcctctactcttgcacagggcgaacgtatcgaaattcgtggcttcggttctttcagcctgcattaccgcgcacctcgtaccggccgcaatccgaaaaccggtgataaagtcgaactggaaggtaaatacgttccgcactttaagccaggtaaagaactgcgcgaccgtgcgaacatttatggttaa

SEQ ID NO: 2015 - DNA, 1191 bp, Artificial Sequence
  Optimized genes for E. coli.
atgttcgaaaacattacggcagctccggcggacccaatcctgggcctcgcagatctttttcgtgctgacgaacgtccgggcaagatcaacttagggattggtgtttacaaggatgagaccggtaaaactcctgtgctgacctctgtaaagaaagcagaacagtacttgctggaaaacgagaccaccaaaaactacctgggcatcgacggtatcccggaattcggccggtgcactcaggagctgttgttcgggaaaggcagcgcgctgattaacgacaaacgtgcacgtacggctcagacccctggtggaactggtgcgctgcgtgttgctgccgatttcctggcgaaaaacactagcgttaaacgtgtatgggtttctaacccatcctggcccaatcataagagcgttttcaactctgcgggtctggaagttcgtgaatatgcgtactatgacgcagaaaaccatacattagattttgacgccctaatcaatagtctgaatgaagcgcaagccggcgatgttgtcctctttcacggctgttgccacaacccaacgggtatcgatccgaccctggaacagtggcagaccctggcgcagctgtcagtcgaaaaaggctggcttccgttgtttgactttgcctatcagggtttcgcgcgtggtctggaggaagatgctgaaggcctgcgcgctttcgccgcaatgcacaaagaactcatcgtggcttccagctatagcaaaaatttcggtctgtacaacgaacgtgtgggcgcctgtactctggtggcggcagactcggaaactgtcgatcgcgcttttagtcagatgaaagccgctatccgtgcaaactactccaatccgccggctcacggcgcgtctgtggttgcaaccattctgtccaacgatgccctgcgtgctatctgggagcaggaactgacagacatgcgtcagcgcattcagcgcatgcgccaactgttcgttaacactcttcaggagaaaggcgcgaaccgtgacttctctttcattatcaaacaaaacggtatgttttcgttctcaggcctgaccaaagagcaagttctgcgcctgcgtgaagaattcggtgtatacgctgtggcgtccggtcgcgttaatgtagcaggtatgaccccggataacatggcaccgctgtgcgaagcaatcgtcgctgtactgtaa

SEQ ID NO: 2016 - DNA, 1089 bp, Artificial Sequence
  Optimized genes for E. coli.
atgatgaaacgtaacatcctggctgtaatcgttccagcactgctggttgcaggcactgccaacgcggctgagatctataataaagatggcaacaaagtggacctgtatggtaaggccgtcggcctgcactatttctctaagggtaacggcgaaaactcatatggcggcaacggtgacatgacctacgctcgtctcggtttcaaaggtgaaacccaaatcaatagtgacctgactggttacggtcagtgggaatacaacttccagggtaacaatagcgaaggtgctgatgcacagactggcaacaaaactcgtctggctttcgcgggacttaaatacgcggacgtcggcagcttcgactacggccgcaattacggggtcgtgtacgacgccttgggctataccgatatgctgccggaatttggcggcgatacagcatactcggatgatttttttgttggtcgtgttggtggtgttgcgacctaccgtaactctaacttcttcggccttgtggatggcttgaacttcgcggttcagtacctgggtaagaacgagcgcgacactgctcgccgttctaatggtgacggtgtgggcgggagcatttcctatgagtatgaaggattcggtattgttggggcgtatggtgctgcggaccgtactaacctgcaggaggctcagccgctgggcaatggcaaaaaagccgaacagtgggccaccggtctgaagtacgatgcaaacaacatctacctcgcagcaaactacggtgaaacccgcaacgcgacccctatcactaacaaattcacgaataccagcggttttgctaacaaaacgcaggatgtactgctggttgcacaataccaatttgattttggcctgcgtccgtctattgcgtacacgaaatctaaagccaaagacgttgaaggtattggtgacgtcgacctggtgaactacttcgaagtaggtgctacctattactttaataaaaacatgtccacatacgtagactatatcatcaaccagattgattccgacaacaaattaggcgttggctccgatgataccgtggcggtaggcatcgtttatcagttctaa

SEQ ID NO: 2017 - DNA, 168 bp, Artificial Sequence
  Optimized genes for E. coli.
atgaaacgtcagaagcgtgaccgtctggaacgtgcgcaccaacgcggttaccaggccggtatcgcaggtcgtagcaaagaaatgtgcccgtatcagaccctgaaccaacgctctcagtggctgggcggctggcgtgaggctatggcagatcgcgttgttatggcttaa

SEQ ID NO: 2018 - DNA, 1041 bp, Artificial Sequence
  Optimized genes for E. coli.
atgaaaaagacggcgatcgctatcgctgtggcgctggcgggttttgcgacggtggcacaggctgcgccgaaagacaatacatggtacaccggcgcgaaactgggttggagtcagtaccacgataccggcttcatcaataacaacggtccgactcatgaaaaccagctgggcgcgggtgcgtttggcggttaccaagttaacccatatgtcggctttgaaatgggttacgactggttaggccgtatgccatataaagggtccgttgaaaacggtgcttataaagcgcagggtgtacaacttactgcgaaactgggctatccgattacggacgaccttgatatctacacccgcctgggcggtatggtctggcgtgctgacactaagtccaacgtctacggtaaaaaccatgataccggcgtgtcgccggttttcgccggcggcgttgagtacgcaatcactccggaaatcgctacccgtttggaatatcagtggactaacaatattggagatgcccacactatcgggactcgcccggataatggcatgctgagcctcggtgtatcataccgcttcggtcagggtgaagcagccccggtagttgcaccggcccctgcaccggccccggaggttcagacaaaacacttcaccctcaaaagcgatgtactgttcaacttcaacaaagcaaccctgaaaccagaaggtcaggcagctctggatcagctgtattctcaactgtctaacctggaccccaaggacggttctgtcgtggttctgggttacaccgaccgcattggttccgatgcttataatcagggcctgtctgaacgtcgtgcgcagtccgtagtggattacctgatcagcaaaggaattccggccgacaaaatctctgctcgtggcatgggcgagagcaacccggtgaccggtaacacctgtgacaacgttaaacagcgtgcagcactgatcgattgcttggcacctgatcgtcgtgttgaaattgaagttaaaggcattaaggacgtggttacccaacctcaggcttaa

SEQ ID NO: 2019 - DNA, 375 bp, Artificial Sequence
  Optimized genes for E. coli.
atgaccatgtacgcgactttggaggaagcgattgacgcggcacgtgaagaattcctcgctgacaatccgggtattgacgcagaagatgcgaacgttcagcagtttaacgctcagaaatatgtactgcaggatggcgacatcatgtggcaggtggaatttttcgccgatgagggtgaagagggcgaatgcctgccgatgctgagcggtgaagctgctcagtctgtcttcgacggtgactacgacgaaatcgagatccgccaagaatggcaggaagaaaacacgcttcacgagtgggatgaaggtgaattccaactggagccgcctctggataccgaagaaggccgtgccgcagcagatgaatgggatgaacgttaa

SEQ ID NO: 2020 - DNA, 522 bp, Artificial Sequence
  Optimized genes for E. coli.
atgcagaaagtaaaactgccgctgaccttggacccggtgcgcaccgcccaaaaacgtcttgattaccagggtatttatacacccgatcaggtcgaacgtgttgctgagtctgttgttagcgtggattctgacgtagagtgttccatgagcttcgcaattgacaaccagcgtctggcagttctgaacggtgatgctaaagttaccgtgactttagaatgccagcgctgtggtaaaccgtttacccaccaggtttacacgacttattgcttttcccctgtacgttctgacgaacaagcggaagcgctgcctgaagcttacgaaccaatcgaagttaatgagttcggcgaaatcgacctgctggcgatggttgaagacgaaatcatcctggcgctcccggtcgttccagtccacgatagtgaacattgcgaagtgtcggaggcagatatggtattcggcgaactgccggaagaggcccagaaaccgaacccgttcgcagtgctggcttcactgaagcgtaagtaa

SEQ ID NO: 2021 - DNA, 174 bp, Artificial Sequence
  Optimized genes for E. coli.
atggcagttcagcaaaacaaaccgactcgttctaaacgcggcatgcgtcgttctcacgacgccctgaccgctgttacgtctctgagcgtcgacaagacctccggcgaaaaacacctgcgccaccatattaccgcggatggttattaccgtggtcgtaaagtgatcgcgaaataa

SEQ ID NO: 2022 - DNA, 954 bp, Artificial Sequence
  Optimized genes for E. coli.
atgtacacgaaaatcattggtactggtagctacctgccggagcaagtgcgtaccaacgctgacttggaaaaaatggtggacacgagcgatgaatggatcgtaacccgcactggcatccgcgagcgccacatcgcggcgccgaatgaaactgtatctaccatgggtttcgaagcggcaacacgtgcgattgaaatggctggcatcgaaaaagaccagattggcttaatcgttgtcgcgactacttctgcgacccacgccttcccgtctgcagcctgtcagatccagtcaatgctcggtattaaaggttgtcctgccttcgatgtagccgcggcatgcgctggattcacctatgccctgtctgtagcagaccaatacgtgaaatccggtgctgtaaaatatgctctggttgtagggtctgatgtccttgcgcgtacctgcgatccaaccgatcgcggtaccatcattatctttggtgacggtgcaggggcagcagtcctggcagcatccgaagaaccgggtattatctctacccatctgcatgcggatggctcgtacggtgaactgctgaccctgccaaacgccgatcgtgttaacccggaaaatagcatccacctgacgatggcgggcaacgaggtgttcaaagttgcggttaccgaactggcacacatcgttgacgaaactctcgctgcaaacaacctggaccgtagtcagctggactggcttgttccgcatcaggctaacctgcgtatcatttcggctactgctaagaaactgggtatgagcatggacaacgttgtcgtgacactggatcgtcacggcaatacctccgctgcgagcgttccctgcgctctggatgaagcggtgcgtgacggccgtattaagccgggccagctggtgctgttggaggctttcggcggcggctttacctggggttccgccctggttcgcttttaa

SEQ ID NO: 2023 - DNA, 930 bp, Artificial Sequence
  Optimized genes for E. coli.
atgactcagttcgcattcgtttttccaggtcaaggcagccaaacggtgggcatgctggctgatatggctgcgtcttacccgattgttgaagaaactttcgctgaagcctctgcagctttaggatatgatctctgggcactgacccaacagggcccagccgaagaactgaacaaaacttggcagacccagccggctctgctgacggcgtctgttgcgctctatcgtgtttggcagcagcaaggtggtaaagcgccggcaatgatggccggtcattcactgggtgagtattctgcgcttgtttgcgccggcgtgatcgacttcgcagatgccgtacgtctggtcgaaatgcgcggcaagtttatgcaggaagctgttccggaaggtactggtgctatggctgcaatcatcggcctggacgacgcatccatcgcgaaagcttgtgaagaggccgcggaaggtcaggtagttagcccggtaaacttcaacagtccgggccaggttgtgatcgcggggcacaaagaagcagttgaacgcgcgggtgccgcgtgtaaagcggcaggcgcgaagcgtgctcttccgctgcctgtctcggtgccgagccactgcgcactgatgaaacccgcggcagacaaattggccgtagagctggcgaaaatcacctttaacgctccgaccgttccggtcgtaaacaacgtggatgtaaaatgcgaaaccaatggtgatgcaattcgtgacgctctggtgcgtcagctgtacaatccggttcagtggaccaaaagcgttgaatacatggctgcgcagggcgtcgagcacctgtacgaagtgggtccaggcaaagttctgacaggtctgaccaagcgcattgtggacaccctgactgcctccgcactgaacgagccttccgcaatggctgctgcgttggaactgtaa

SEQ ID NO: 2024 - DNA, 735 bp, Artificial Sequence
  Optimized genes for E. coli.
atgaacttcgaaggtaagatcgctttagtcaccggcgcttcccgtgggattggccgtgcgatcgcggaaaccctggcagcccgcggtgcaaaagtcatcggtaccgcgacctctgaaaacggtgcgcaggctatcagcgattatctgggtgctaacggtaagggtcttatgctgaatgttactgacccagcgtccattgaatctgttctggaaaaaatccgcgccgagtttggcgaagtcgacatcctggttaacaacgcgggtatcacccgtgacaacctgctgatgcgtatgaaagacgaagagtggaatgatattatcgaaacgaacctgtcttccgtgtttcgtctgagcaaagctgtaatgcgtgctatgatgaaaaaacgtcacggccgcatcatcaccattggctcagttgttggtaccatgggtaacggtggccaggcgaattatgcagcagctaaagcgggcctgattggattctcgaaatctctggctcgtgaggtagccagccgcggcatcacagtgaacgtggtagcaccgggtttcattgaaactgatatgacgcgtgcattgagcgatgatcagcgcgcgggcatcctcgctcaggtaccggcagggcgtctgggcggcgcccaagagattgcaaacgcggttgccttcctggcaagtgacgaagccgcttacattactggtgaaactctgcatgttaatggtggcatgtacatggtgtaa

SEQ ID NO: 2025 - DNA, 237 bp, Artificial Sequence
  Optimized genes for E. coli.
atgtctaccattgaggagcgtgtcaagaaaatcatcggcgaacagctgggtgtaaaacaagaagaagtgacgaacaatgcatccttcgttgaagatctgggtgctgatagcctggacactgtggaactggttatggctctggaagaagagtttgacactgaaattccggacgaagaagccgagaaaatcaccaccgttcaggcagcgattgattacatcaacggccaccaggcgtaa

SEQ ID NO: 2026 - DNA, 1434 bp, Artificial Sequence
  Optimized genes for E. coli.
atgttcaagaatgctttcgcaaacctgcagaaagtgggcaaatcactgatgctccctgtaagcgttctgccgatcgcaggcatccttctgggtgtgggttctgcgaacttctcctggctgccagcagtagtatcgcatgtaatggctgaagcgggaggtagcgtatttgcgaacatgccgctgattttcgcaatcggcgttgcactgggtttcactaacaacgacggcgtgagcgcccttgcagccgtggtcgcttatggtatcatggtaaagacgatggctgtagttgccccgcttgttttacacctgccggccgaagaaatcgcttccaaacacctggccgatactggggttttgggcggcatcatttctggtgcaattgctgcttacatgtttaaccgtttctaccgtatcaagttgccagagtacctgggtttctttgcgggtaaacgtttcgttccaatcatatccggtctggcggcaatttttaccggtgtcgttctctctttcatttggccgccgattggttctgcgatccaaaccttctcccagtgggctgcgtaccagaaccccgttgtggcgtttggtatctacggctttatcgaacgctgcctggtcccgtttggcctgcatcacatttggaacgtccctttccagatgcagatcggtgaatacaccaatgcggcgggtcaggtcttccacggtgatatcccgcgttatatggctggcgatccgaccgctgggaaactgtcaggcggcttcctgtttaaaatgtacgggctgccggcagcggctatcgcaatctggcattcggctaaacctgagaaccgtgcaaaagtgggtggcatcatgattagcgcggcgctgaccagcttcttgactggtattacggagccgatcgaattcagtttcatgtttgttgctccgatcttatacatcatccacgccattctggcgggcctggccttcccgatttgtattctgctgggcatgcgtgacggcacctctttctcccacggcctcattgatttcatcgttctgagtggtaattcctctaaactgtggctgtttccgatcgttggtattggttatgccatcgtctactatactattttccgtgtgctgatcaaggctctggatctgaaaaccccgggtcgtgaagatgctacggaggacgcaaaagcaacaggcaccagcgaaatggcgccagcactggtagcagcatttggcggcaaggaaaacatcaccaatctggacgcgtgcatcactcgcctacgcgttagcgtggccgacgtttctaaagtggaccaggctggcctgaaaaaactgggagctgcgggtgttgttgtggccggttctggtgttcaagcgattttcggcactaaatctgataacctgaaaaccgaaatggacgaatatattcgcaaccattaa

SEQ ID NO: 2027 - DNA, 1251 bp, Artificial Sequence
  Optimized genes for E. coli.
atggagtcaaaagttgtagttccagctcagggtaaaaaaatcaccttgcaaaacggtaaactgaacgtgcctgaaaatcctattattccgtatattgaaggcgacggtattggtgttgatgtgaccccggctatgctcaaggttgtggacgccgctgtggagaaagcgtacaagggcgaacgtaaaatctcctggatggaaatttataccggggaaaagagtactcaggtctatggtcaggacgtttggctgcctgcagaaacgcttgatctgatccgtgaataccgtgtcgcaatcaaaggtccgctcaccactccggtcggcggcggcatccgtagcctgaacgtagcgctgcgccaggaactggacctttatatctgtctgcgcccggtgcgttactaccagggcaccccgtcgccggttaaacatccagaactgaccgacatggttatcttccgtgaaaactctgaagacatttacgctggaattgaatggaaggcggactctgcagacgcggaaaaggtaattaaattcctgcgcgaagaaatgggtgttaaaaaaattcgtttcccggaacattgcggcatcggcattaaaccgtgctctgaagaaggtacgaaacgtctggtacgtgccgccatcgagtacgctatcgcaaacgaccgtgattctgtaactctggtacacaagggtaacatcatgaaatttaccgaaggtgcgttcaaagattggggttatcagctggcgcgcgaggagttcggcggtgaactgatcgatggtggtccgtggctgaaagtgaagaacccgaacacgggcaaagaaatcgtgatcaaagatgtcattgctgacgcgtttttgcagcagatcctgctgcgtcccgcagaatacgatgttattgcgtgcatgaacctgaatggcgattatatctccgatgcgctggctgcacaagttggtggcatcggtattgctccaggcgctaatatcggggatgagtgcgcactgtttgaggctacccacggcacagccccgaaatacgcaggccaagataaagttaacccgggaagcataatcctgagcgcagaaatgatgttacgccacatgggttggaccgaggccgcggatctgatcgttaaaggtatggaaggcgcgatcaacgccaaaactgttacttacgacttcgaacgcttaatggacggcgcaaaactgctgaaatgttccgaatttggtgacgctattatcgagaatatgtaa

SEQ ID NO: 2028 - DNA, 414 bp, Artificial Sequence
  Optimized genes for E. coli.
atgtctgaggcgctgaagatcctgaacaacattcgtacgttacgcgctcaggcacgtgaatgcactctggaaactctggaagagatgcttgaaaaattggaagttgtcgtaaacgaacgtcgtgaagaagaatctgccgccgcggcagaagttgaagagcgtacccgcaaactgcaacagtatcgtgaaatgctgattgcggacggtatcgacccgaatgaactcctgaactctctggcagcagtgaaatccggtacaaaggctaaacgcgctcagcgtccagcgaaatactcttacgttgatgagaatggcgaaactaaaacctggaccggccagggtcgcaccccggcggtgatcaagaaagctatggatgagcagggcaaaagcctggatgacttcctgatcaaacaataa

SEQ ID NO: 2029 - DNA, 1632 bp, Artificial Sequence
  Optimized genes for E. coli.
atgactaatattaccaaacgcagcctggtggctgctggcgtactggcagcgttaatggcgggtaacgttgcgctggctgccgacgtgccggcgggcgtcactctggccgaaaaacagaccctggtccgtaataacgggagcgaagtccagtcccttgacccacacaaaattgaaggtgtcccggaatccaacatcagccgtgatctgtttgagggtctgctggtgtctgacctggacggtcatccggcaccgggagttgctgaaagctgggacaataaggatgctaaagtatggacttttcacctgcgtaaagacgcgaaatggagtgacggcaccccggtaactgctcaggacttcgtttactcctggcagcgtagcgtagatcctaatacagcatctccttatgcatcgtacctgcagtacggccacattgcaggtatcgatgaaatcttggagggtaaaaaaccgatcacggatctgggtgttaaagctattgatgatcataccctggaagtcaccctttccgaaccggttccgtatttctataaactgctggtacatccgtcaacaagccccgttccgaaagctgccatcgaaaaatttggcgagaaatggacccaaccgggtaatattgttacaaacggcgcgtacaccctgaaagactgggttgtaaacgagcgcatcgtgctggaacgttctccgacgtattggaacaatgcgaaaaccgtaatcaaccaagtcacctacctgccaatcgcttctgaggtgacggacgttaaccgttaccgttctggtgaaatcgatatgactaacaattctatgcctatcgaactgttccagaaactgaagaaagaaattccggacgaagttcatgttgacccgtatctatgcacctactactacgaaatcaacaaccagaagccgccattcaacgatgttcgcgtgcgtactgcactgaaattgggtatggaccgtgatatcatcgttaataaagtaaaagcgcaaggtaacatgcccgcgtacggctacactccgccgtacactgacggcgctaagctgacccagccggaatggttcggctggtctcaggagaaacgtaacgaagaggcgaagaaactgctggcagaagcaggctatactgctgataaaccgctgaccattaacctcctgtataacacctccgacttacacaaaaagctcgcaatcgcggcgtcgtccctctggaaaaagaacatcggggttaacgttaaactggtaaaccaggagtggaagacgtttctggatacccgccaccagggcacgttcgatgtggcccgcgctggttggtgtgccgattacaacgaaccaaccagcttccttaacacgatgctgtctaactcttctatgaacaccgcacactataaatccccggcattcgatagtattatggcagaaaccttgaaagttactgatgaagcgcagcgtactgccctgtataccaaggccgaacaacagctggacaaagattcagccattgttcctgtttattactacgtgaacgctcgcctggtgaaaccatgggtgggtggctacactggtaaagacccgctggacaatacctatacccgtaacatgtacatcgtgaagcactaa

SEQ ID NO: 2030 - DNA, 507 bp, Artificial Sequence
  Optimized genes for E. coli.
atgtctcagactgttcacttccaaggtaacccagtaaccgttgcaaattccatcccgcaggctggttccaaggctcagactttcacccttgttgcgaaggacctgagcgatgttaccctggggcagttcgcgggcaaacgcaaagtattgaatatcttcccgtctattgacactggtgtatgtgcggcaagtgttcgtaaatttaaccaactggctaccgagatcgataatactgtggttctgtgcatcagcgccgatctcccgttcgctcagtcgcgtttttgcggtgctgaaggcctgaacaacgtgatcaccctgagcacgtttcgtaacgcagaatttctgcaggcgtatggtgtcgcaatcgcggacggcccgctgaaaggcctggccgcacgcgcggtcgttgtaattgacgaaaacgacaacgtcattttctcacagttagtggatgaaattaccacagagcctgattacgaagccgccctggcagtgctgaaagcttaa

SEQ ID NO: 2031 - DNA, 138 bp, Artificial Sequence
  Optimized genes for E. coli.
atgaaatccaatcgtcaagctcgccacattctgggtctggatcataaaatcagcaaccagcgtaaaatcgtgactgaaggtgacaaatcttctgtagttaacaacccgaccggccgtaagcgcccggcggagaaataa

SEQ ID NO: 2032 - DNA, 342 bp, Artificial Sequence
  Optimized genes for E. coli.
atgaagatcaccctgtctaaacgtatcggtctgctggccattctgctgccgtgcgcgttagctctttctactactgtccatgctgaaaccaacaaactggtgattgaatccggtgattctgcacagtctcgtcagcacgcggcaatggagaaagaacagtggaatgacacgcgtaacctgcgtcagaaagtaaacaaacgtaccgaaaaagagtgggataaggcggacgccgctttcgacaatcgcgataaatgcgaacaaagcgcgaacatcaacgcatactgggaaccgaacacactgcgttgtttggaccgccgtactggccgcgttatcaccccataa

SEQ ID NO: 2033 - DNA, 1533 bp, Artificial Sequence
  Optimized genes for E. coli.
atgcgtatcggcattccgcgcgagcgcctgacaaacgaaacccgtgtcgctgctacccccaaaaccgtcgagcaactgctcaaacttggcttcactgtggcagttgaatcaggtgctggccagctggcttcttttgatgataaagcctttgtgcaagcaggtgccgagattgttgaaggcaattctgtttggcaatccgaaatcattctgaaagtaaatgcaccgcttgatgacgaaatcgcgctgctgaacccgggcaccaccctcgtttcgtttatctggcctgctcagaacccagagctgatgcagaaactggcagaacgtaatgtcactgttatggccatggattccgttccacgtatttctcgcgcccagagtctggacgcgctgagctctatggctaacattgcgggttatcgtgcgatcgtagaagccgcacacgaattcggtcgtttcttcacaggtcagatcactgctgccggtaaagtccctccggctaaagtgatggttattggcgcaggtgtggctggcttggcggctattggcgcagcaaactctctgggtgctatcgtgcgcgcattcgacactcgtccggaagtgaaagaacaggtacaatccatgggcgccgaattcctggaattagattttaaagaggaagcaggttctggtgatggctatgcgaaagtaatgtccgacgcttttatcaaggcggaaatggaactgtttgcggcgcaggctaaggaagttgatatcattgtaacgaccgcactgatcccggggaagccggcgccgaaactgatcacccgtgaaatggtggactccatgaaagctggatctgtaattgtagatctggcagctcagaatggtggaaactgtgagtatactgtcccgggcgaaatcttcactaccgagaacggcgttaaggttatcggttacactgaccttccaggccgtctaccaacccagtctagccagctgtacggcacgaacctggtaaacctgttgaaactgctgtgcaaagagaaagacggtaacatcaccgttgacttcgatgacgttgttatccgtggtgttaccgtcatccgcgccggtgaaataacttggccggctccgccgatccaagttagcgcgcagccgcaggctgcgcagaaggcagcaccggaagtgaagactgaagaaaaatgtacctgcagcccgtggcgcaaatacgccctgatggcgctcgccattattctgttcggttggatggcttccgtggcaccgaaagaattcctgggccacttcaccgtgttcgcgctggcgtgcgttgttggttactacgtggtgtggaacgtaagccacgctctgcatacgcctctgatgtcggttaccaacgcgatctcaggcatcattgttgtaggtgcgctgttacagatcggtcagggggggtgggtcagtttcttgagctttatcgcggttctgattgcaagcattaacatcttcggcggttttaccgttacgcagcgtatgctgaaaatgttccgtaaaaactaa

SEQ ID NO: 2034 - DNA, 468 bp, Artificial Sequence
  Optimized genes for E. coli.
atgattaaacgcgtgctcgtagttagcatggttggtctgagcctggttggttgcgtcaataacgacaccctgtcaggtgatgtatacaccgcgagtgaagctaaacaggtgcaaaacgtttcttatggtactatcgttaacgtccgtccggtgcagatccagggtggtgatgactccaacgttatcggcgctattggaggcgccgttctgggcggtttccttggcaacactgtgggcggcggcacaggtcgttctttggctaccgcagcgggggcggttgcaggcggtgttgccggccagggcgtacaatctgcaatgaacaaaacgcaaggtgttgaactggagatccgtaaggatgacggcaacaccattatggtagtccagaaacagggtaatactcgcttttcgccggggcagcgtgtggtgctggcgagcaatggttcccaggtaaccgtctccccacgttaa

SEQ ID NO: 2035 - DNA, 582 bp, Artificial Sequence
  Optimized genes for E. coli.
atgtccttcgagctgccggcacttccgtatgctaaagacgcgctggctcctcacatcagcgctgaaaccattgaataccactacggtaaacatcatcaaacttacgttacgaacttaaacaatctcatcaaaggtacggcatttgaaggtaaatcgttggaagaaatcattcgtagctccgaaggtggcgtgttcaacaatgcagcgcaggtttggaaccataccttctattggaactgcctggccccgaacgcgggcggtgaaccgactgggaaagtcgccgaggcgatcgctgcgagctttggttctttcgcagatttcaaagcacagttcaccgacgcagctatcaagaacttcggatcaggctggacttggctggtaaagaattccgatggtaaactggcaattgtttctacctctaatgccggcaccccgctgacaaccgatgccaccccgctgctgactgttgacgtttgggaacacgcttattacatcgactaccgcaacgctcgtccaggctacctggagcacttttgggcgctggtaaactgggaatttgtggctaaaaacctggcggcgtaa

SEQ ID NO: 2036 - DNA, 237 bp, Artificial Sequence
  Optimized genes for E. coli.
atgaaagcaaccaaactggttcttggcgccgtcatcctgggtagcacgctgctcgccggttgctccagtaacgcgaaaattgatcagctgtcttctgacgttcagactctgaatgcgaaagtggaccagctgtcaaacgacgttaatgcaatgcgtagcgacgtacaggctgcgaaggatgatgcagcgcgtgctaaccaacgtttggataacatggctaccaagtaccgcaaataa

SEQ ID NO: 2037 - DNA, 300 bp, Artificial Sequence
  Optimized genes for E. coli.
atggccttgacgaaagcggagatgtctgaatacctgttcgataaactgggcctgtctaaacgtgatgctaaagaattagttgaactgttcttcgaagaaatccgccgtgcgctggagaacggtgaacaggtcaagcttagcggttttggtaattttgatctgcgtgacaaaaaccagcgcccgggtcgtaacccgaaaaccggcgaagacattccgatcaccgctcgtcgtgtagttactttccgcccaggccaaaaactgaagtctcgtgtggaaaacgcatcccctaaagacgagtaa

SEQ ID NO: 2038 - DNA, 2388 bp, Artificial Sequence
  Optimized genes for E. coli.
atgaaattctccgaactgtggctgcgcgaatgggtgaatccagcgattgatagtgatgcactggcaaaccaaatcaccatggcaggcctggaagttgatggtgttgagccggtcgccggctcctttcacggtgtggttgtcggcgaagttgtggaatgtgcccagcacccgaacgccgacaaactcagagtaaccaaagttaatgttggcggtgaccgtctgttggacatcgtatgcggcgctccgaactgccgccagggtctgcgcgttgctgttgcgacaatcggcgcggtactgccgggtgattttaaaattaaggcagcgaaactgcgtggtgaaccgagcgaaggcatgctgtgcagcttctcggaactgggcatcagcgatgaccattctggcatcattgaattgccggcggacgcacctattggcaccgatattcgtgaatacctgaaactggatgacaacactatcgaaattagcgttacgccaaatcgcgccgactgtctgggcataattggtgtagcacgagacgttgcagtgttgaatcagctgccgctcgtacagccggaaatcgtcccagtcggagctactatcgacgataccttaccgatcaccgtggaagcaccggaagcatgtccacgctatctgggccgtgtagttaaaggtatcaacgtaaaggcgcctactccgctttggatgaaagagaaactgcgtcgctgcggtatccgctctatcgacgcagttgtggacgtaaccaactatgtgcttttggaactgggacaaccgatgcacgccttcgataaagatcgtatcgaaggtggcattgtggttcggatggctaaagaaggcgagactttggttctgctggacggtaccgaagcaaaactcaatgcggataccctcgttattgccgatcataataaagcattggctatgggcggtattttcggcggcgaacactcgggggttaacgatgaaacgcaaaacgtactgctcgaatgtgccttcttttctcccctttcaatcaccggtcgcgctcgtcgccacggtctccacactgatgccagccaccgctatgagcgtggtgtggaccctgctctgcagcacaaggcgatggagcgtgcgactcgcctgctgatcgatatctgcggtggtgaggcagggccggtcatcgacatcacgaacgaggcaacactgccgaaacgtgccaccattacactgcgccgtagtaaactggatcgtctgatcgggcatcatattgcggatgagcaggttactgacattctgcgtcgcttaggttgcgaagtcaccgaggggaaagacgagtggcaggctgttgccccgtcctggcgttttgatatggaaatcgaggaagacctggttgaggaagttgcgcgtgtatacggctataacaatatcccagacgaaccggtacaggcatctctgatcatgggtacccatcgtgaggcggatctgtctcttaagcgtgttaaaactttactgaacgacaaaggttaccaggaagttattacgtactcctttgttgacccgaaagttcagcagatgatccatcccggcgtcgaggcgctgctgctgccgtccccgatttctgtcgagatgtctgcgatgcgcctgtccctgtggaccggtctgctggccactgtggtgtacaaccaaaaccgtcagcaaaaccgcgtacgtattttcgaaagcggtctgcgtttcgttccggacacgcaggctccgctgggaatccgtcaggatctgatgctggcgggcgtgatctgcggcaaccgttacgaagaacactggaacctggctaaagaaaccgttgacttttacgacctgaaaggcgatctggaatctgtactggacctgaccggtaagttaaacgaagttgaattccgtgctgaggcaaaccctgcgctgcacccgggccagtcggctgcaatttaccttaagggtgagcgtattggttttgttggcgtggtgcacccggaactggaacgtaaactggatctgaacggtcgtaccctagttttcgaactggaatggaacaaactggccgatcgtgtcgtgcctcaggcacgcgaaatttctcgtttcccagcgaaccgtcgcgacatcgctgttgtggtagcggaaaacgtcccggctgctgacatcctgagcgaatgtaagaaagttggcgtgaaccaggtggttggtgtcaatctgttcgacgtgtaccgtggcaaaggtgttgcggaaggttataagtccctggctatcagccttatccttcaggatacttcacgcaccctggaagaagaagaaatcgcggctactgtagctaaatgcgtagaagctctgaaagaacgtttccaagcttctctgcgtgattaa

SEQ ID NO: 2039 - DNA, 357 bp, Artificial Sequence
  Optimized genes for E. coli.
atggcccgtgtcaaacgtggcgtaatcgcccgcgctcgccacaaaaaaattctgaaacaagctaaaggttattacggcgcgcgtagccgtgtgtatcgtgttgcattccaagcggttattaaggccggtcagtacgcataccgcgatcgtcgtcagcgtaaacgccagtttcgtcagctgtggatcgcacgcatcaatgctgccgcgcgtcagaacggcatttcttactctaagttcatcaacggtctgaaaaaagcttccgtggagattgatcgtaaaatcctggcggacatcgctgttttcgacaaggttgcatttaccgctctggtagaaaaagcaaaagcggcgctggcataa

SEQ ID NO: 2040 - DNA, 198 bp, Artificial Sequence
  Optimized genes for E. coli.
atgccgaaaatcaaaactgttcgtggcgccgctaaacgcttcaaaaaaaccggtaaaggtggttttaaacacaaacacgcgaacctgcgccatatcctgacgaagaaagcgaccaagcgtaagcgtcacctgcgtccgaaagcaatggtgtctaaaggcgacctgggcctggtaattgcatgcctgccatacgcttaa

SEQ ID NO: 2041 - DNA, 1929 bp, Artificial Sequence
  Optimized genes for E. coli.
atgccagtcattactttgccggacgggagccagcgtcactacgaccacgccgtgtcccctatggacgtagccctggacatcggcccgggtctggcgaaggcttgtatcgcgggacgtgtgaacggtgaacttgttgacgcttgtgatctcatcgagaacgacgcacagctgagcattattacagcgaaagatgaagaaggcctggaaatcatccgccacagctgcgcacatctgctgggtcacgcgattaaacagttatggccgcataccaagatggcgattggtccggttattgacaatggcttttactacgatgtggatctggaccgcaccctgacacaagaagacgttgaggcactggaaaaacgcatgcacgaactggcggaaaaaaactacgacgttatcaaaaaaaaagtttcttggcacgaggctcgtgaaacttttgcgaaccgcggtgagagctacaaagtatccatcctggacgagaacattgcacatgatgacaaaccgggcttatattttcacgaagagtacgtagatatgtgccgcggcccgcacgttccgaacatgcgtttctgccaccacttcaagctgatgaaaaccgcaggtgcttattggcgcggtgactctaataacaaaatgctgcaacgcatctacggtactgcatgggctgacaaaaaagccttaaatgcgtatctgcaacgtctggaagaagcggctaaacgtgaccatcgcaaaatcggtaaacagctggatctatatcacatgcaggaagaagcaccgggcatggtattctggcataacgatggttggaccatctttcgcgaactcgaagttttcgttcgttctaagctgaaagaatatcagtaccaggaagttaaagggccgttcatgatggatcgagttctgtgggaaaaaaccggccactgggataactacaaagatgctatgtttactacctcctctgaaaatcgtgagtactgcatcaaaccgatgaactgtcctggtcatgtccagattttcaaccagggcctgaagagttatcgcgatctcccgctgcgtatggccgaattcggctcttgtcatcgtaatgagccgtcaggttcgttgcacggtttgatgcgtgtacgtggatttactcaagacgacgcgcacattttctgcaccgaagaacagatccgcgatgaggtcaacggctgcatccgcctggtgtacgatatgtactctactttcggtttcgagaaaatagtggttaagctgtctacccgcccggaaaaaagaattggttctgatgaaatgtgggatcgtgcggaagctgatcttgcagtggctctggaagaaaacaacatccccttcgagtatcaacttggcgaaggcgcgttctatggcccaaaaattgaattcacgctctacgactgccttgatcgggcctggcagtgcggtactgtccaactggatttctccctgccatcgcgtctgtccgctagctacgtcggtgaggacaacgaacgtaaagtaccggtgatgattcaccgcgcaatcctgggctctatggaacgtttcatcggcattctgacggaagaattcgctggcttttttcctacctggctggccccggtgcaggttgtcatcatgaatatcacggatagtcagtccgagtatgttaacgagctgacccagaaactgagcaacgctggtattcgtgtgaaagccgacctgcgtaacgaaaagatcggctttaagatccgcgaacataccctgcgtcgtgttccatacatgttggtttgtggtgacaaggaagttgaatcaggtaaagttgcagtacgtacccgtcgtggcaaagacctggggtccatggatgtgaacgaggtaatcgaaaaactgcagcaggaaatccgttctcgtagcctgaaacagctggaagaataa

SEQ ID NO: 2042 - DNA, 1344 bp, Artificial Sequence
  Optimized genes for E. coli.
atggatcaaacttattcgctggaatcctttctgaaccacgtacagaaacgcgatccgaaccagacggaatttgcgcaggctgtgcgcgaagtgatgacaaccctgtggccattcctggaacagaatccaaagtaccgtcagatgtctctcctggagcgtctggtggagcctgaacgggtgatccagttccgcgtcgtttgggtagacgaccgcaaccagatccaggtcaaccgtgcatggcgcgttcagttttcaagtgccatcggtccgtacaaaggcggcatgcgctttcacccgagtgttaacttatccattctgaagttcctgggctttgaacagactttcaaaaacgctctcaccactttgccgatgggcggtggcaaaggtggtagcgatttcgaccctaagggcaaatctgagggcgaagttatgcgtttctgtcaggctctgatgactgagctttaccgtcatctgggtgctgatactgacgtgccggcaggcgatattggcgtaggtggccgtgaggtaggttttatggcaggtatgatgaaaaaactgtctaacaatactgcttgtgtgtttactggcaaaggtctcagcttcggtggctcactgatccgtccggaagcgaccggttacggcctggtttacttcacggaagccatgctgaaacgtcacggtatgggtttcgaggggatgcgtgttagcgtaagcggctccggcaacgtagcacagtacgcaattgaaaaagcaatggaattcggcgcgcgtgttatcaccgcgtctgactcctccgggaccgttgttgatgaaagcggtttcacgaaagagaaactggcccgtcttatcgaaattaaagcatcgcgtgatggtcgtgtggcagactatgctaaagaattcggtctggtatatctggagggacagcaaccgtggtctctgccagtcgatattgcactgccgtgcgctacacagaacgaattagacgtcgacgcagcgcatcaactgatcgctaacggtgttaaggctgtagctgaaggcgcgaatatgccgaccaccatcgaagccaccgaactgttccaacaagccggcgttcttttcgctcccggcaaagccgcgaacgccggtggcgtggcgacctctggcctggaaatggctcagaatgcggcacgtttggggtggaaagctgaaaaggtggacgcacgcctgcatcacattatgctggatatccaccatgcgtgcgttgaacacggtggtgaaggtgaacaaaccaactatgttcagggtgcgaacatcgcgggttttgttaaagtcgcggacgccatgctggcgcagggagttatctaa

SEQ ID NO: 2043 - DNA, 996 bp, Artificial Sequence
  Optimized genes for E. coli.
atgactatcaaagttggcattaacggtttcggccgtattggtcgcatcgttttccgtgctgctcagaaacgttcggatatcgaaattgtggcgatcaacgacctgcttgacgcggactacatggcttacatgctgaagtacgacagtacacacggccgcttcgatggcactgtggaagttaaagatggccacctgattgtaaatggcaaaaaaatccgtgtgactgcagaacgtgacccagccaacctgaaatgggatgaagtgggagttgatgttgtcgcagaggcaaccggtctgttcctgacggatgaaactgctcgcaagcacatcacggccggtgcaaaaaaggtggtgatgacaggtccgtctaaagacaacaccccgatgttcgtcaaaggcgccaactttgataaatacgcgggccaggacatcgtatcaaatgcgtcctgcactactaactgtctggcgccgcttgcaaaagtaattaacgacaattttggtattatcgagggcctgatgacgaccgtacacgcaaccactgccacccagaaaaccgttgatggcccgtctcataaggattggcgtggtggtcgtggcgccagccagaacatcatcccatcctctacgggggctgctaaggcggtaggtaaagttttaccggaactgaacggcaaactgactggtatggcattccgcgtccctaccccgaacgtgtctgttgtggatttgaccgtacgtctcgaaaaagcagctacctatgagcaaatcaaagctgcagttaaagccgctgcggaaggtgaaatgaaaggtgtgctgggttataccgaagacgacgttgtatctaccgactttaatggtgaagtctgcacctccgtctttgacgctaaagcggggatcgcgctgaacgataatttcgttaaactggttagctggtacgacaacgagaccggctatagcaacaaagttctggatctcattgcgcatattagcaagtaa

SEQ ID NO: 2044 - DNA, 801 bp, Artificial Sequence
  Optimized genes for E. coli.
atggagatcaccactctgcagatcgtcctggttttcatagtcgcctgcattgcaggtatgggcagtatcctggatgaatttcaatttcaccgtccgctgatcgcgtgtaccctggtggggattgttctgggcgacatgaagaccggtatcatcattggtggtactctggaaatgattgcgctgggttggatgaacatcggagcggcagtggctccggacgcagcgctggcttctattatcagcaccatcctggtaattgctggtcaccagtcgatcggtgcaggtatcgcactggcgattccattagcggcggccggccaggttctcacgatcatcgtgcgcactattaccgtagctttccagcacgccgctgataaagccgcagataacggcaacctgaccgcaatcagctggatccatgtctcatctcttttcctgcaggctatgcgtgtagcgattccggcagtgatcgtcgccctgtccgtgggtaccagcgaggttcagaacatgttgaatgccatccctgaagttgttaccaatggcctgaacatcgctgggggcatgattgtggttgttggctatgctatggtaattaacatgatgcgtgctggctatttgatgccgtttttctacctcggtttcgttactgcggcgttcacgaactttaacctggttgcactgggtgtaatcggcacagttatggcagtgctgtacattcagctgtccccgaaatacaaccgcgtagctggtgcgccggcccaagctgcgggcaataatgatcttgacaacgaactggactaa

SEQ ID NO: 2045 - DNA, 210 bp, Artificial Sequence
  Optimized genes for E. coli.
atggcaaaaatcaaaggccaagttaagtggttcaatgagagcaaagggtttggtttcatcaccccggctgacggttccaaagacgtattcgtccacttctctgcaattcagggcaacggctttaagactctggctgaaggtcagaacgttgaattcgaaattcaggatggtcagaaaggcccggcggccgtgaacgttaccgcgatctaa

SEQ ID NO: 2046 - DNA, 144 bp, Artificial Sequence
  Optimized genes for E. coli.
atgtgcggtattttctcgaaagaagtgctgagtaaacacgtagacgttgagtaccgttttagcgcagaaccgtatatcggcgcttcttgtagcaacgtctccgttctgtccatgctgtgcctgcgcgcgaaaaagaccatctaa

SEQ ID NO: 2047 - DNA, 801 bp, Artificial Sequence
  Optimized genes for E. coli.
atgaagttagcccatctgggccgtcaggcgctgatgggtgtaatggcagtcgcactggttgcaggaatgtccgtgaaatcctttgcggatgaaggtttactgaacaaagttaaagaacgtggcacgctgctggttggcctggaaggcacatacccgcctttcagcttccaaggcgatgacggtaaactgaccggtttcgaagtagagtttgctcagcagctggctaagcacctgggcgtagaggcttctctgaagccgaccaaatgggacggtatgttggcaagccttgactccaaacgcattgacgtggttatcaaccaggttactatttctgatgaacgtaaaaaaaaatatgacttctcgacgccatacaccatcagcggcatccaggccctggtgaaaaaaggcaacgagggcactatcaaaaccgctgatgacctgaaggggaaaaaagtaggtgtaggtttggggactaattatgaagaatggctgcgccagaatgttcaaggcgttgatgtgcgcacttacgacgatgatccgaccaaataccaagatctgcgtgtcggtcgcatcgacgctattctcgttgatcgtctggcggcactggaccttgtgaagaaaaccaacgacaccctcgccgtcaccggtgaagcgtttagtcgtcaggaatctggtgttgcactgcgtaaaggtaacgaagacctgctgaaagctgttaacgacgcgatcgccgagatgcagaaagatggcaccctgcaggcgctgtcagaaaaatggttcggtgcggatgtgactaagtaa

SEQ ID NO: 2048 - DNA, 330 bp, Artificial Sequence
  Optimized genes for E. coli.
atggagaccactaaaccgagcttccaagatgttctggaattcgttcgtctgtttcgtcgcaaaaacaaactgcagcgtgaaatccaggatgtggagaaaaagatccgcgataatcagaaacgtgtcctgttgctggataacctctctgattatattaaaccgggtatgtctgttgaagcgatccagggtatcatcgcttctatgaagggtgactacgaagaccgtgtagacgactacattattaaaaacgcagaactgtccaaggaacgccgtgacatctctaaaaaacttaaagcgatgggcgaaatgaaaaacggcgaggccaaataa

SEQ ID NO: 2049 - DNA, 1407 bp, Artificial Sequence
  Optimized genes for E. coli.
atgtccaaacagcagatcggcgtagttggtatggccgtaatgggccgtaacttagcactgaacattgaatctcgtggctataccgtgtcgatcttcaaccgttcccgtgaaaagacggaggaagtcatcgcagagaaccctggtaaaaaactggttccgtactacacggtgaaagaattcgtggaaagcttggaaactccacgtcgcatcctgctgatggtgaaagctggcgccggtaccgatgctgcaatcgactccctgaaaccgtatctggacaaaggcgatatcattattgacggcggtaacactttttttcaggacaccatccgtcgcaaccgcgagctttccgctgaaggtttcaacttcatcggcaccggtgtttcaggcggtgaagaaggagctctgaaaggtccgtctatcatgccgggcgggcagaaggaagcgtacgaactggttgccccgatcttgacgaaaatcgcggccgttgcggaggatggggagccatgcgttacctacatcggtgctgacggcgcaggtcactacgtaaaaatggtccacaacggtattgaatacggcgatatgcagctgatcgcagaagcttattctctgttaaaaggaggtctgaatctgactaacgaagaactggctcaaaccttcaccgagtggaacaacggcgagctgagctcctatctcatcgacattaccaaagatatatttactaagaaagatgaagatgggaactacctggttgatgtgattctggatgaagctgcaaataagggtacaggcaaatggacttctcagtcagcactcgacctgggtgaacctctgtcgcttattacagaaagcgttttcgcacgctacattagcagcctgaaagatcagcgtgttgcggcttctaaagttctgagcggtccgcaggcgcagcccgctggtgacaaggccgaattcattgaaaaagtacgccgtgctctttacctgggcaaaatcgttagttacgcacagggcttttctcaactgcgtgcggcgtctgaagagtacaattgggacctgaactacggtgagattgcgaaaatctttcgtgccggttgtatcattcgcgctcaatttctgcagaaaatcactgacgcctacgcagaaaatccgcagattgctaacttgctgctggcgccatatttcaaacaaatcgctgacgattaccagcaggcgctacgtgatgtagttgcgtatgcggtccagaatggcatcccggtaccgaccttctccgctgccgtcgcgtattatgacagttaccgtgcggcggtgctcccggcaaacctgattcaagcacagcgcgactatttcggcgcacacacctataagcgtatcgataaggaaggtgtgttccatactgaatggctggactaa

SEQ ID NO: 2050 - DNA, 285 bp, Artificial Sequence
  Optimized genes for E. coli.
atgaaacgtaaaattatcgtagcatgcggtggtgcggttgctacctccaccatggctgcagaagaaattaaagaactgtgtcagaaccataacatcccggtggaactgatccaatgtcgcgtgaatgagattgagacctacatggatggtgttcaccttatttgcactactgcgaaggtcgaccgtagctttggtgacatcccactggttcacggcatgccgttcatctctggcattggtatcgaagccctccagaacaaaatcctgacgatcctgcagggctaa

SEQ ID NO: 2051 - DNA, 453 bp, Artificial Sequence
  Optimized genes for E. coli.
atgactaatctgtttgttcgttctggcatcagtttcgttgatcgctccgaagttctgacacacattggtaacgaaatgttagccaaaggtgttgtccacgatacgtggccgcaggctttgatcgcgcgtgaagcggagttcccgactggtattatgctggaacaacacgcaatcgcgatcccacactgtgaagctattcatgctaaatcatccgcaatctacctgctgcgcccgaccaacaaagtacatttccagcaggcggatgacgataacgacgtcgccgttagcctggtgattgcactcatcgtagagaacccgcagcagcaactgaaacttctgcgttgcctgttcggcaagctgcaacagcctgacatcgtggaaaccctgattaccctgccggaaactcagctgaaagaatattttaccaagtacgtgctggacagcgacgagtaa

SEQ ID NO: 2052 - DNA, 1263 bp, Artificial Sequence
  Optimized genes for E. coli.
atgaaaacattaatcgcccgtcacaaagcgggtgaacacatcggcatctgttctgtttgctccgcgcacccgctggtgatcgaagctgctctggcattcgaccggaactctactcgcaaagttctgattgaggcgacgtctaaccaggttaatcaattcggtggctacaccggtatgacgcctgccgactttcgtgagtttgtgttcactattgccgataaagttggctttgcccgtgagcgtattatactgggtggcgatcatctgggtccgaattgctggcagcaggaaaacgcagacgcggcgatggaaaaaagcgttgaactggttaaagaatacgtacgcgccggctttagcaagatccaccttgatgcaagtatgtcctgcgctggtgacccaatcccgctggcaccggagactgttgctgagcgtgcagctgtattgtgtttcgcagctgaatctgtagcgactgattgccagcgcgaacagctgtcgtacgtcatcggtaccgaagtgccggttccaggtggcgaagcctctgcgatccaaagtgtgcatattactcacgtggaggatgcagccaacaccctccgtacacaccagaaagctttcatcgctcgtggcctgactgaagcactgacccgtgtcatcgctatcgtagtccagccgggagttgaattcgatcacagcaatatcatccattaccagccgcaggaggcacagccgctggctcagtggattgagaacacccgtatggtttacgaagcgcattccacggattaccaaacccgtaccgcgtactgggaactggttcgtgaccattttgcaattctgaaagttggcccggcgctgaccttcgctctgcgcgaggcaattttcgcgcttgcgcagatcgaacaagaactgatcgcaccggaaaaccgctcaggttgtctcgctgtgattgaagaagtgatgctggatgaaccgcagtattggaagaagtattatcgcaccggtttcaacgactcattattggacatccgctacagcctgagcgatcgtatccgttattattggccgcactctcgcattaaaaactccgtagaaaccatgatggtaaacctggaaggcgtcgacatccctctggggatgattagccagtatctgccaaaacagttcgaacgcattcaatccggtgaactgtcggccatcccccaccagctgatcatggacaaaatttacgacgttctgcgtgcttaccgttacggctgcgcggaataa

SEQ ID NO: 2053 - DNA, 855 bp, Artificial Sequence
  Optimized genes for E. coli.
atgtacgttgtatccacgaaacagatgctgaacaacgcacagcgcggcggttacgctgtcccggcgttcaatatccacaacctggaaacaatgcaggtagttgtggagaccgcagcaaatttgcacgctccggtaatcattgctggcaccccgggaactttcacccacgcgggcaccgaaaacctcctggcgcttgtttccgccatggcgaaacagtatcaccacccactggcgattcatttagaccatcacacgaaatttgacgacattgctcaaaaagttcgttccggcgttcgctctgtgatgatcgatgcgagccaccttccctttgcgcaaaatatctcacgcgttaaggaggtggtggacttctgtcatcgcttcgatgtctccgttgaagctgaactgggtcagctgggtggccaagaagacgatgtgcaggttaacgaagccgatgcattgtacactaacccagcgcaggcacgtgaattcgctgaagctactggcatcgacagcctggccgttgctattggtaccgcccacggtatgtatgcatctgcgccggcactggatttctctcgtctggagaatatccgtcagtgggttaacctgccgctggtgctccatggtgcgtcgggtctgtctaccaaagacatccagcagaccattaagctgggcatttgcaaaatcaacgttgcaactgaactgaaaaacgcatttagtcaagccctgaaaaactatctgactgaacatcctgaagctaccgacccgcgtgattacctgcagagcgcgaagagcgctatgcgtgatgtagtatctaaagtcatcgcagattgtgggtgcgagggtcgtgcctaa

SEQ ID NO: 2054 - DNA, 567 bp, Artificial Sequence
  Optimized genes for E. coli.
atggtaaaaagccagccaattctgcgctacattctgcgcggaatcccggcaatcgccgtagctgtcctgctgtccgcttgttccgcgaataacactgcgaaaaacatgcatccggagacacgtgcagttggctctgagacgtcaagcctccaggcctctcaggatgagttcgaaaacttagttcgcaacgtagacgtgaaatcacgtatcatggaccagtacgcagattggaaaggtgtccgttatcgcttgggtggctctaccaagaaaggcatcgattgctctggtttcgtgcagcgtacttttcgtgaacaattcggtctggaactgccgcgttctacttacgaacagcaagaaatgggtaaatccgtttcccgctccaacctgcgtaccggcgaccttgttctgtttcgtgctggcagcaccggtcgtcacgttggcatctatattggtaataaccagttcgtgcacgcgtcgaccagctctggggttatcattagtagcatgaacgaaccttattggaagaaacgttacaatgaagcgcgtcgtgtgctgagtcgctcgtaa

SEQ ID NO: 2055 - DNA, 285 bp, Artificial Sequence
  Optimized genes for E. coli.
atgttcactatcaacgcggaagtacgtaaagaacagggtaaaggcgcttctcgccgtctgcgtgccgcaaacaaatttcctgcgatcatctatggtggtaaggaggccccactggctattgaactggatcatgacaaagttatgaatatgcaggcgaaagcagagttctactctgaagtgctgaccattgtcgttgacggcaaggaaattaaagttaaagcacaggatgtacagcgtcacccgtacaagccgaaactgcaacacatcgacttcgtgcgcgcttaa

SEQ ID NO: 2056 - DNA, 1104 bp, Artificial Sequence
  Optimized genes for E. coli.
atgaaagtaaaagtcctgtctctgctggtaccagctctgctggttgcaggtgcagcaaacgcggccgaagtatacaataaagacggtaacaagctcgacctttatggcaaggttgacggcctgcactatttcagcgataacaaagatgtggatggtgatcagacctacatgcgtctgggtttcaaaggcgaaacccaggtgactgaccagttgactgggtatggccaatgggagtaccaaattcaaggcaactcagcagaaaacgaaaataattcttggacccgtgttgcttttgctggtctgaaattccaggacgttggtagttttgattacggccgtaactacggcgtcgtctacgatgtgacttcctggaccgatgttctgccggagttcggcggtgatacctacggttctgacaacttcatgcaacagcgtggtaacggttttgcgacctaccgcaacactgactttttcggtcttgtagacggtctgaacttcgcggtccagtaccagggcaaaaacggtaacccgtctggtgaaggctttacgtctggtgtgaccaataacggtcgtgatgctttacgccagaacggcgacggcgttggcggcagcattacttacgactatgaaggctttggtattggtggcgctatcagctcctcgaaacgtaccgacgcgcagaatacggctgcctatattggcaatggtgaccgtgccgaaacttataccggcggactgaagtatgatgctaacaacatctacctggcggcgcagtacacccagacatataacgcaacgcgcgttggaagcctgggctgggccaacaaagctcagaacttcgaggcggttgcccagtatcaattcgatttcgggctgcgcccgtccttggcatacctgcagtccaaaggtaaaaacctgggtcgtggttatgacgatgaagacatcctgaagtacgttgacgtgggggcgacctactactttaacaaaaacatgtctacatatgtagattacaaaatcaacctcctggatgataaccagttcacccgtgatgcaggcatcaatactgacaatatcgttgcactgggtctggtgtaccagttctaa

SEQ ID NO: 2057 - DNA, 501 bp, Artificial Sequence
  Optimized genes for E. coli.
atgcatgaaaaccaacagccgcagacggaagccttcgaactgtccgctgctgaacgtgaagcgatcgagcacgaaatgcaccactacgaagatccgcgcgcagcatctatcgaagccctcaagatcgtccagaaacaacgtgggtgggttccggacggcgcgatccacgctattgcggacgtgcttggtattccagctagcgacgtggagggcgttgccaccttttactctcaaatctttcgtcagccagttggccgccatgttatccgttattgtgattctgtagtatgtcacatcaacggttatcagggtattcaggcggcactggaaaaaaaattaaatattaaaccgggtcagaccaccttcgacggccgcttcaccctgctgcccacatgctgcttgggtaactgcgataagggcccgaacatgatgatcgatgaagacactcatgcgcacctgactcctgaagctattccggagctgctggagcgttacaaataa

SEQ ID NO: 2058 - DNA, 1203 bp, Artificial Sequence
  Optimized genes for E. coli.
atgagcagtaaactggttctggtactgaactgcggttcatcctcccttaagttcgccattattgacgcggtgaacggtgaagaatatctgtccggtctggcagaatgcttccacttaccagaggcacgcatcaaatggaaaatggatggcaataaacaggaggccgccctgggcgccggcgcagcgcattctgaagcactgaactttatcgtgaataccattctggcacagaaacctgagctgtccgcgcaactgactgctatcggccaccgtatcgtacatggtggtgaaaaatacactagctctgttgtgattgatgagtcggttatccagggcatcaaggatgcggcgtctttcgcgccactgcataatccggcccatctgatcggcatcgaagaagctctgaagtccttcccgcagctgaaagacaagaacgtcgcggtgttcgatacggcgtttcaccagaccatgccggaggaatcttacctgtacgctctgccgtataacctgtacaaagaacacggtatccgtcgttacggtgcgcatggtacgagccacttctatgtaacccaagaagcggcaaaaatgctgaacaaaccggttgaggaactgaacatcattacgtgccacctggggaacggtggtagcgtctctgctattcgcaatggcaaatgcgtcgacacttctatgggtctgaccccgctggaaggcttggttatgggcactcgttcgggcgacatcgatccggccattatctttcacctgcacgacactttgggaatgtctgtggacgcaatcaacaaactgctaaccaaagaaagcggtttactcggtcttaccgaagttaccagcgattgtcgttacgttgaagacaactatgctaccaaggaggacgcaaaacgtgctatggacgtgtattgtcaccgtcttgcgaaatacattggtgcttacacagcgctcatggatgggcgtctggatgctgttgtgttcaccggtggtattggcgaaaatgcagctatggtacgcgaattgtccctgggcaaactcggcgttctgggctttgaggtcgatcatgaacgtaacctggctgcccgcttcggtaaaagtggctttattaacaaagaaggtacacgtcccgctgtagtaatccctactaacgaagaactggttatcgcacaggacgcttcacgcctgaccgcataa

SEQ ID NO: 2059 - DNA, 1221 bp, Artificial Sequence
  Optimized genes for E. coli.
atgaaacgtgctgtaatcacaggtctgggcatcgtttcaagtatcggtaacaatcagcaggaagtgctggcgtctctgcgtgagggtcgctctggcatcaccttttcccaggagctgaaagacagcggcatgcgcagccatgtatggggaaacgtgaaactggataccacgggtttgatcgatcgtaaagttgtccgtttcatgtcggacgcttccatctacgcttttttatcaatggaacaggctattgcggatgctggtctgagcccggaagcttaccaaaataacccgcgtgtgggcctgatcgcgggttctggtggcggttctccgcgcttccaagttttcggcgccgatgcgatgcgtggtccacgcggcctgaaagcagtcggtccgtacgttgtgactaaagcaatggcatccggtgtttccgcatgcctggcaactccattcaagatccatggcgtaaactatagcatctctagtgcatgtgctacctccgcgcactgtatcggcaacgccgttgaacagatccagcttggcaaacaggacatcgttttcgctggcggtggtgaggaactgtgctgggaaatggcgtgcgagttcgacgcgatgggcgcgctgagcactaagtacaacgataccccggaaaaagcgtctcgtacttatgatgcgcaccgcgatggctttgttattgcaggtggtggcgggatggttgttgtggaagaactggaacacgctctggcgcgcggcgcccatatttatgctgaaattgtcggttacggtgccacctccgatggcgcagacatggttgcgccgagcggtgaaggtgccgtgcgttgcatgaagatggcaatgcacggagtagacacccctattgattacctgaacagccacggcacatccactcctgtgggtgacgtgaaggaactcgctgcgattcgtgaggttttcggcgataaatcgcccgccatctctgcgaccaaagccatgactgggcactcgctgggtgctgcaggtgtacaagaagctatttattctcttctgatgttggaacatggctttattgcaccgtctattaacatcgaagaactggacgaacaggcagctggtctgaacatcgttaccgaaacgacggaccgtgagctgactaccgtaatgagcaactctttcggctttggcgggaccaatgccaccctcgtcatgcgtaaactgaaagactaa

SEQ ID NO: 2060 - DNA, 972 bp, Artificial Sequence
  Optimized genes for E. coli.
atgagcaaaattttcgaagataattcactgacgatcggtcataccccgcttgttcgtttgaaccgtatcggaaatggccgtattctggcgaaggttgagagccgcaacccgtctttctctgtcaagtgccgtatcggtgcgaacatgatctgggatgccgaaaagcgtggtgtcctgaaacccggcgttgagctggtggagccgacttctggtaacactggcatcgctctggcgtatgttgcagccgctcgcggttacaaattaaccctgaccatgccggaaaccatgtctattgaacgccgtaaactgctgaaagcactgggtgcgaacctggttctgacggaaggtgcgaaaggcatgaaaggtgccattcagaaagctgaagaaatcgtagcgagcaacccggagaagtatctgctgctgcagcaattcagcaacccagctaacccggaaattcacgagaaaaccaccggccctgaaatctgggaagacaccgatggccaggttgacgtattcatcgctggcgtaggcacaggcggcactctcaccggggtgtcccgttacattaaaggtactaaaggtaaaaccgacctgatctccgttgctgtagaaccgactgactcgccggttatcgcgcaagctctggcaggcgaagaaattaaaccgggtccacacaaaattcagggtatcggtgctgggttcatcccggcaaacttggacctgaaattagtggataaagtgatcggtatcaccaatgaagaggccatttccaccgcccgtcgtctgatggaagaagaaggcatcctggcgggcatttcttctggtgcagcggttgcagctgcactgaagcttcaggaagatgaaagttttactaacaaaaatatcgtggtcatcctgcctagctctggcgaacgctacctgtccacagcgctgtttgcagacctctttacggagaaagaactgcagcagtaa

SEQ ID NO: 2061 - DNA, 258 bp, Artificial Sequence
  Optimized genes for E. coli.
atgtttcagcaggaagtgaccatcacagcgccgaacggtctgcatactcgtccggccgcgcagttcgtaaaagaagcaaaaggcttcacctctgaaattaccgtcacctctaatggtaaaagcgcttccgctaagtctcttttcaaactccaaactttgggcctgacgcagggtaccgttgtgactatctctgcagaaggcgaagacgagcaaaaagcggttgaacacctggttaagctgatggctgaactggagtaa

SEQ ID NO: 2062 - DNA, 1728 bp, Artificial Sequence
  Optimized genes for E. coli.
atgatttctggtatcttggcgtctccgggcatcgcattcggcaaagccctgctgttaaaagaagacgagattgttattgaccgtaaaaagatcagtgctgatcaggttgaccaggaagttgaacgcttcctgagcggccgtgcgaaagcgtctgctcagctggaaactatcaagactaaagcaggtgagacttttggcgaagaaaaagaagcaatctttgaaggtcacatcatgctcctggaagacgaagaactggaacaggagattattgcactgattaaagacaaacacatgaccgcagacgcagccgcgcatgaggttattgaagggcaggcttccgcgctggaagaactggatgatgaatacctgaaagagcgtgcagccgacgtacgtgatatcggtaaacgcctgctgcgtaatattctgggtctgaaaatcatcgacctgtctgcgatccaggatgaagttatcttggtggcggctgatcttactccatctgaaaccgcgcagctgaacttgaagaaagtcttaggcttcataaccgacgctggtggtcgtacgtcccacaccagcattatggctcgctctcttgaactgcctgcaatcgttggtactggttcggttacctcccaagttaaaaacgatgattacctgatcctagatgctgtgaacaaccaagtgtacgtaaacccaacaaacgaagtgatcgataaaatgcgcgcagttcaggaacaggtggcgtccgaaaaagcagaactggctaaactgaaggatctgccggcaatcactctggacggtcaccaggttgaggtatgtgcgaatattggtaccgtgcgtgacgtcgaaggcgccgaacgcaacggtgccgaaggcgttggcctgtatcgtaccgaattcctgttcatggaccgcgatgcgctcccgaccgaagaagaacagttcgctgcatataaagcagtagctgaagcgtgcggctctcaggcggtgattgtacgtaccatggacatcggtggagacaaagaactgccgtacatgaacttccctaaggaggaaaacccattcctgggctggcgggcaatccgtatcgctatggatcgccgtgagattctgcgcgatcagttacgtgccatcctgcgcgcgtctgctttcggcaaactccgaatcatgttcccgatgattattagcgttgaagaagtccgcgctcttcgtaaagaaatcgagatctataaacaggagctgcgtgacgagggtaaagcctttgacgaaagcattgagatcggcgttatggtagagacgcccgcagctgctaccattgcgcgtcacctggcgaaagaagtcgatttctttagcatcggtaccaacgatctgactcaatacacgctggccgtagaccgtggtaacgatatgattagccatctgtaccagccgatgtcgccgtccgtccttaacctgatcaaacaggttatcgatgcttcccatgctgaaggcaaatggactggtatgtgtggtgagcttgcgggcgacgaacgtgccaccctgctgctgctcgggatgggcttggatgaattcagtatgtcagccatttcaatcccgcgcatcaagaaaatcatccgtaacacgaattttgaagacgcaaaggtgctggctgagcaagcgctggcgcaaccgaccaccgacgaactgatgactctggtgaataagtttattgaggaaaaaacaatctgctaa

SEQ ID NO: 2063 - DNA, 510 bp, Artificial Sequence
  Optimized genes for E. coli.
atgggtctgttcgataaactgaaaagcctggttagtgacgacaagaaagataccggcaccatcgagattatcgcaccattgtctggtgaaatcgttaacatcgaagatgttccggacgtggtttttgctgaaaaaatcgtaggagacggtattgctattaaaccgactgggaacaaaatggtggcacctgtcgatggcaccatcggcaagatcttcgaaacaaatcatgcgttctcaattgaatccgatagcggtgtagaactgttcgttcacttcggcattgacacggtagagctgaaaggtgagggttttaaacgtatcgccgaggaaggccagcgtgttaaagttggtgacactgtgatcgaatttgacctcccgctgctggaagaaaaagcgaaatccacccttactccggtggtgatttctaacatggatgaaatcaaagaactgatcaagctgtctggctcggtcacggttggtgaaaccccggtcatccgcattaagaaataa

SEQ ID NO: 2064 - DNA, 879 bp, Artificial Sequence
  Optimized genes for E. coli.
atgtttacagggagcattgtcgcgatcgttactccgatggatgaaaaaggtaatgtgtgccgtgcctctctgaaaaaactgattgattatcacgtagcctccggtacttctgcaatcgtatccgtgggcaccacgggcgaatctgcgaccctgaaccacgacgagcacgcggacgtcgttatgatgaccctggacctggctgatggccgtattccggttatcgctggtaccggtgctaacgcaactgcagaagcaatcagcctgacccagcgtttcaacgatagcggcatcgtaggttgtctgaccgtaacgccgtactataaccgtccaagtcaggagggtctgtaccagcatttcaaggcgatcgccgaacacaccgacctgccccaaatcctctacaacgttccgagccgcaccggttgtgatctgttaccggaaactgttggccgtctggcgaaagtaaaaaacattatcggtatcaaagaggctactggtaacttgactcgtgttaatcagattaaggaactggtctctgatgacttcgtgctgctctcgggcgacgacgcgtctgctctggactttatgcagctgggcggacatggtgttatctccgttaccgcgaacgttgcggctcgtgatatggctcaaatgtgcaaattagcagctgaaggtcacttcgcagaagcgcgcgttatcaatcagcgcttgatgccgctgcataacaaactgttcgtggaacctaacccgattcctgttaaatgggcatgcaaagagctgggccttgtggccaccgatacactgcgtctgccgatgacgccaattaccgactcaggccgtgaaactgtgcgcgcagctcttaagcacgccggcctgctgtaa

SEQ ID NO: 2065 - DNA, 324 bp, Artificial Sequence
  Optimized genes for E. coli.
atgagcatcactctttccgattccgcggcagcgcgcgtgaacaccttcctggccaaccgtggtaaaggcttcggtctgcgtttgggtgtccgtacctcaggctgttctggaatggcttacgtactggaatttgttgacgaaccaaccccggaagacattgttttcgaagacaagggcgttaaagtagttgttgatggcaagtcgctccagtttctggatggtactcaactggactttgtcaaagaaggtctgaatgagggcttcaaattcacgaacccgaacgtgaaagatgaatgcgggtgcggcgagtctttccacgtgtaa

SEQ ID NO: 2066 - DNA, 651 bp, Artificial Sequence
  Optimized genes for E. coli.
atgcaaaaggaacaactgtcagcgcttatggacggcgagacattagacagtgaactgttgaacgagctggcccacaacccggagatgcagaaaacttgggagtcctaccatctgattcgcgattccatgcgtggcgacactccggaggttctgcacttcgatattagctctcgtgttatggcggccattgaagaagaaccagttcgccaaccagcaaccctcatcccggaagcacaaccggccccgcatcaatggcaaaaaatgccgttttggcagaaagttcgtccgtgggctgcgcagctgacccagatgggtgtagctgcatgcgtatctctggctgtgatcgttggcgtgcagcactacaacggtcaatctgaaaccagccagcagccagaaaccccggtgttcaatacgctgccgatgatggggaaagcaagccctgtgagcctgggtgttccgtccgaagcaaccgctaacaacggtcagcaacagcaggtccaggaacagcgtcgtcgcatcaatgcgatgctgcaggattatgaactgcagcgtcgtctgcactctgaacagctgcagttcgaacaggctcagacccagcaggcggcggtccaggtacccggtatccagacgctgggcactcagtcgcagtaa

SEQ ID NO: 2067 - DNA, 342 bp, Artificial Sequence
  Optimized genes for E. coli.
atgacgatgaacattacttctaaacagatggaaatcacacctgcaattcgccagcatgtggctgaccgtctcgcgaaactggagaaatggcaaacccacctgatcaacccgcacatcattttgagcaaggaaccgcagggtttcgtcgcggacgctaccatcaacaccccaaatggcgttctggttgcatctggtaaacacgaagatatgtacactgcaatcaatgagcttatcaacaagctggaacgtcagctgaacaaactgcaacataaaggcgaagctcgtcgcgccgcgacctccgttaaagatgccaactttgtagaagaagtggaggaagaataa

SEQ ID NO: 2068 - DNA, 348 bp, Artificial Sequence
  Optimized genes for E. coli.
atgtccaatatcatcaagcagctggaacaagaacagatgaaacaagatgtaccgagctttcgcccgggcgacactgttgaagttaaagtatgggtggtcgagggctcgaaaaaacgtctgcaggctttcgagggtgttgtaattgcaattcgtaaccgcggcctgcatagtgcgttcaccgtccgtaaaatttctaacggtgaaggtgtggaacgtgttttccagacgcactccccagttgtggactctatcagcgttaaacgtcgtggtgcagtgcgcaaagccaagctgtactatctgcgtgaacgtaccggtaaagcggctcgcatcaaggaacgtctgaactaa

SEQ ID NO: 2069 - DNA, 768 bp, Artificial Sequence
  Optimized genes for E. coli.
atgtggattgggatcatttctctgttccctgagatgtttcgcgcaatcaccgactacggcgtgaccggccgtgcagttaaaaacggtctgctgtccatccagtcatggtctccgcgcgatttcacccacgatcgtcaccgtactgtagatgatcgtccctacggaggcggtccgggtatgctgatgatggttcaaccgctccgcgacgcgatccacgcggctaaggcggcagcgggtgaaggcgctaaagtgatctatctgagcccacagggccgtaaactggatcaagctggtgtttccgagctggctactaaccaaaaactgattctggtttgcggccgttatgaaggtattgatgagcgtgtcattcagactgaaatcgacgaagaatggagcatcggcgactacgtcctgagtggtggtgaactgccggctatgacgctgattgactcggttagccgtttcatcccgggtgtactgggccacgaagcgagcgcgactgaagactccttcgctgaaggtctgctggactgtccgcactacacccgtccggaagtgttggaaggcatggaagttccaccggtacttctgtctggtaaccatgcggagatccgtcgctggcgcctgaaacagtctctgggccgcacatggctgcgtcgtcctgaattgcttgaaaatctcgccctgacggaagagcaggcacgtttactggcagaatttaaaaccgagcatgcccagcagcagcacaagcatgatggtatggcctaa

SEQ ID NO: 2070 - DNA, 549 bp, Artificial Sequence
  Optimized genes for E. coli.
atgagtaaacagcttactgcccaggcgccggttgacccaattgtactgggcaagatgggcagctcttacggcattcgcggctggctgcgcgttttttcttctaccgaagatgctgagtcgatcttcgattatcaaccgtggttcattcagaaagcaggtcaatggcagcaggttcagttggaatcctggaaacatcacaaccaggacatgatcatcaaattaaagggtgtggacgatcgtgacgctgcaaacctgctgaccaactgcgaaatcgtggttgactcctcacaactgccgcagctggaggaaggcgactactattggaaagacctgatgggttgtcaggtggtgacaactgaaggttacgatctgggtaaagtcgttgacatgatggaaaccggttccaatgatgttctcgtaattaaagcgaacctgaaagatgcgtttggcatcaaagagcgtctggttcctttcctggatgggcaggtaatcaaaaaggttgatctgaccacgcgtagcatcgaagtcgactgggatccgggattctaa

SEQ ID NO: 2071 - DNA, 249 bp, Artificial Sequence
  Optimized genes for E. coli.
atggttaccatccgtctggcacgccatggtgcaaagaaacgtccgttctaccaggtagtcgtggcggattcccgcaatgctcgtaacggccgctttattgaacgtgttggcttcttcaacccgattgcaagcgagaaagaagaaggtacccgtctggacctggatcgtatcgcgcactgggtaggtcaaggcgccactatctctgaccgtgtggccgcgctgatcaaagaagttaacaaagctgcttaa

SEQ ID NO: 2072 - DNA, 186 bp, Artificial Sequence
  Optimized genes for E. coli.
atgctgattctgacccgtcgtgtaggtgaaaccctgatgatcggcgacgaggtaacggtgactgttctgggtgttaagggcaatcaagtccgcatcggtgttaacgctccgaaagaagtttccgtgcaccgcgaagagatttaccagcgtatccaggcggaaaaatctcagcagagctcttattaa

SEQ ID NO: 2073 - DNA, 2631 bp, Artificial Sequence
  Optimized genes for E. coli.
atgtcgaagtcgactgctgaaattcgtcaagcgtttctcgacttcttccacagcaaaggtcaccaggtggtcgcctcttccagcctggtaccccacaacgacccgactcttttgtttaccaacgcaggcatgaaccagtttaaagacgtgttcctgggccttgataaacgcaactacagtcgcgcgaccacctcccagcgttgcgtccgtgctggcggtaagcacaatgaccttgagaacgtaggttatactgcgcgtcaccacaccttctttgagatgctgggcaattttagcttcggtgactattttaagcacgatgcgatccaattcgcatgggagctgttgacttcagaaaagtggttcgccctgccgaaggaacgcctgtgggttaccgtatacgaatctgacgatgaagcctatgaaatttgggaaaaagaagttggtattccgcgtgaacgtatcatccgcatcggcgacaataaaggtgcaccgtatgcatcggataacttctggcagatgggtgataccggcccgtgcggcccgtgcactgaaatcttttatgatcatggcgatcacatttggggtggcccgccagggagtccagaagaagatggtgaccgctacatcgaaatttggaacattgttttcatgcaattcaaccgtcaagctgacggtacgatggaaccgctgccgaaaccgtccgttgacactggtatgggtctggagcgcatcgctgcagtactgcagcacgtaaacagcaactacgatatcgacctgttccgcaccctgatccaagcagtggctaaagtaactggtgctactgacctgtctaacaaatctcttcgtgttattgctgaccatatccgttcctgcgcgtttttgatcgcggatggtgttatgccatctaacgaaaaccgtggttacgttctgcgtcgtatcattcgtcgcgctgttcgtcatggcaatatgctgggcgctaaagaaaccttcttctacaaactggttggcccgctgatcgacgtgatggggtctgcaggtgaagacctgaagcgtcagcaggctcaggtagagcaggttctgaaaactgaagaagaacagtttgcacgcaccctggaacgtggcctggcgctgctcgatgaagaactggcgaaactgtctggcgacaccctggacggcgagaccgctttccgtctgtatgatacctacggctttcctgtggatctgacggccgatgtgtgtcgtgaacgcaacattaaagtggacgaggcgggattcgaagcggcaatggaggaacagcgtcgtcgtgctcgtgaagcctccggttttggagcagattacaatgcaatgatcagagtggattccgcgtctgaatttaaaggctacgatcacctggaactgaacggtaaggttacggcactgttcgtggacggcaaggctgtggacgctattaacgccggccaggaagcagttgttgttctcgaccagacaccgttctacgcggagagcggtggccaggttggcgataaaggcgaacttaaaggcgccaacttctcgttcgcggtggaggacacccagaaatatggtcaggcaatcggccacattggcaaactggcggcgggtagcctgaaggtaggcgatgccgtccaggcagatgtcgacgaggcgcgtcgtgcgcgtatccgcctgaatcactctgccacccacctgatgcatgcagcactgcgtcaggtactgggcacccacgtttcacagaaaggtagcttagttaatgacaaagttctgcgcttcgacttcagccataacgaagctatgaaacctgaagaaatccgtgccgttgaagatctggttaacacgcaaattcgccgtaacctcccaatcgaaaccaacatcatggatctggaggcagcgaaagcaaaaggtgcaatggccctgttcggtgagaaatacgacgaacgcgttcgagtgctgtctatgggcgacttttccacagaactgtgtggtggtactcatgccagtcggaccggtgacatcggtctgttccgtatcattagtgagtccggtaccgctgcaggcgtccgccgcatcgaggcggtaaccggtgaaggcgctatcgcaacagtgcatgctgattccgaccgtttaagcgaagtagcccatctgcttaaaggcgattctaacaatttagccgataaagttcgttccgtcctggaacgcacgcgccaactggaaaaagagctgcaacagctaaaagaacaggctgcggcgcaggagagcgctaacttgtcttcaaaagcaattgatgtaaacggggtcaaactgctggtttctgaactgtcaggtgtcgaacctaaaatgctgcgtactatggtagatgatctgaaaaaccaactgggaagcacgattattgtgttagcaaccgtcgtagaaggcaaagtgtctctgatcgctggcgtttctaaggatgtcactgatcgcgtgaaagcgggtgaactgataggcatggtggcgcagcaggttgggggtaaaggtggtggtcgtccggacatggctcaggcggggggtaccgacgctgccgctttgccggctgcgctcgcgtccgttaagggttgggttagcgctaaactccagtaa

SEQ ID NO: 2074 - DNA, 993 bp, Artificial Sequence
  Optimized genes for E. coli.
atgtcgcaaaacactctcaaagtacacgatctgaatgaagacgcggaattcgacgaaaacggtgtggaggtcttcgatgaaaaagctctggtggaacaggaaccgtccgataacgacctcgcagaagaggagctgctgagccagggcgcaacccagcgtgtgctggacgctacccagctgtaccttggtgaaatcggctattctccgctgctgaccgcagaagaagaagtatacttcgcgcgtcgtgctctgcgtggtgacgtcgcgagccggcgtcgtatgatcgagtcaaacctgcgccttgttgttaaaatcgcccgtcgctatggcaaccgtggtctggctctgctggatttgatcgaagagggcaacctgggtctgatccgtgctgttgagaagtttgatccggaacgtggctttcgcttctccacctacgctacctggtggatccgtcagactattgaacgcgccattatgaatcaaacgcgcaccattcgcctgccaatccacatcgttaaagaactgaacgtttacttacgcaccgcccgcgaactgtcccataagctggatcacgaacctagcgcagaagaaattgcggagcagctggacaagccggtggacgatgtgagtcgcatgttgcgtctgaacgaacgtatcacatctgttgataccccgctcggtggggactctgaaaaagcactgctggacattttagccgatgaaaaagagaacggtccggaagacacgactcaggatgacgatatgaaacagtctattgtaaaatggctgttcgagctgaacgctaaacagcgcgaggttctggcgcgtcgttttggactgctgggctatgaagcagcgactctggaagacgtcggtcgagaaatcggtctgacccgtgaacgtgtacgccaaatccaagttgaaggcttgcgtcgtctgcgtgaaattctgcagactcagggcctaaatatcgaggcgcttttccgcgaataa

SEQ ID NO: 2075 - DNA, 1140 bp, Artificial Sequence
  Optimized genes for E. coli.
atgtccgcaggctctcctaagttcaccgttcgtcgcatcgcagcactgtccctggtgtctctgtggctggctggttgctccgacacttctaacccgccggccccggtatcgagcgttaacggcaacgcgccagcgaacaccaactctggcatgttgattactcctccgccgaaaatgggcactacctcgacagctcagcagccgcaaattcagccggttcagcagccgcagatccaggcaactcaacagcctcaaattcagcccgttcagccggttgcgcagcagccggttcagatggaaaacggtcgtatcgtgtataaccgccagtatggtaacatcccaaaaggttcttacagtggcagcacctacactgtcaaaaaaggtgataccctgttttacatcgcctggattactggcaacgactttcgtgatctggcccaacgtaacaacattcaagcgccgtacgccttaaacgtaggtcaaactcttcaggttggtaatgcttcaggcaccccgattaccggtggtaatgctattacccaggcggacgctgcagaacagggtgtcgtgatcaaaccggctcagaactccactgtggcagtagctagccaaccaactatcacctactccgaatctagtggcgaacagagcgcaaataagatgctgccgaacaataaacccaccgcgacgaccgtcactgcgccagtcaccgtaccgaccgcttctaccacagaaccgacggtttctagcaccagcactagcacgccgatctcaacctggcgctggccgaccgaaggtaaagttatcgagactttcggcgcgtccgaaggtggcaataagggaatcgatattgcggggtcgaaaggtcaggcgatcatcgctacggccgatggtcgtgtagtgtatgctggtaacgcactgcgcggctacggcaacctgattatcatcaagcacaatgacgattacctctctgcatatgcacataacgacacgatgctggttcgcgagcagcaagaggtgaaagccgggcagaaaatcgcgacgatgggttccaccggcacatctagcacccgtctgcacttcgaaatccgttataaaggcaaatccgttaaccctctgcgttacctgccgcagcgttaa

SEQ ID NO: 2076 - DNA, 1299 bp, Artificial Sequence
  Optimized genes for E. coli.
atgtctaaaattgtgaaaattattggccgtgaaattatcgactcccgcggtaacccgaccgtggaagcagaagtacatctggaaggcggctttgttggcatggcggctgctccgagcggcgccagcacgggaagtcgcgaggcgctggaactgcgcgacggcgacaaatcccgtttcctgggtaaaggtgtaaccaaagcggttgctgcggtaaacggtccgatcgctcaggctctgatcggtaaagacgctaaggatcaggcgggtatcgataaaatcatgatcgatctggacggtacggaaaataaatccaaattcggcgcgaatgcgatcctggcagtaagtctggctaacgccaaggccgcagctgcagctaaaggcatgccgttatatgaacatatagcggaattgaatggtacaccaggcaagtactctatgcccgtccctatgatgaacatcattaacggtggcgaacacgccgacaacaatgttgatattcaagaatttatgattcagccggtcggggctaaaaccgtgaaggaagctatccgtatgggttcagaggttttccaccacctggcaaaagtcctgaaagcgaaaggcatgaacactgccgttggcgacgaaggcgggtatgcaccaaacctgggctctaacgctgaagcgctggcagtgatcgcggaagcagttaaagcggccggttacgaactgggtaaggacatcacccttgcaatggattgcgcagcttccgagttctacaaagatggtaagtacgttctggcaggtgaaggtaataaagctttcaccagcgaagaattcacccattttctggaggaactcaccaaacagtacccgatcgtttctatcgaagatggtctggatgagagcgattgggacggcttcgcttatcagactaaagttcttggcgacaagatccagctggtcggcgacgacttgttcgtgactaacactaaaatcctgaaagaaggtattgagaaaggcattgctaactcaattctcatcaaatttaaccagattggctcgttaaccgagactctggcggcgatcaagatggccaaagatgccgggtacaccgcggtgatttcgcaccgctccggagaaactgaagatgccacaatcgcagacctggcagtaggcacggcagcaggtcagattaagaccggtagcatgtctcgtagcgatcgtgttgctaaatataaccaactgatccgtatcgaggaagcgctgggtgagaaagcgccgtacaacggtcgtaaagaaatcaaaggtcaagcctaa

SEQ ID NO: 2077 - DNA, 1638 bp, Artificial Sequence
  Optimized genes for E. coli.
atgacaaccaactacatcttcgtcacgggcggtgtggtatctagcctgggtaaaggtattgcagcggcatccctcgccgccatcctggaggcgcgtggcttgaacgtcaccattatgaaattggatccgtacatcaacgtggacccggggactatgtctcccatccagcacggcgaagtttttgttactgaagacggggcggagaccgatctggacctgggccactatgagcgtttcattcgcaccaaaatgtctcgccgcaataactttaccaccggtcgtatttactccgatgtcctgcgcaaagagcgccgtggtgactaccttggtgcaacagttcaagtaatcccgcacatcaccaacgctatcaaagaacgtgttctggagggtggcgaaggtcacgacgtagtactggttgaaattggcggcaccgtaggcgacatcgaatctctgccgttcttggaagctatccgtcagatggctgtggaaattggtcgtgaacacaccttattcatgcatctgaccctggttccatacatggccgcgtccggcgaagtgaaaactaagccgacgcagcattctgtaaaagaactgctgtccatcggcattcaaccggacattctgatctgccgtagcgaccgcgcagttccggctaacgaacgtgccaaaatagcgctgttttgcaacgtgccagaaaaggcagtcatcagcctgaaagacgttgattcgatttacaagatccctggcctgctgaagtcccagggtctggatgactacatctgcaaacgtttctccctgaactgtccggaggcgaacctgagcgaatgggaacaggtgatctttgaagaggcgaacccggtgagcgaagttaccattggcatggtcggtaaatatattgaactgccggacgcttataagagcgtcattgaagctttaaaacacggcggtctgaaaaaccgtgtttctgttaacattaaactgatcgacagtcaggatgtggagacccgcggcgtggaaattctgaaaggtctcgatgcgattctggttcctggtggtttcggttatcgtggtgtggaaggcatgatcaccactgctcgtttcgcacgtgaaaataacatcccgtacctgggcatctgccttgggatgcaggtcgctctgatcgattatgcacggcatgttgcgaacatggaaaatgcgaattcaactgagtttgtaccagactgtaagtacccggtggtagctctaatcacggaatggcgagacgaaaacggtaacgttgaagtacgctcagaaaaaagtgatcttggtggtacgatgcgcctgggagcgcaacagtgccagctggttgatgattctctcgttcgtcagctttataatgctccaactatcgttgaacgccatcgtcatcgttacgaagtgaacaatatgctgttaaaacagatcgaagatgccggcctgcgtgtagcgggtcgtagcggcgacgatcaactggttgaaattatcgaggttccgaaccacccgtggttcgttgcatgtcagtttcacccggaattcacttcgactcctcgtgatggacacccgctgttcgctggcttcgttaaagccgcatctgagttccaaaaacgccaggcaaaataa

SEQ ID NO: 2078 - DNA, 1098 bp, Artificial Sequence
  Optimized genes for E. coli.
atgttcgaaattaatccggttaacaaccgtatccaggatctgactgaacgtagtgacgttttgcgtggttatctggattacgacgcaaaaaaagaacgtctggaggaagttaacgctgaattggaacagccggacgtttggaacgaaccggaacgtgctcaggctctgggtaaagaacgtagctctctcgaggccgttgtggacaccctggaccagatgaaacagggtctcgaggacgtgtccggcctgctggagctggccgtcgaggctgatgatgaagagacgtttaacgaagccgtggcggaactggatgcgctggaggaaaaactggctcagctggaattccgtcgtatgttcagtggagaatacgacagcgcagactgctacctggatatccaggcagggtctggtggtacagaagcgcaagactgggcaagcatgcttgaacgcatgtacctgcgctgggcggaatctcgtggcttcaagaccgagattatcgaagaatccgaaggtgaagtggcgggcattaaatctgttaccatcaaaatcagcggtgactatgcatacggctggctgcgtaccgaaactggcgttcatcgtttagttcgcaaatccccttttgattccggcggtcgtcgccacacctctttttcctctgccttcgtttacccggaagtcgatgacgatattgatatcgagatcaacccggctgatctgcgcatcgatgtataccgtaccagcggcgcgggcggtcaacacgtaaatcgtaccgaatcagcggtccgtattacccatatcccaactggcattgtaacccagtgtcagaacgaccgctcgcaacacaaaaacaaagaccaggcaatgaaacagatgaaggctaagctgtatgaactggagatgcagaaaaaaaacgcagaaaaacaagcaatggaagataataagtcggatattggttggggttcacagatccgctcttatgtactggatgattcccggatcaaggaccttcgcactggcgtggaaacgcgcaacactcaagcggtactggacggcagcctggaccagttcatcgaagccagcttaaaagctggtctgtaa

SEQ ID NO: 2079 - DNA, 390 bp, Artificial Sequence
  Optimized genes for E. coli.
atgagtaacgttccggctgaactgaaatactccaaagaacatgaatggctgcgtaaggaagcggacggtacctacacggtaggtatcaccgagcacgcacaggaactgctgggcgacatggtgtttgttgacctgccggaagtcggtgcaaccgtgagcgccggtgatgattgcgctgttgcagaaagcgtgaaagcagcttctgatatttatgccccggtatccggtgaaatcgttgcggttaatgatgcgctgagcgactcacctgaacttgtcaactcggagccatacgctggcggctggattttcaaaatcaaagcctccgatgagtctgaactggagtctctgttggacgcgactgcgtatgaagctttactcgaagacgaataa

SEQ ID NO: 2080 - DNA, 1233 bp, Artificial Sequence
  Optimized genes for E. coli.
atggcaaaagtaagcttagaaaaagacaaaataaaattccttctggtcgaaggcgttcaccagaaagctttagagtcgctgcgcgcggctggttacacgaacatcgaattccataagggcgcactggatgacgaacaactgaaagagagtatccgtgatgctcacttcatcggcctgcgttctcgcacgcatctgaccgaagatgtgatcaacgctgccgaaaagctggtggcaatcggctgtttctgcatcggtaccaatcaggttgacctggatgcggcggcgaaacgtggcattccggtgttcaacgccccgttctccaacacccgttccgtggctgaactggtgattggcgaactgctgcttctgctgcgtggtgtgccggaagctaacgcaaaggcgcaccgcggtgtttggaataaacttgcggcagggtctttcgaagcgcgtggtaagaaactgggaatcatcggttatggccacatcggcacccagctggggatcctggccgaaagcctgggtatgtacgtatacttttacgacattgagaataaactgccgctgggtaacgcaacccaggttcagcacctctctgacctgctgaacatgtctgacgtagtatccctgcatgtaccggaaaacccctctactaaaaacatgatgggcgcgaaagaaattagcctgatgaaaccaggcagtttgttgatcaacgcttcacgcggcacggttgttgacatcccggccctgtgtgacgcgctagcgagcaagcacctggcgggtgctgcgatcgacgtttttccgaccgaacctgcgactaatagcgatccgtttacttcccctctgtgcgagttcgataacgtgttactgaccccgcacatcggtggctccacccaggaagcacaggagaacattggtctggaagtcgccggtaaactgattaaatactctgataatggtagcaccctgtcggctgtcaactttccagaagtttctctgccactgcacggtggtcgtcgtttgatgcatatccatgagaaccgtccgggcgtactcacagcactcaacaaaatttttgctgaacaaggcgttaacattgccgcacagtacctgcaaacttcagcacagatgggctatgttgttatcgatattgaagctgacgaagatgtcgcagagaaagctctgcaggccatgaaagcaattccgggtactattcgcgctcgtctcctgtattaa

SEQ ID NO: 2081 - DNA, 1164 bp, Artificial Sequence
  Optimized genes for E. coli.
atgtccgtgatcaaaatgactgacctggatctggcgggtaaacgtgtgttcattcgcgctgacctgaacgttccggttaaagacggcaaagtgacttccgacgcgcgtatccgcgcaagcctgccgacgattgaactggccctgaagcaaggtgccaaagttatggttacttctcacctgggccgtccaacagaaggtgagtacaacgaagaattctcgctgctgccggtagtgaactatctgaaagataaactgagcaacccggtacgcctggtcaaagattacctggacggcgttgatgtagctgaaggcgaactggtggttttggaaaatgtgcgttttaacaagggcgagaaaaaagatgatgagaccctctctaagaaatacgctgcgctgtgtgacgtattcgtaatggatgctttcggtaccgcgcaccgtgcacaggcctctacccacggtatcggcaagttcgcggatgtcgcctgcgcgggtcctctgttggccgccgagctagatgctctgggtaaggccctcaaagaacctgcacgcccgatggttgcgatcgtcggagggtctaaagtttctaccaaactgacggttcttgactctctgagcaaaatcgcggatcaacttattgtaggtggtggcatcgctaacacctttatcgctgcacaggggcatgatgtcggcaagtccctgtatgaagcggatcttgtggacgaagcaaaacgtctgctgactacttgcaacatcccggttccatccgacgtccgtgtggctacggaatttagcgaaactgcaccggcgaccttaaaatcggtaaacgacgttaaagcagacgaacagatcctggatattggtgacgcaagtgctcaggaactggctgaaattctcaaaaacgcaaaaaccatcttatggaacggtccggtaggcgtttttgaattccccaatttccgtaaaggcaccgaaatcgttgcgaatgctattgctgacagcgaggccttcagtatcgcaggcggtggtgacaccctggcggcaattgatctgttcggtatcgcggacaaaatctcatacatttccaccggtggcggcgcttttttggagttcgttgaaggcaaagttctgccggcagtggcgatgctggaggaacgtgctaagaaataa

SEQ ID NO: 2082 - DNA, 216 bp, Artificial Sequence
  Optimized genes for E. coli.
atgccagtaatcaaggttcgcgaaaatgaaccgttcgacgtggctctgcgtcgtttcaaacgcagctgcgagaaggctggtgttctggcagaagtccgtcgccgtgaattttacgaaaaaccgaccaccgagcgtaaacgtgccaaagcgtctgctgttaaacgtcacgcaaaaaaactggcgcgtgaaaacgcgcgccgcactcgtctgtattaa

SEQ ID NO: 2083 - DNA, 369 bp, Artificial Sequence
  Optimized genes for E. coli.
atgaaataccgcatcgcactggcggtgtcgctgttcgccctgagtgcgggtagctatgcgactaccctgtgccaggagaaggaacaaaacatcctcaaagagatctcatacgccgaaaaacaccagaaccaaaatcgtattgatggtctgaacaaggcactttctgaagttcgtgctaactgttccgattcccagttgcgcgcggatcatcagaaaaaaattgcaaagcagaaagacgaagtagcggaacgccagcaagatctggccgaagctaaacagaaaggcgacgctgacaaaatcgcaaaacgtgaacgtaagctggctgaagcacaggaggaattaaaaaaactggaagctcgtgactattaa

SEQ ID NO: 2084 - DNA, 306 bp, Artificial Sequence
  Optimized genes for E. coli.
atgtccaaagaacacactaccgagcatctgcgcgctgaactgaaatctctctcagatactcttgaagaggtgctgtcgagctctggcgaaaaaagtaaagaagagctgtccaaaatccgttctaaggctgaacaggcattaaagcagagccgttatcgtctgggtgaaacgggtgacgcgattgcgaaacaaacccgcgtggcagccgcacgtgccgacgaatacgttcgtgaaaacccgtggaccggtgtaggtattggcgctgcgatcggtgttgtcctgggcgttctgctgtcccgtcgctaa

SEQ ID NO: 2085 - DNA, 1488 bp, Artificial Sequence
  Optimized genes for E. coli.
atgaacaaagaaatcctcgctgtagtcgaagctgttagcaacgaaaaggcgctgcctcgggaaaaaatctttgaagcattggaaagtgcattggctaccgcaactaagaaaaaatacgagcaagagattgatgtgcgtgtacagattgaccgtaaatcgggtgatttcgacacttttcgtcgctggttagtagttgatgaagttacgcagcccaccaaagagattacgctcgaagcggctcgctacgaagacgaatccctgaatctgggtgattatgttgaagaccagatcgaatctgttacgttcgatcgtattactacacaaactgccaaacaggtaattgttcagaaagttcgtgaagcagaacgtgccatggtcgttgatcagtttcgtgaacacgaaggcgaaatcatcactggcgtagtgaaaaaagtgaatcgtgacaacatttccctggacctgggcaacaacgcggaagccgtaatcctgcgtgaagacatgctaccgcgtgagaatttccgccctggggaccgcgttcgcggcgttctgtactctgttcgcccggaagcccgtggtgctcagctgttcgtgacccgtagcaaaccggaaatgctgatcgaactgttccgtatcgaagtaccggaaatcggtgaagaggtcatcgagatcaaagccgcagctcgtgatccgggctctcgcgcaaagattgcagttaaaaccaacgacaagcgcattgatccagttggtgcatgtgtgggtatgcgtggtgcgcgtgttcaagctgtatccaccgagctgggcggtgagcgtattgatattgtcctgtgggatgataatccggcgcaatttgtaattaacgcgatggcgccagctgatgtggcgtcaatcgttgtcgatgaggataagcacaccatggatatcgcggtggaagcgggtaacttagcgcaggcgattggtcgcaacggccagaatgtgcgacttgcaagccagctgagcggttgggagctgaacgtgatgaccgttgatgatctgcaagctaagcatcaggcggaagcacacgccgctatcgacaccttcaccaaataccttgacatcgacgaagactttgctaccgttctggttgaggaaggcttctctaccctggaagaactcgcatatgtgccgatgaaagagctgctggagatcgagggcctggatgaaccgacagtggaagcgctgcgtgaacgtgcgaaaaacgccctggcaactattgctcaggcacaggaagaatctctgggcgacaacaaaccggccgacgatctgctgaacctggaaggcgttgaccgcgaccttgcgttcaaattggctgcccgtggagtctgcaccctggaagacctggctgaacagggtatagatgacctggctgacatcgagggcctgactgatgaaaaagccggtgctctgatcatggcagcacgcaacatctgctggttcggggacgaagcttaa

SEQ ID NO: 2086 - DNA, 312 bp, Artificial Sequence
  Optimized genes for E. coli.
atgtatgcagtgttccaatccgggggtaaacaacaccgtgttagcgagggtcagaccgtacgcctggaaaaactggacatcgctaccggtgaaactgttgaattcgcggaagttctgatgatcgcgaacggcgaagaagtcaagattggtgtaccgttcgttgatggcggcgttattaaagcagaggttgtggctcacggccgtggtgaaaaagtaaaaatcgtcaaatttcgccgtcgtaaacattaccgtaaacagcagggtcaccgccagtggtttacggacgtgaagattaccggcatctctgcctaa

SEQ ID NO: 2087 - DNA, 4461 bp, Artificial Sequence
  Optimized genes for E. coli.
atgctttatgataaatcgctcgaacgcgacaactgcggctttggcctcattgctcacatcgagggcgaaccgagtcataaagtagttcgcactgcgattcacgccctggcgcgtatgcagcatcgtggcgccatcttggcagacggcaagactggtgacggctgcggcctcctgctgcagaaacctgaccgcttcttccgcatcgttgctcaagaacgtggctggcgcctggctaagaactacgcagtgggaatgctgttcctgaacaaagaccctgagctggccgcggcggcccgccgtatcgtagaagaagagctgcagcgtgaaactctgtctattgtcggctggcgtgacgtcccgacaaacgaaggtgtattgggcgaaattgcactgtcttctctgccacgcattgaacaaattttcgtcaacgcgccggctgggtggcgcccgcgcgacatggagcgccgtctgttcatcgcccgccgtcgcatcgaaaaacgtctggaagcagataaagatttttacgtctgctctcttagtaacctggtgaatatctacaaaggcctgtgtatgccgaccgatctgccgcgtttttatttggacctggctgatctgcgattggaaagcgcgatttgcctgttccatcagcgtttcagcaccaacaccgtaccgcgttggccacttgcacagccgtttcgttacctggctcacaacggcgagatcaacaccatcactggtaatcgtcagtgggcacgcgcacgcacctacaaatttcagactccgctgatcccggacctgcatgatgccgcaccgttcgtcaacgaaaccggttccgattctagcagcatggacaacatgctggagctgctgctggccggcggtatggatatcatccgtgcaatgcgtctgctggtgccgccagcctggcaaaataacccagacatggatccggaactgcgtgcgttctttgactttaattccatgcatatggaaccgtgggacggtcctgctggcatcgttatgagtgacggccgtttcgccgcttgtaacctggatcgtaacggtctgcgcccggcacgttacgtaattactaaagataagctgattacgtgtgcgtctgaagtaggtatctgggattatcagccggatgaagtggtcgagaaaggtcgtgtaggcccgggtgaactgatggttatcgatacccgtagcggtcgtatcctccattccgcggagaccgacgatgatctgaagtcccgccatccatacaaagaatggatggaaaagaacgtccgtcgtctggttccgttcgaagacctgccagacgaggaagtaggtagccgtgaactggacgatgacactctggcgtcttatcagaagcagtttaactatagcgcggaagaactggactccgtgattcgcgttctgggtgaaaacggtcaggaagccgtgggttcgatgggcgatgacactccgttcgcggtgcttagcagccagccgcgcattatctatgattattttcgtcagcagttcgctcaggtgactaacccgccgatcgatccgttgcgtgaagcgcatgttatgtcactggctacctccattggccgggaaatgaacgttttctgtgaagccgaaggtcaggctcaccgtctgtctttcaaatcaccgatcctgctgtactctgacttcaaacagcttaccaccatgaaggaggaacactatcgtgctgacacgctggatattacgttcgatgttaccaagaccacactggaagcgaccgtgaaggagctgtgtgataaagctgaaaagatggtgcgtagtggtacagtactgctggtcctgtctgatcgtaacattgcaaaagatcgtctgcccgtgccagctcctatggcggttggagcgatccagacccgtctagtagatcagagcctgcgttgtgacgccaacatcatcgttgaaactgcgtcggcccgcgacccgcaccactttgctgtacttctcggctttggcgcaaccgcgatttacccctatctggcgtacgaaaccctcggtcgccttgttgatactcacgctatagcgaaagactatcgcaccgttatgctcaactaccgaaatggtatcaacaagggcctgtataaaatcatgtccaaaatgggtatttctacgatcgcttcgtaccggtgttctaaactgttcgaagcagtaggcctccacgacgatgttgttggtctttgcttccaaggcgcggtttctcgcatcggcggtgcgagctttgaggacttccagcaggacctgttaaacctgagcaagcgtgcatggctggcgcgtaaaccaatcagccagggcggtctattgaaatacgtgcatggcggggagtaccacgcctacaacccggacgttgtccgtacactgcaacaagcagttcagtccggcgagtattctgactaccaagaatatgcaaaactggttaacgaacgtccagctacgacgctgcgtgacctcctggcgatcacccctggtgaaaatgcggttaatattgcagacgttgaacctgcttccgagttattcaaacgcttcgatacggcagcgatgtccatcggagccctgagcccggaggcgcacgaggcccttgcagaagcgatgaactctattggtggtaattccaactcaggcgaaggtggtgaagatccggcgcgttacggtaccaacaaagtttctcgcatcaaacaggtggcttctgggcgtttcggtgttactccggcatatttagttaatgcagatgtgattcaaatcaaagtcgcgcagggcgcaaaaccgggtgaaggtggtcagctccctggcgacaaagttaccccgtacatcgctaaactgcgttactctgttccgggcgttactctgatttccccgccgccgcaccacgatatctactcgattgaggatctggctcagctgatcttcgacctgaaacaagtgaatccgaaagccatgatcagcgtaaaactggttagcgagccaggcgtcggtactatcgcaaccggtgtggctaaagcgtatgcggatttgattaccatcgcgggttacgacggtggtacaggcgcatccccgttgtcttctgtaaagtatgcaggctgcccgtgggaactgggtctggtagaaactcagcaggctctggttgctaacggtctgcgtcacaagattcgtttacaagtggatggcggtctgaaaaccggtgttgatattatcaaagccgccatcctgggtgctgaatcgttcggtttcggcactggaccgatggtagcactgggttgcaagtacctgcgcatttgccacctgaataattgcgctactggtgtcgcaacgcaagacgacaaactgcgcaaaaaccactaccacggcctgccgttcaaagttacaaattacttcgaatttatcgcccgcgaaacccgcgagcttatggcacagctgggcgttacgagactggttgacctgatcggtcgtactgatctgctgaaagaattagacgggttcacggccaaacagcagaaactggcgttatccaaactgctggaaaccgccgaaccccaccctggcaaagcgctgtattgcactgaaaacaacccgccgtttgacaacggcctgctgaatgcacaactgttgcagcaggctaaaccttttgtagatgaacgtcagtctaaaaccttctggttcgacatccgtaacactgaccgcagtgtaggcgcatctttatcaggttatattgcgcaaactcacggtgatcagggccttgctgcggatccaatcaaagcttactttaacggtacggcgggccagtccttcggtgtgtggaacgctggcggggtggaactgtacctgaccggcgacgcaaacgattatgtgggcaaaggtatggctggtggcctgatcgcgattcgtccgccagttggtagcgcttttcgtagccacgaagcatccattattggtaacacttgtctgtacggcgctaccggcggccgtttatacgcagcagggcgcgcaggtgagcgttttggtgtacgcaactctggcgctatcaccgtggttgaaggtatcggtgataacggttgcgaatacatgaccggcggcatcgtgtgcatcctggggaaaaccggcgttaacttcggagcaggtatgaccggtggtttcgcgtacgttctcgacgaatccggtgatttccgtaaacgcgttaacccggaactggttgaggtcctgtctgttgacgctctggcaattcacgaagaacatcttcgtgggctgattaccgaacatgttcaacatactggcagccagcgtggcgaagaaatcttggctaattggtcaacctttgctaccaaattcgctctggtgaaaccgaagtcaagcgatgtgaaagctctgctgggccaccgttcccgtagtgccgctgagctgagggtacaggcgcagtaa

SEQ ID NO: 2088 - DNA, 1419 bp, Artificial Sequence
  Optimized genes for E. coli.
atgtctcagaatgtgtaccaattcatcgatctgcagcgtgtggacccgcctaaaaaaccgctgaaaatccggaaaattgagtttgtagaaatctatgagccgttctctgaaggccaggcaaaagcgcaagcggaccgttgtctttcctgcggcaacccgtattgcgaatggaaatgccccgtccacaactatattcctaattggctgaaactggccaacgaaggccgtatcttcgaagcagctgaactgtctcatcaaaccaacaccttaccggaagtttgtggccgcgtatgcccacaggatcgcttgtgcgaaggctcctgtactctgaacgacgaattcggtgcagtaacgattggtaacattgagcgttacattaacgataaagcgttcgagatgggctggcgtccggatatgtcgggtgtaaaacaaaccggtaagaaagttgcaattatcggtgctggtccagccggtctggcttgcgccgacgttctgacccgcaacggtgtgaaagccgtcgtgtttgatcgccacccggagattggtggtctgttgacttttggtatcccggcgttcaagctggagaaggaagttatgacccgccgccgtgaaatcttcaccggcatgggcatcgaattcaaactcaacaccgaagtcgggcgtgacgttcagctggacgacctgctgtccgattacgacgcagtgttcctgggtgttggtacttaccagagcatgcgtggcggactggagaatgaagacgctgatggcgtttacgcagccctgccgtttctcatcgctaacaccaaacagctgatgggctttggcgaaacacgcgatgaaccattcgtttctatggagggtaagcgtgttgttgtactgggcggtggggatacggctatggactgcgtacgcaccagcgttcgtcagggtgctaaacacgttacgtgtgcgtaccgtcgtgacgaagaaaacatgccgggtagccgccgtgaagtcaagaacgctcgcgaagaaggcgttgagtttaagttcaatgtgcagccacttggcattgaagttaacggcaatggcaaagtctccggcgttaaaatggtgcgtactgaaatgggtgaaccggatgcgaaaggtcgtcgccgtgcggaaattgtggcaggttctgaacacatcgtcccggctgatgcagttatcatggcattcggttttcgtccgcataacatggaatggctggcgaaacattctgtagaattagacagtcaggggcgtatcattgctccggaaggtagcgataacgccttccagacttcaaaccctaaaatcttcgcgggtggcgatatcgttcgtggcagcgacctggtggtgactgcaatcgcggagggccgaaaagctgcggacggaatcatgaattggctggaagtataa

SEQ ID NO: 2089 - DNA, 393 bp, Artificial Sequence
  Optimized genes for E. coli.
atggctgaaaaccaatactatggtacgggtcgtcgcaaatcctcagccgcacgcgttttcattaaaccaggcaatgggaaaatcgtgatcaaccagcgttctctggagcagtatttcggccgtgaaaccgctcgtatggtagttcgtcagccgctggaactggttgatatggtggaaaaattggacctttacattaccgttaaaggtggcggtatcagcggtcaggcgggtgcaatccgccacggcattacccgtgccctcatggaatacgacgaatctctgcgctcggagctgcgtaaagcaggatttgtcactcgcgatgcgcgtcaggtagaacgtaaaaaagttggcctgcgcaaggctcgtcgtcgtccgcaattcagcaagcgctaa

SEQ ID NO: 2090 - DNA, 429 bp, Artificial Sequence
  Optimized genes for E. coli.
atgaagaccttcactgcgaagcctgagacagttaaacgcgactggtacgtcgtggacgcaaccggtaaaaccctgggtcgtcttgccacggaactcgcacgtcgcctgcgtggcaaacacaaagctgaatacaccccgcacgtagatacgggtgactatattattgttctgaacgcagataaagtcgcggttaccggtaataaacgcaccgataaagtttactaccaccatactggccatatcggcggcattaagcaggcaactttcgaagaaatgatcgcgcgtcgtccggaacgtgttatcgagatcgcggtaaaagggatgctgccgaaaggtccactgggccgcgctatgtttcgtaaattgaaagtgtatgctggtaacgaacataaccacgccgctcagcagccgcaagtgctggacatctaa

SEQ ID NO: 2091 - DNA, 939 bp, Artificial Sequence
  Optimized genes for E. coli.
atgaaagtagccgttctgggcgcagcaggtggtattggtcaagcccttgctctgctgctgaagacccagctgccgagtggctccgaattgtctctgtatgacatcgctccggtcacccctggcgtagcggtggacctgtctcacatccctaccgccgtaaaaattaagggtttttctggtgaagacgcaactccggctcttgagggtgctgatgttgtcctgatctccgcgggcgttgcacgtaaaccaggtatggatcgctcagacctgttcaacgtgaacgctggtatcgttaaaaacctggtacaacaggttgctaaaacctgccccaaagcatgcatcggcatcattactaacccggtgaacactaccgttgccattgctgcggaagttttgaaaaaagcaggagtatatgataaaaacaaactgttcggtgtgacgaccctggatattatccgcagcaatacctttgtggctgaacttaaaggtaaacaaccgggcgaagtagaagttccggtcattggcggtcattctggcgttaccatcctgccgttactgtcccaggttccgggggtcagcttcactgagcaggaagtagcggatctgacgaagcgtatccaaaatgcaggcactgaggttgtggaggcgaaagccggcggtggtagcgctaccctgtctatgggtcaggctgcggcgcgcttcggcctctctttagttcgtgcactgcagggtgaacagggtgtggttgaatgtgcatacgtggaaggtgatgggcagtacgcgcgtttctttagccagccactgctgctgggcaaaaacggtgtcgaggaacgtaaatcgatcggcacactctccgcgttcgaacagaacgcgctggaaggcatgctggacacgctgaagaaagacatcgccctgggcgaagaattcgttaataagtaa

SEQ ID NO: 2092 - DNA, 471 bp, Artificial Sequence
  Optimized genes for E. coli.
atggacatccgcaaaatcaagaaactgatcgaactggtagaagaatctggcatctctgaactggaaatctctgaaggtgaagaaagcgtgcgtatttcacgtgcagcgcctgccgcgtcgttcccagtaatgcagcaagcatatgccgcgccgatgatgcaacagccggcgcagtccaatgctgctgcgcctgctactgtgccgtccatggaagcaccggcggctgcggagatctccggccacattgttcgtagcccaatggttggtaccttttaccgcaccccgagtccggacgcaaaagcattcatcgaagttggccagaaagttaacgtaggtgatacgctgtgcattgtggaggctatgaagatgatgaaccagattgaggctgacaaaagcggtaccgtgaaagccattctggtcgagtctggtcagccggtcgaattcgatgaacccctggttgttatcgaataa

SEQ ID NO: 2093 - DNA, 297 bp, Artificial Sequence
  Optimized genes for E. coli.
atgtttgaacaacgtgtgaactctgatgttctgactgtttctacggttaactcccaggatcaagtaacccagaaaccgttgcgtgacagcgtcaaacaggcgctcaagaattatttcgcgcagttaaatggccaggacgtgaacgacctgtatgaacttgtactggccgaggttgaacagccgctgctggatatggttatgcagtacacccgtggtaaccaaactcgcgctgcactgatgatgggtatcaaccgcggcaccctgcgtaaaaaactgaagaaatacggtatgaactaa

SEQ ID NO: 2094 - DNA, 384 bp, Artificial Sequence
  Optimized genes for E. coli.
atgcgtcaccgtaaatccggccgccagttaaatcgtaactcgtcacatcgtcaagccatgttccgcaatatggctggcagtcttgtgcgtcacgaaatcatcaaaacgaccctgccaaaagctaaagaactgcgtcgcgttgtcgaaccgctgattaccctcgctaaaactgacagcgttgccaaccgtcgcctggcattcgctcgtacccgtgacaacgagatcgttgcgaagctgtttaacgaactgggccctcgttttgcatctcgcgcgggtggttacactcgtattctgaagtgcggtttccgcgcgggtgataacgctccgatggcatatatcgaattggtagatcgttccgaaaaagcggaagcggccgcagagtaa

SEQ ID NO: 2095 - DNA, 990 bp, Artificial Sequence
  Optimized genes for E. coli.
atgcaaggcagcgttactgaattcctgaaaccgcgcttggttgatatcgagcaggtatcctcgacccatgcaaaggtgactctggaaccgttagaacgtggttttggccataccctgggcaatgccctgcgccgtatcctgctgtcttccatgccaggatgcgcggttacggaggttgagatcgatggtgttctgcacgaatacagcacaaaagagggtgtgcaggaggacattttggaaatccttctgaacttgaagggcctggcagttcgcgtccagggtaaagacgaagtcattctcactctgaacaaatctggtattggcccggtgactgctgcagatatcacccacgacggcgatgtagagatcgtgaaacctcagcatgtaatttgccacctgactgatgaaaacgcctccatctctatgcgcatcaaagttcagcggggccgcgggtacgtccctgcttcaacccgtatccactctgaagaagatgaacgtccgattggtcgtctgctagtagacgcgtgttattctcccgttgaacgtatcgcgtacaatgtcgaagcagctcgtgtagaacaacgcaccgacctggacaaactggttattgaaatggaaaccaacggtacgatcgacccggaagaagcgatccgccgcgctgcgaccattctggctgaacagttagaagcattcgttgacctgcgtgacgttcgtcagccagaagtgaaagaggaaaaaccggaattcgatccaatcctgctgcgtccggtggatgatctggaactgacggtacgtagcgctaactgtctcaaagcggaagccatccactatatcggtgacctggtgcaacgtaccgaagttgaactccttaaaaccccgaacctgggcaagaaatctctgactgagattaaggatgttctggcaagccgtggcctgagtcttggtatgcgtctggaaaactggccgccggcgtccattgccgacgagtaa

SEQ ID NO: 2096 - DNA, 621 bp, Artificial Sequence
  Optimized genes for E. coli.
atggcacgttaccttggcccgaaactgaagttatcccgtcgtgaaggaaccgacctcttcctgaaatctggtgtgcgtgctatcgatacgaaatgcaagatcgaacaggcgccgggccagcacggcgctcgcaaaccgcgtctgtctgactacggcgtgcaactgcgtgagaagcagaaagtgcgccggatctatggtgtactggagcgccagtttcgtaactactacaaagaggcggctcgtttgaaaggtaacaccggggaaaacctgctggctctgcttgaaggccgtctcgacaacgttgtgtaccgcatgggcttcggtgcgactcgtgcagaagcacgccagctggttagccacaaagccattatggttaatggtcgtgttgtaaatattgcatcatatcaggtttctccaaacgacgtcgtatccattcgtgaaaaagccaaaaagcagagccgcgttaaagccgcactggaactggcggaacaacgtgaaaaaccgacttggctggaagtcgatgctggtaaaatggaaggtaccttcaagcgcaaacctgagcgctccgatctgagcgcggatatcaacgaacatctgatcgttgaactgtattcgaaataa

SEQ ID NO: 2097 - DNA, 390 bp, Artificial Sequence
  Optimized genes for E. coli.
atggcaaaagcgccgattcgtgcacgcaaacgcgtgcgtaaacaagtaagcgatggagttgcacacatccacgcgtctttcaacaacactattgttaccatcaccgaccgtcagggtaacgctctggggtgggccactgcgggcggtagcggtttccgtggttctcgtaagtccacgccgttcgcggctcaggttgctgctgaacgttgtgcggacgctgtgaaagagtacggcatcaaaaacctggaagttatggttaaaggccctggtccgggccgcgaatctactatccgtgccctgaatgccgcaggctttcgcattaccaatatcaccgatgtaacaccgatcccgcataacggctgccgtccaccgaagaaacgtcgcgtctaa

SEQ ID NO: 2098 - DNA, 117 bp, Artificial Sequence
  Optimized genes for E. coli.
atgaaggtgcgtgctagcgtcaaaaagctgtgccgcaactgtaaaatcgttaaacgtgacggcgtaattcgcgttatctgctctgcggaaccgaaacacaaacagcgtcaaggttaa

SEQ ID NO: 2099 - DNA, 1332 bp, Artificial Sequence
  Optimized genes for E. coli.
atggccaaacagccgggtctggattttcaatccgcgaaaggtggcctgggtgaactgaaacgtcgtctgcttttcgtgattggcgctctgatcgttttccgtatcggcagcttcatccccattccggggattgatgctgctgttctggcgaaactcctggagcaacagcgtggtaccattattgaaatgttcaacatgttctcgggcggcgctctttcccgtgccagcatcttcgcattgggtatcatgccgtatattagcgcaagcatcatcatccagttgctgacagtggtacacccgaccctggcggaaattaaaaaagagggtgaaagtggccgccgcaagatctctcagtatacgcgttatggtaccctcgtgttagccatatttcagtccatcggcatcgcaactggtttgccgaacatgcctggtatgcagggcctggttatcaacccaggctttgctttctatttcactgcggttgtttcgctggttacgggtaccatgttccttatgtggctgggcgaacaaatcactgaacgtgggattggcaacggtatttctatcattatctttgcgggtattgtggcgggattaccgccggctattgcccacactatcgaacaggcgcgtcagggcgacctgcacttcctggttcttctcctggtagccgtcctagtttttgcggttactttcttcgtagtcttcgtagaacgcggtcagcgccgtatcgtagtaaactacgcaaagcgtcagcagggtcgccgtgtgtatgcggctcagtctacccatctgcctctgaaagttaatatggcaggcgtgatcccggctatcttcgcatcttctatcatcctgttcccagctaccatcgcttcatggtttggcggtggcacaggttggaactggctgactactatttccctgtacctgcaacctgggcagccgctgtacgtactgttatacgcaagcgcaatcatttttttctgcttcttttacaccgcgctggtctttaacccgcgtgaaaccgcagacaatctgaagaaatctggtgcattcgtcccgggtatccgtccaggtgagcaaaccgcgaaatatattgacaaagttatgacccgcctgacgctggttggcgccctgtacattacgttcatctgtctgatcccggagttcatgcgtgacgctatgaaggttccgttttacttcggcggcacctccctgctcattgttgtcgtggtgatcatggattttatggcacaggtgcagaccctgatgatgagttcacagtacgaaagcgctctgaaaaaagcgaatctgaaaggatacggtcgctaa

SEQ ID NO: 2100 - DNA, 435 bp, Artificial Sequence
  Optimized genes for E. coli.
atgcgtttaaacacgctgtcaccggctgaaggttccaagaaagcaggtaagcgtctgggtcgtggtattggctcgggtctgggtaaaactggcggtcgcggtcacaaaggccaaaaatcccgttctggcggaggcgtacgtcgtggcttcgaaggcggccagatgccgctgtaccgccgtttgccgaaattcggtttcaccagccgcaaagcagcgatcaccgcagagatccgtctgagtgatctggctaaagttgaggggggcgtagttgacctgaataccctcaaagcggctaacattatcggtattcagatcgaatttgcgaaggtgattctggccggtgaagttactaccccagtgactgttcgcggtctgcgcgtcacaaaaggcgcccgtgcagctatcgaagcggcgggcgggaaaatcgaagaataa

SEQ ID NO: 2101 - DNA, 180 bp, Artificial Sequence
  Optimized genes for E. coli.
atggcaaaaaccattaaaatcacccagacccgttctgcgatcggtcgtctgccgaagcataaagctactctgctgggtctgggtctgcgtcgtatcggccacactgtcgagcgcgaagacacgccggcgattcgcggcatgatcaacgccgtgagcttcatggtaaaagttgaagaataa

SEQ ID NO: 2102 - DNA, 504 bp, Artificial Sequence
  Optimized genes for E. coli.
atggcacacatcgaaaaacaggcgggtgaactgcaagaaaagctgattgcggtgaaccgtgtatcaaagacagttaagggtggccgtattttctcgtttaccgcgttgaccgtcgttggcgacggaaacggtcgtgttggcttcggctatggtaaagcgcgtgaagtcccagctgcgatccagaaagcaatggaaaaagcccgccgtaacatgatcaatgtggccctgaacaatggcaccctgcagcatccggtgaaaggggtgcacaccggcagccgtgttttcatgcagccggcatccgagggtactggtattatcgccggtggcgcaatgcgcgctgtacttgaagttgctggtgttcacaacgttctcgcgaaagcttacggctccactaaccctatcaatgttgtccgtgcaacgattgatggtctggagaacatgaacagtccggaaatggtagctgctaaacgcggtaaaagcgtagaagagatcctgggcaaataa

SEQ ID NO: 2103 - DNA, 354 bp, Artificial Sequence
  Optimized genes for E. coli.
atggacaaaaaatctgcccgcatccgccgtgccacccgtgcacgtcgtaaactgcaggagcttggtgcgacccgtctggttgttcaccgtaccccgcgtcacatctacgctcaagtaattgcaccgaatggttccgaagtgctcgtagctgcgtctacggtcgaaaaagctatcgcagaacaactgaaatatactggcaacaaagatgcggccgctgccgttggtaaagctgttgcagaacgcgcgctggagaagggtattaaggacgtttcttttgatcgtagcggcttccagtaccatggccgtgtgcaggcgctggcagacgcggctcgcgaagcaggtttgcagttctaa

SEQ ID NO: 2104 - DNA, 534 bp, Artificial Sequence
  Optimized genes for E. coli.
atgtctcgcgtagcgaaggctccggttgttgtcccagcaggcgttgatgtgaaaatcaacggccaagtgattactatcaagggcaagaatggggaactgacccgtacactgaacgatgcagttgaagtgaaacacgctgacaacacgctgactttcggcccgcgtgacggctacgcagatggttgggcccaggcaggcaccgcgcgtgcgttgttaaactccatggtaatcggtgtgacggagggtttcactaagaaactgcagcttgtgggtgtaggctaccgcgctgctgtcaaaggaaatgttatcaacctgagcctgggtttttctcatccggttgaccaccaactccctgcaggtatcaccgccgaatgcccgactcagaccgaaattgtcctgaaaggtgccgataaacaggttattggtcaggtagcggctgacctgcgtgcgtaccgtcgtccggaaccgtataaaggcaaaggtgttcgttatgcggacgaagtagttcgcaccaaagaggctaaaaaaaaataa

SEQ ID NO: 2105 - DNA, 393 bp, Artificial Sequence
  Optimized genes for E. coli.
atgtccatgcaggacccgattgccgatatgctgactcgtatccgtaatggccaagctgccaacaaagcggcagttacgatgccaagcagcaagttaaaagtggcaatcgcgaacgttttgaaagaggaaggttttatcgaagacttcaaggttgaaggtgataccaaacctgaactggaacttaccctgaagtacttccagggcaaagcagtggttgagagtatccagcgcgtatcgcgcccgggcctgcgcatttacaaacgtaaagacgaactgccgaaagtaatggctggtctgggtatcgcggtggtttctacttctaaaggtgtcatgaccgatcgtgctgcacgtcaggcggggctcggcggcgaaattatctgctatgtcgcttaa

SEQ ID NO: 2106 - DNA, 306 bp, Artificial Sequence
  Optimized genes for E. coli.
atggccaaacagtcaatgaaagctcgtgaagttaaacgtgtagccctggcggataaatacttcgctaaacgtgcagaactgaaggctattatctctgatgtcaacgcgtcggacgaagaccgttggaatgcagttttgaaacttcaaactctgccgcgtgactccagcccaagtcgccagcgtaaccgctgccgccagaccggccgcccgcacggtttcctgcgtaaatttggtctgtcccgcatcaaagtgcgtgaagcggcaatgcgtggtgagattccgggcctcaagaaggcgagctggtaa

SEQ ID NO: 2107 - DNA, 540 bp, Artificial Sequence
  Optimized genes for E. coli.
atggctaaactccacgattactacaaagacgaggtcgtgaaaaagctgatgaccgaatttaactacaacagcgttatgcaggttccgcgcgtggaaaaaattaccctgaacatgggtgtaggggaggcgattgcggacaaaaaactgctggataatgctgcagccgacctggctgcgatctccggccaaaagccgttgattactaaggcacgcaaaagcgttgcaggcttcaagatccgtcagggttacccgatcggatgcaaagtaaccctgcgtggcgagcgcatgtgggaattttttgaacgtctgatcacaattgccgttccgcgtatccgcgatttccgtggtcttagtgcgaaatcgtttgacggccgtggtaactattccatgggtgtccgtgaacagatcatcttccctgaaatcgattatgacaaagtggaccgtgttcgcggcctggatatcactattactaccacggctaaatctgatgaagaaggtcgtgctctgttagcagccttcgacttcccattccgtaaataa

SEQ ID NO: 2108 - DNA, 315 bp, Artificial Sequence
  Optimized genes for E. coli.
atggcggctaaaatccgtcgtgacgatgaagttattgttctgaccggtaaggacaaaggtaagcgcggcaaagtgaaaaatgtactgtcttctggcaaggttatcgtggaaggcatcaatctggtcaaaaaacaccaaaaaccagtcccggcgctgaaccagccggggggtatcgttgagaaggaagcagctatccaggttagcaacgtggcgatttttaacgccgctactggcaaagcagaccgtgtaggtttccgtttcgaagatggtaaaaaagtacgctttttcaaatctaactccgagaccattaaataa

SEQ ID NO: 2109 - DNA, 372 bp, Artificial Sequence
  Optimized genes for E. coli.
atgattcaggagcagacgatgttgaatgtagcagataactccggcgcgcgccgcgtgatgtgtattaaagtactgggcggttctcaccgtcgttacgctggtgttggcgatatcatcaaaattaccatcaaagaggcgatcccgcgtggcaaagtgaagaaaggtgacgttctgaaagccgtcgttgttcgcaccaaaaagggcgtccgtcgcccggacggttctgttatccgtttcgacggtaacgcatgcgttctgcttaacaacaatagcgaacaaccaatcggtactcgtatttttgggccggtgacccgtgaactgcgtagcgaaaaattcatgaagattatctctctggctcctgaagtactctaa

SEQ ID NO: 2110 - DNA, 255 bp, Artificial Sequence
  Optimized genes for E. coli.
atgacggacaaaatccgtaccctgcagggccgtgtggtatctgataaaatggagaaatccattgttgtggcgatcgaacgctttgtcaagcacccgatttacggtaagttcattaaacgtactaccaaactgcacgttcatgacgaaaataacgaatgtggcatcggtgatgttgtggagatccgtgaatgccgcccgctgagcaaaactaaatcttggaccctggtacgtgttgtcgaaaaagcagttctgtaa

SEQ ID NO: 2111 - DNA, 192 bp, Artificial Sequence
  Optimized genes for E. coli.
atgaaagctaaagaacttcgtgagaagtccgtcgaagaactgaacaccgaattgctgaacttactgcgtgaacaattcaacctgcgtatgcaggcagcaagcggtcagctgcaacagtctcacctgctcaaacaggtacgtcgcgacgttgcccgcgttaaaactctgctgaatgagaaagcgggcgcgtaa

SEQ ID NO: 2112 - DNA, 411 bp, Artificial Sequence
  Optimized genes for E. coli.
atgttgcaaccaaaacgtaccaaatttcgcaaaatgcacaagggccgcaatcgcggtctggcacagggtaccgacgtgtctttcggttctttcggcctgaaagcggtgggtcgtggccgtctgactgcacgtcagatcgaggcggctcgtcgtgctatgactcgtgcagttaaacgtcagggtaaaatttggatccgcgttttcccggataagccgatcaccgagaaaccgctggctgtgcgcatgggcaaaggaaaaggcaacgtagaatattgggtcgctctgatccagccgggtaaagttctctacgaaatggacggcgtccctgaagaactggcacgtgaagcctttaaacttgcggccgcgaagctgccgattaaaaccactttcgttacgaagacagtaatgtaa

SEQ ID NO: 2113 - DNA, 702 bp, Artificial Sequence
  Optimized genes for E. coli.
atgggtcagaaagttcacccaaatggcattcgcctggggattgttaaaccatggaactccacgtggttcgctaacaccaaagaattcgcagacaatctggacagtgatttcaaagtacgccagtatctgactaaagaactggccaaggcttctgtgtctcgtatcgttattgaacgtcccgcaaagagcatccgtgtaactatccacaccgctcgtccgggaattgttattggtaagaaaggtgaggatgtggaaaaattacgcaaagttgtggcagatatcgctggtgtacctgcgcaaatcaacatcgcggaggttcgtaaaccggaactggacgccaagctggttgccgacagcatcacctcccagctggaacgtcgcgtcatgtttcgtcgtgctatgaaacgtgcagtgcaaaacgccatgcgcctcggtgctaaaggcatcaaagttgaagtctcgggtcgtttgggcggcgcggagatcgctcgtaccgaatggtatcgtgaaggtcgtgtgccgctgcacactcttcgtgcggatatcgactacaacacatcagaagcgcatacgacctacggcgttatcggcgtcaaagtgtggatttttaagggcgagattctgggcggtatggcagcggtagaacagccggaaaaaccggcagcgcagccgaaaaaacagcagcgcaaaggtcgcaaataa

SEQ ID NO: 2114 - DNA, 333 bp, Artificial Sequence
  Optimized genes for E. coli.
atggaaaccattgccaaacaccgtcacgctcgttcctccgcacagaaggtccgcttggttgcggatcttatccgtggcaaaaaagtttcacaagcgctggacattctgacttacactaacaaaaaagccgctgttctggttaaaaaggtactggaatcggctattgcaaacgctgaacacaatgatggcgcggatatcgacgacctgaaagtcaccaaaatcttcgtagacgagggtccgagcatgaaacgtatcatgccgcgtgcaaaaggtcgtgcggaccgtatcctgaagcgcacctctcatatcacggtggtggtgtctgatcgctaa

SEQ ID NO: 2115 - DNA, 279 bp, Artificial Sequence
  Optimized genes for E. coli.
atgcctcgtagccttaaaaaaggtccgtttattgacctccacctgctgaaaaaagtcgagaaagcggtagaatctggcgataaaaagccgctgcgtacttggtcccgtcgttctaccattttcccaaatatgatcggtctgactatcgcagttcacaacggtcgccagcatgtgccggttttcgtgacggacgaaatggttggccacaaactgggcgaattcgctccgacccgcacctaccgtggtcatgcagcggataaaaaagctaagaagaaataa

SEQ ID NO: 2116 - DNA, 822 bp, Artificial Sequence
  Optimized genes for E. coli.
atggccgttgttaaatgcaaaccaactagcccgggccgccgtcacgttgtgaaagtagtaaatccggaactgcataaaggtaaacctttcgcgcctctgctggaaaaaaactcgaaaagcggcggccgtaacaataacggtcgcattaccacgcgccacattggcggtggccataaacaagcgtaccgtatcgtggacttcaaacgtaataaagatggaattccggctgtagtcgagcgcctggagtacgatccgaatcgcagtgcgaacatcgcactggtactctacaaagatggcgaacgccgctatatcttagcacccaaaggcctgaaggctggcgaccagatccagtctggtgtggatgcggctatcaaaccgggtaacactcttccgatgcgtaacatcccggttgggtctactgttcacaacgtggagatgaagccgggtaagggcggtcagctggcgcgttccgcaggtacctatgttcaaattgttgctcgcgacggggcgtacgttaccctgcgtctgcgttctggtgaaatgcggaaagtcgaagccgactgtcgtgcaaccttgggtgaagttggtaacgccgaacacatgctgcgtgtcctgggcaaagcgggtgctgctcgatggcgtggcgtgcgtccaacagttcgcggtaccgcaatgaacccggtcgaccacccgcatggcggcggtgaaggccgtaactttggtaagcacccagtgaccccgtggggcgtacagacgaagggtaaaaaaacccgttccaacaaacgcactgataaattcatcgtgcgtcgtcgtagcaagtaa

SEQ ID NO: 2117 - DNA, 303 bp, Artificial Sequence
  Optimized genes for E. coli.
atgattcgtgaggaacgtctgctgaaagtgctgcgcgctccgcacgtatccgagaaagcctctaccgcaatggaaaaaagcaataccatcgtgctgaaagtggctaaagatgccacgaaggctgaaatcaaagcagcggtacagaagcttttcgaagtcgaagttgaagttgttaacaccctggtagttaagggtaaagtcaaacgtcatggccaacgtattggtcgtcgctctgactggaaaaaagcatacgttactttgaaagagggtcagaacctggactttgttggcggcgcggaataa

SEQ ID NO: 2118 - DNA, 606 bp, Artificial Sequence
  Optimized genes for E. coli.
atggaactggtcttaaaagatgcgcagagcgccctgacggtttccgaaactacattcggccgcgacttcaacgaggctctggtgcaccaagttgttgttgcttacgccgctggcgcgcgtcagggcacccgtgcacagaagacgcgcgcggaagttaccggttccggcaaaaagccgtggcgccagaaaggcaccggccgtgcacgttctggttctattaaatcaccgatctggcgttcgggtggtgtcactttcgcggcacgcccgcaggaccacagccagaaagttaacaaaaagatgtatcgcggtgctttgaaatccatcctgagcgaactggtacgtcaggaccgtctgatcgtggttgaaaaattctctgtggaagcgcctaagactaaactgctggcacaaaaacttaaagatatggccctggaagatgttctgatcatcaccggagaactggatgagaacctgtttctcgcggctcgtaatctgcataaagtggatgtgcgtgacgcaaccgggattgacccagtaagtctgattgcgtttgataaagtagttatgactgccgacgctgtaaaacaagtcgaagagatgctggcataa

SEQ ID NO: 2119 - DNA, 630 bp, Artificial Sequence
  Optimized genes for E. coli.
atgatcggcctggttgggaagaaagttggcatgacccgcatctttaccgaagacggtgtaagcattcctgttactgtgatcgaagtggaagctaatcgtgtcactcaggttaaggacctggccaatgatggctaccgcgcgatccaagtaactaccggcgcgaaaaaagcaaaccgtgtgaccaagccggaagcaggtcacttcgccaaagccggtgtagaggcgggccgtggtttgtgggagttccgtttagcggagggtgaagaatttacagtgggccagtctatttcggtagaactgttcgcagatgttaagaaagttgacgtgaccggcacctccaaaggcaaaggtttcgctggcacggttaaacgttggaactttcgcacccaggacgcaactcatggtaactctctgagccaccgtgtgccgggttcaatcggtcagaaccaaacgccgggcaaagttttcaaaggtaaaaaaatggctgggcagatgggtaacgaacgtgtgaccgtccagagtctcgacgttgttcgcgtagatgctgaacgtaacctgcttctggtaaaaggcgctgtcccaggagcgactggttctgatctgattgtcaaaccggcagttaaagcgtaa

SEQ ID NO: 2120 - DNA, 312 bp, Artificial Sequence
  Optimized genes for E. coli.
atgcagaaccaacgtatccgtatccgtcttaaagcttttgaccaccgcctcattgatcaggctaccgccgaaatcgtcgagacagcaaagcgtactggcgcgcaggttcgtggtcctatcccgttaccgacccgtaaagaacgcttcaccgttctgatctctccgcacgtaaataaagatgctcgcgaccagtacgaaatccgtactcatctgcgtctggttgatattgttgaaccaaccgagaaaacggtggacgcgttgatgcgcctggatctggcagcgggcgtggacgtacaaattagcctgggttaa

SEQ ID NO: 2121 - DNA, 2115 bp, Artificial Sequence
  Optimized genes for E. coli.
atggcccgcactacaccgattgcacgttaccgcaacatcggaatctcggctcacatcgacgcaggtaaaactaccaccaccgaacgtatcctgttctacactggcgttaatcacaaaatcggcgaagttcatgatggcgcggcaactatggattggatggaacaggaacaggaacgtggtatcaccattacttccgcagcgacaaccgcattctggtccggtatggcgaaacaatacgaaccgcatcgcatcaacatcatcgataccccaggtcacgtcgactttaccattgaagttgaacgttccatgcgcgtgctggacggtgctgttatggtttattgcgcagtgggcggtgttcagccgcagtcggaaactgtgtggcgtcaggccaacaaatacaaggtgccacgtatcgcgttcgttaacaagatggaccgtatgggcgcaaactttctgaaagtggttaaccaaattaaaactcgtctgggtgctaacccggtcccactgcaactggcgattggtgcagaagaacacttcaccggtgtggtcgacctggtaaaaatgaaagctatcaactggaacgacgcagaccaaggtgttacctttgaatatgaagacatcccggcggacatggtagagctggctaacgaatggcatcagaatctgatcgagagcgccgccgaagcgtctgaggagttaatggaaaagtacctgggtggcgaagagctgacggaagctgaaattaaaggtgcgcttcgccagcgtgttcttaacaatgaaatcatcctggtaacgtgcggttctgccttcaaaaacaaaggtgtacaggctatgttggatgcagttattgactacctcccgtctcctgtggacgttcctgccatcaacggtattctcgatgacggcaaagacaccccggcagaacgccacgcgtccgatgacgaaccgttctctgcactcgcgttcaagatcgctaccgacccgttcgtgggcaacctgaccttctttcgtgtttactccggtgtggtcaactctggcgataccgttctgaacagcgttaaagcggctcgtgaacgcttcggccgtatcgttcagatgcacgccaacaaacgggaagagattaaagaggtccgtgcgggtgatatcgcggcggctattggtctgaaagacgtaaccaccggtgatactctgtgtgatcccgatgcgccaatcatcctggaacgtatggagttcccggaaccggtaatttctatcgcagttgagccgaagacgaaagctgatcaagaaaaaatgggcctggcgctggggcgtctggccaaagaggacccgtccttccgcgtgtggactgatgaagaatctaatcagaccattatcgctggtatgggtgaactacacctggatattattgtagatcgcatgaagcgcgagtttaacgttgaagcaaatgtaggcaaaccgcaggtagcatatcgcgagactatccgtcaaaaggtaactgatgtggagggcaaacacgctaaacagagcggcggtcgtggccagtatggtcacgttgtcattgacatgtatccactggaaccgggttctaacccaaaaggctacgaattcatcaatgatatcaaaggcggcgtaatcccgggcgaatacattccggccgttgacaaaggtatacaggaacagctgaaagcgggtcctctggctggctatccggtggtggatatggggatcagactgcatttcggcagctaccacgatgtggacagctctgaactggcattcaagcttgctgcgagtatcgcgttcaaagaaggctttaaaaaagctaaacccgtcctgttggagcctattatgaaggttgaagttgaaaccccggaagaaaacacgggcgacgttattggcgatctgtcacgtcgccgtggtatgttgaaagggcaggaaagtgaagtcaccggggtaaaaattcatgctgaagtcccgctgtccgaaatgtttggctatgcgacacagctgcgtagcttaacgaaaggacgtgcctcatacaccatggagtttctgaagtacgatgaggctccgagcaatgtggcacaggccgttatcgaagctcgaggtaaataa

SEQ ID NO: 2122 - DNA, 540 bp, Artificial Sequence
  Optimized genes for E. coli.
atgcctcgccgtcgtgttattggtcagcgtaaaatcctgccagatccgaaatttggttctgaactcctggcaaaattcgttaacatcctgatggtagacggtaaaaaatctaccgctgaatcaatcgtttattcggcgttggagacgctggcacagcgcagcggtaaatctgaacttgaggcgttcgaagtcgcactggaaaacgttcgtccgaccgttgaagtaaaaagccgtcgcgtaggcgggtccacttaccaggtgccggttgaggtgcgcccggtccgtcgtaacgctctggctatgcgttggattgtggaggccgcccgtaagcgtggtgacaaaagtatggccctgcgtctggcgaacgaactgtctgatgctgcagaaaataaaggcaccgccgtgaagaaacgtgaagacgttcaccgcatggctgaagcaaacaaggcgttcgctcactatcgttggctgagcctgcgctccttttctcatcaagcgggcgcaagctccaaacagccggcgttaggctacctgaattaa

SEQ ID NO: 2123 - DNA, 375 bp, Artificial Sequence
  Optimized genes for E. coli.
atggcgacagtaaaccagctggttcgcaaacctcgcgcccgtaaggtagcaaaatctaatgtgccggctctggaggcgtgtccgcagaaacgtggcgtttgcacccgtgtgtacaccaccactccgaaaaaaccgaacagcgctcttcgtaaggtttgccgtgtacgtctcacgaacggtttcgaagtgaccagctatattggtggtgaaggtcacaacctgcaggaacattctgtcatcctgatccgtggcggtcgcgttaaagacctgccgggcgtgcgttaccacactgtccgtggcgctttggactgttccggggttaaggatcgtaaacaagcgcgctctaaatatggcgttaaacgcccaaaagcataa

SEQ ID NO: 2124 - DNA, 633 bp, Artificial Sequence
  Optimized genes for E. coli.
atggtcttgggtaaaccgcagaccgatcctactctggaatggttcctgagccactgccacattcataagtatccgtctaaatccacgctgatccaccagggcgaaaaagcagagaccctgtattacatcgtgaaagggtcagtagctgttttaatcaaagacgaggaaggcaaggaaatgatcctgtcgtaccttaaccagggtgactttattggcgaactgggattgttcgaggaaggtcaggaacgtagcgcgtgggtacgtgcgaaaacagcgtgtgaagttgcagaaatcagttacaaaaaattccgccagctgatccaagtcaacccggatatcctcatgcgtctgagcgcgcagatggcccgccgtctgcaggtgacttctgagaaagttggtaacctggcttttctggatgtgactggccgtattgcacagaccctgctgaatctggccaagcaaccagacgctatgacccatccggatggtatgcaaattaaaatcacgcgtcaagaaattggtcagatcgttggctgctctcgcgaaactgtaggtcgcatccttaaaatgctcgaagaccagaacctgatctccgctcacggcaaaaccattgttgtttacggcacccgttaa

SEQ ID NO: 2125 - DNA, 1104 bp, Artificial Sequence
  Optimized genes for E. coli.
atgaaaaacgtcggtttcatcggttggcgtggcatggtgggtagcgtgctgatgcagcgtatggtagaagaacgtgacttcgacgccatccgcccggtatttttctcaaccagccaactgggccaagctgcgccgtcgtttggtggcacaaccggtactctgcaggatgcgttcgatctggaagcactgaaagcgctggacatcattgttacctgtcaaggcggcgattacactaacgaaatctacccaaaactccgcgaatctggatggcagggttattggatcgatgcggcatcttcattgcgtatgaaagatgatgctatcatcattctggatcctgttaaccaggatgtgattacggacggtctgaataacggtatccgtaccttcgttggcggcaattgcaccgtctccctgatgctgatgagccttggtggtctgtttgcaaacgacctggttgattgggtctccgttgcgacttatcaggctgcttctggtggcggcgctcgtcacatgcgcgaactgctgactcagatggggcatctgtacggtcacgttgccgatgagctggccacgcctagctccgcaattcttgatatcgagcgcaaagtgactacgctgacgcgcagcggggagttgccggttgacaacttcggcgtaccgctggctggctccctgatcccatggatcgacaagcagctggacaatggccaaagtcgtgaagagtggaaaggccaggcggagaccaacaaaattctcaacacctctagtgtgattccagttgacggtttatgcgtacgtgtaggcgctctgcgttgtcactctcaggcattcaccattaagctgaaaaaggacgtttctattccgaccgtcgaagaactgctagctgcacataacccgtgggcgaaagttgtgccgaacgaccgtgaaatcaccatgcgcgaactgactcccgccgctgtaaccggtaccttaaccactccggtgggtcgtctgcgtaaactcaatatgggtccggaattcttgtcggcctttactgttggtgaccagctgctgtggggcgcggcagaaccgctgcgtcgcatgctgcgtcagcttgcataa

SEQ ID NO: 2126 - DNA, 1104 bp, Artificial Sequence
  Optimized genes for E. coli.
atgaacatcaaaggtaaggctctgctggccggttgcattgctttggccttctctaacatggcactggcggaagatattaaggtcgctgttgtgggcgctatgtccggacccgtggcacagtacggcgatcaggaatttaccggcgcggaacaggcagtggcggacatcaacgccaaagggggtattaaaggcaataaactgcagattgtcaaatatgacgatgcgtgcgatccaaaacaggcagttgcggtagcgaacaaagttgttaacgacggtattaaatacgttatcggtcacctttgttccagcagcacgcagccggcttcagatatctatgaggacgaaggtatcctgatgattactccggcggcgactgcccctgaactgaccgctcgtggctaccagctgatcctgcgcactactggtctggatagcgaccagggtccgacggctgcgaagtatattctggaaaaagttaaaccgcaacgtatcgcaatcgtacatgataaacagcagtatggtgagggtctggctcgtgcggtccaagatgggctgaaaaaaggtaacgccaacgttgtgtttttcgatggcatcaccgcgggtgaaaaagacttttctacactcgtagcacgtctgaaaaaagaaaacatcgacttcgtgtactatggcggttaccacccggaaatgggccagatcctccgccaggcccgtgcagcaggcctgaagacccagttcatgggcccagaaggcgtggcaaatgtttctctttccaacatcgctggtgagtctgcagaaggtctgctggtgaccaagccgaaaaactacgaccaagtacctgctaacaaaccaatcgttgatgcaattaaagctaaaaaacaggacccgtcgggtgcgttcgtttggaccacttacgcggctctgcaatctctgcaggccggcctgaatcaaagcgacgatccggcagaaatcgcgaaatacttgaaggctaacagtgtagacaccgtcatgggcccgctgacctgggatgaaaagggcgacttaaaaggtttcgagttcggtgtatttgactggcacgctaatggcaccgcaacggatgccaaataa

SEQ ID NO: 2127 - DNA, 435 bp, Artificial Sequence
  Optimized genes for E. coli.
atggcatataaacacatcctgatcgcggtagatctgtcgccggaatccaaggtgttagtagaaaaagccgtgagcatggcacgtccgtacaacgctaaagtgtctctgattcatgttgacgttaactactcagatctttatacaggtctgattgatgttaatctgggcgatatgcagaagcgcatctctgaagagacccaccatgcgctcacggaattgagtactaacgctggctacccgatcaccgaaaccctgtccggtagcggtgacctgggccaggtcctggtcgatgctatcaaaaaatacgacatggacctggttgtatgcggtcatcaccaagacttctggagcaaactgatgtcctctgcgcgtcagctgattaacactgttcacgtggacatgctgatcgttccactgcgtgatgaagaagagtaa

SEQ ID NO: 2128 - DNA, 333 bp, Artificial Sequence
  Optimized genes for E. coli.
atgaaaaaagttctgggtgtaatcctgggtggcctgctgctgttgccagttgttagcaacgctgcggacgcacagaaagcagcggataataaaaagcctgtcaactcttggacctgcgaagatttcctggctgttgatgaatccttccagccgacggcagtgggcttcgctgaagctcttaacaataaagataagccggaagacgcggtcctcgatgttcagggtatcgcaaccgtaaccccggccattgtgcaagcgtgtactcaggacaaacaagccaactttaaagacaaagtgaagggcgagtgggacaaaattaaaaaagacatgtaa

SEQ ID NO: 2129 - DNA, 252 bp, Artificial Sequence
  Optimized genes for E. coli.
atggcgaacgtagaaatttacaccaaggagacttgcccatattgtcaccgtgcgaaagcattgctttcttccaaaggcgtttcttttcaggaactgccgatcgacggtaatgctgccaaacgcgaagaaatgatcaaacgcagcggtcgtacgaccgtgccgcagatcttcattgatgcacaacatatcggcggctgcgacgatctgtacgcgctggatgctcgtggtggtctcgacccgctgctgaaataa

SEQ ID NO: 2130 - DNA, 168 bp, Artificial Sequence
  Optimized genes for E. coli.
atggcgaaaggtatccgcgaaaagattaaactggtaagctctgcaggtaccggccatttttatactaccaccaaaaacaaacgtacgaaaccggaaaaactggaactgaaaaagttcgacccggtggttcgtcagcacgttatctacaaagaggctaaaattaagtaa

SEQ ID NO: 2131 - DNA, 237 bp, Artificial Sequence
  Optimized genes for E. coli.
atgtctcgtgtttgccaggttaccggtaaacgtccggttaccggtaacaatcgctctcatgcactgaacgctacgaaacgtcgtttcctgccgaacctgcactctcaccgtttttgggtggaatccgaaaagcgcttcgtcaccctgcgtgtgagcgccaaaggtatgcgcgtaatcgataaaaagggcattgacactgtactggcggaactgcgtgcgcgcggcgagaaatactaa

SEQ ID NO: 2132 - DNA, 276 bp, Artificial Sequence
  Optimized genes for E. coli.
atggctcgcgtcactgttcaggacgctgtagaaaagattggtaaccgtttcgatctggttctggttgcagctcgtcgtgcccgtcagatgcaggtgggcggtaaagacccgctcgttccggaagaaaacgataaaaccaccgtgatcgcgctgcgtgaaatcgaggaaggcctgatcaataaccaaattcttgacgtacgtgaacgccaggaacagcaggaacaagaagcagcggagctgcaggccgttacggcgatcgcagagggtcgtcgctaa

SEQ ID NO: 2133 - DNA, 99 bp, Artificial Sequence
  Optimized genes for E. coli.
atgactaccagcatgctgaacgctaaactgctgccgaccgccccgtctgcggcggtagttgttgttcgtgtcgtagtggttgtgggtaatgcaccataa

SEQ ID NO: 2134 - DNA, 141 bp, Artificial Sequence
  Optimized genes for E. coli.
atgaaacgtacttttcaaccgtccgttctgaaacgcaatcgcagccacggcttccgtgcgcgtatggctaccaagaacggtcgtcaggtactggcacgtcgtcgtgccaaaggtcgcgcgcgcctgaccgtgtctaaataa

SEQ ID NO: 2135 - DNA, 1371 bp, Artificial Sequence
  Optimized genes for E. coli.
atgctgaacaacgcgatgtcggtcgttattctggcagcaggcaaaggtactcgcatgtacagcgatctgccgaaagtgctgcatactctggcaggcaaagctatggtccagcatgttattgatgcagcgaatgaactgggtgctgcacacgttcacctggtttatggtcacggtggagatctgctgaaacaggcgctgaaagacgataatctgaactgggtgcttcaggcagaacagcttgggaccggtcacgctatgcagcaagctgcgcctttcttcgctgacgacgaggatatccttatgctgtacggtgatgttccgctgatcagtgtggagaccctccagcgcctgcgtgatgctaaacctcaaggtggcatcggtctgctgactgtaaaactggatgacccgacgggctacggccgtattacccgtgaaaacggcaaagtaactggcatagttgaacacaaggatgcgacggacgaacaacgtcaaatccaggagattaacaccggtatcttgatcgcaaacggcgcggatatgaagcgttggctggcaaagctcactaacaacaacgcgcagggtgagtactacatcaccgatattatcgctttagcgtatcaagaaggtcgcgagattgtcgctgttcacccgcagcgcctgtcagaggtcgaaggcgtcaacaaccgtctgcagctgagccgtctcgaacgggtatatcagtccgaacaggccgaaaaactactgctggctggcgtgatgctgcgtgacccggcgcgcttcgacctgcgcggtaccctgacccacgggcgtgacgttgaaatcgacactaacgtaatcattgaagggaatgtaactctgggtcatcgtgttaaaatcggcacaggctgtgtgattaaaaactccgtgattggcgacgattgcgaaatctctccgtacaccgtggtagaagacgcaaatctggccgccgcgtgtacaatcggtccatttgcacgtttgcgtccgggcgctgaattactggagggtgcacatgtgggcaattttgttgaaatgaagaaagctcgtctgggtaagggctctaaagcgggccacctgacctacttgggcgacgctgaaatcggtgacaatgttaacattggtgcgggtaccatcacctgcaactatgatggcgccaacaagttcaaaacgatcatcggcgacgacgtgttcgttggttctgatacccagctggttgctcccgttacggtaggtaaaggtgccaccattgccgcgggaaccactgttactcgtaacgtcggtgaaaacgccctggcaatcagccgcgtaccacagacccagaaagaaggctggcgtcgcccggtgaaaaaaaaataa

SEQ ID NO: 2136 - DNA, 864 bp, Artificial Sequence
  Optimized genes for E. coli.
atggcaggtgccaaagagatccgttctaaaatcgcttctgtccagaacacccaaaagatcacgaaggcgatggaaatggttgcagcctctaaaatgcgtaaaagccaagatcgtatggcggctagtcgcccgtatgcggagaccatgcgtaaagttattggtcacctggcccatggcaacctcgaatacaaacacccgtacctggaagaccgtgatgttaagcgcgttggctaccttgtagtttccaccgatcgtggcctgtgtggtggtctgaatatcaatctgttcaaaaaattactggcagagatgaaaacatggactgacaaaggtgtccaatgcgacctcgcaatgatcggttcaaaaggcgtgagtttctttaacagcgtgggcggcaacgtcgtcgctcaggtaactggtatgggcgacaacccgtcgctgagcgaactgatcggaccagtaaaagtgatgctgcaggcttatgatgaaggccgcctggacaaactgtatatcgtttctaacaaattcattaatactatgtcccaggttcctaccatctcgcagttgctgccgttgccggcgtccgacgacgacgatctgaaacacaaatcatgggattacttatacgaaccagacccgaaagcgctgctggataccctgctgcgtcgttacgtggaaagccaagtatatcagggtgtggtagagaacctggcgtctgaacaggcagcacgtatggtggctatgaaggccgctactgataacggtggctctctgattaaagaactgcagctggtttacaacaaggcacgccaggcgagcattacgcaggaacttaccgaaattgtttccggggctgctgcggtttaa

SEQ ID NO: 2137 - DNA, 1542 bp, Artificial Sequence
  Optimized genes for E. coli.
atgcagctgaactccaccgagatcagtgaactgattaaacagcgcattgcgcaatttaatgtcgtatccgaagcacacaacgaaggcactatcgtttctgtttctgacggtgttatccgcattcacggtctggcggattgcatgcaaggtgaaatgatttcgctgccgggtaaccgctacgcgatcgcactgaacctagagcgcgattcggtcggcgctgtggttatgggtccgtacgctgatctggccgagggcatgaaggtgaagtgtacggggcgtatcctggaagttccggttggccgcggcctgctgggccgcgttgttaatacactgggagctccgatcgatggtaaaggcccgctggatcacgacggttttagcgcggtcgaagcgattgcgccgggtgtcatcgaacgtcaaagcgtagatcagcctgttcagactggttataaagcggttgactcaatgatcccaatcgggcgcggccagcgtgaactcatcatcggcgaccgtcagacgggcaaaactgcactggcgatcgacgcaatcatcaaccagcgtgactctggtattaaatgtatctacgtagctatcggccaaaaggccagcaccatttctaacgtggttcgtaagcttgaagaacatggtgccctggctaataccatcgtagtggttgctaccgcctccgaatccgcggcacttcagtacctggctccgtacgctggctgcgcaatgggtgaatacttccgtgaccgtggtgaagacgctctgatcatctatgacgacctgtccaaacaggccgtggcttatcggcagatcagcctcctgcttcgtcgtccgccaggtcgagaggcgtttccgggcgatgtgttctacctgcactctcgcttgctggagcgtgcagctcgtgtaaacgcggaatatgttgaagcgttcaccaaaggggaagttaaaggtaagaccggtagcctgaccgcgctgccgatcattgagacgcaagccggtgatgtttcagctttcgtgccgacaaacgtgatttccattaccgatggccagatcttcttagaaaccaacttgttcaacgcgggaatacgtccagcagtgaaccccggcatttctgtcagtcgtgtaggcggtgcggcgcagaccaaaattatgaaaaaactgagcggtggcattcgcactgccttggcacaataccgtgagctggcagcattttctcagttcgcttctgacctggatgatgcaactcgcaaacagctggaccatggtcagaaagttactgaacttctgaaacagaagcagtacgcgccgatgtccgtggcacagcagagcctggtactgttcgctgccgaacgtggctacctggccgacgtcgaactgtctaaaattggttctttcgaagcagctctcctggcttatgtagaccgtgatcatgcacctctgatgcaagaaatcaatcagactggcggctataacgatgaaattgagggtaaactgaaaggcatcttagattcgtttaaagccacccagagctggtaa

SEQ ID NO: 2138 - DNA, 534 bp, Artificial Sequence
  Optimized genes for E. coli.
atgtcagaatttattactgttgcacgcccgtacgcaaaagctgcgtttgacttcgctgtagagcaccagtccgttgaacgttggcaggatatgctggctttcgcagcagaagtaaccaaaaacgaacaaatggcggagctgctgagcggtgcgctggcgccagagaccttagcggaatcgttcatcgcggtctgtggcgaacagttggacgaaaatggtcagaatctgatccgtgtcatggccgaaaacggtcgtctgaacgctcttccggatgttctggaacagttcatccatctgcgcgctgtgagcgaagcgacggcagaagtagatgttatctctgcagccgccctgtccgaacaacagctggctaaaatctctgcagcgatggaaaagcgtctgtcccgtaaagtgaaactgaactgcaaaatcgacaagtctgttatggccggcgttattattcgcgctggtgacatggtgattgatggtagcgtgcgtggccgcctggagcgtctcgctgacgttctgcagagttaa

SEQ ID NO: 2139 - DNA, 240 bp, Artificial Sequence
  Optimized genes for E. coli.
atggaaaacctgaatatggacttactgtacatggcagctgcggttatgatgggtctggctgccatcggtgcagcgatcggtattggtatcctgggcggtaaattcctggagggcgcggctcgccaaccggacttgatcccgctgctgcgtacccagttcttcattgttatggggctggtagatgccatcccaatgattgcggtgggcctgggcctttatgttatgtttgcagtcgcttaa

SEQ ID NO: 2140 - DNA, 816 bp, Artificial Sequence
  Optimized genes for E. coli.
atggccagcgaaaacatgaccccacaggattacattggtcatcacctcaacaacctgcagctggacttgcgtactttctctctggttgatccacagaacccgccggcgactttctggactattaacatcgactccatgttcttttctgtcgttctgggtctgctctttctggttctgtttcgttcggttgcaaagaaagctaccagcggcgtcccgggcaaattccagaccgcaatcgaactggtaattggtttcgtgaacggttctgtaaaagacatgtaccatggtaaatcaaaactgatcgcgccgctggcactaacgattttcgtatgggtgttccttatgaatctgatggatttactgccaatcgatctgctgccgtatattgcggagcacgtcttgggcctgcccgccctgcgcgtggtgccgtctgcggacgttaatgtaaccctgtctatggccctgggcgtattcatcctgattctgttttatagcattaaaatgaaaggcatcggtggcttcaccaaagaactgacactgcaaccgttcaaccactgggcgtttatccctgtgaatctgatcctggaaggggtttccctgctgagtaagccggtttcccttggtctgcgtctgttcggaaacatgtacgctggcgagttgatctttatccttatcgctggtctcctgccttggtggtctcaatggatcttaaacgttccgtgggctatttttcacatcctgattatcaccctgcaggctttcattttcatggtgcttacgatcgtttacctgtccatggcaagcgaagaacattaa

SEQ ID NO: 2141 - DNA, 891 bp, Artificial Sequence
  Optimized genes for E. coli.
atgaatatgaaaaaactcgctaccttggtgtccgccgtggcgttgtctgctactgtttcagccaacgctatggctaaagatacaatcgctctggttgttagcaccctgaataaccctttcttcgtatctctgaaagatggtgctcagaaagaagctgacaaactgggttataacctggttgttctggactctcaaaacaacccggcgaaagaactggccaatgtccaggatctgaccgttcgcggtaccaaaatcctgctgatcaacccgaccgatagtgatgccgttggcaacgcggttaaaatggctaaccaggcaaatatcccggtgattaccctggaccgtcaagcaacgaagggtgaagtagtttctcacatcgcaagcgacaacgttctgggtggcaagatcgcaggcgattacattgcaaaaaaagcgggagaaggggctaaagtcatcgaattacagggcattgcaggcacctccgcagcgcgcgaacgtggcgagggcttccagcaggctgtagccgcacacaagttcaacgtgctggcatcgcagccggcggactttgaccgtattaaaggcctgaatgtgatgcagaacctcctgacggctcatccagacgtgcaggccgttttcgctcagaacgacgaaatggcgctgggtgcactgcgtgcactgcagactgcgggtaagtccgacgtcatggtagtgggctttgacggtactccagatggtgaaaaagcggtaaacgatggtaaactggccgctaccatcgcgcaactgccggaccaaattggtgcgaagggcgttgagactgcggataaggtacttaaaggtgagaaagtccaggcgaaatacccggtagatctgaaacttgtcgttaaacagtaa

SEQ ID NO: 2142 - DNA, 99 bp, Artificial Sequence
  Optimized genes for E. coli.
atgaccgccctgctgcgtgtaatttctctggtcgttatctctgttgtggttatcattatcccgccgtgcggtgcggctctgggccgcggtaaagcataa

SEQ ID NO: 2143 - DNA, 330 bp, Artificial Sequence
  Optimized genes for E. coli.
atgtccgacaagatcatccacctgaccgatgacagctttgacactgatgtgctgaaagcggatggcgcaatcttagtcgatttctgggcagaatggtgtggcccgtgcaaaatgatcgcgccgattttggatgaaatcgccgacgagtatcagggcaaacttaccgttgcgaagctgaacattgaccagaacccaggtacggcaccgaaatacggtattcgtggtatccctaccctcctgctgttcaaaaatggtgaagttgctgccactaaagtaggggctctgtctaaaggccaactgaaagaattcctggacgctaacctggcgtaa

SEQ ID NO: 2144 - DNA, 2262 bp, Artificial Sequence
  Optimized genes for E. coli.
atgactattctcaaccatacactgggcttcccgcgcgttgggctgcgtcgtgagctgaagaaggctcaggaaagctactgggctggcaattcgacccgtgaagaactgcttgctgtgggccgtgaactgcgtgctcgtcactgggatcagcaaaaacaggctgggatcgatctgctcccggtaggcgacttcgcatggtatgatcatgttttaaccacctctttgctgctgggcaacgtgccggctagacatcagaacaaagacggtagtgttgacatcgatactctgttccgtatcggccgcggtcgtgccccgaccggtgaaccagcagcggcagccgaaatgacgaaatggtttaatactaactaccactatatggtgccggaattcgttaaaggtcagcaattcaaattaacttggactcagcttttagacgaagtagatgaggcacttgctctgggtcacaaggtgaaacccgttctgttaggcccggtcacctggctgtggctcggtaaagtaaaaggtgaacagttcgaccgcctgtccctgctgaacgacatcctgcctgtttatcaacaggtactggcggaactggccaaacgcggtatcgaatgggtacaaatcgatgaaccggcgctcgttctggaactgcctcaggcatggctggacgcttataaaccagcgtatgatgcactgcagggtcaggtgaaacttctgctgaccacctattttgaaggcgtgactccgaacctcgatactattaccgctctgccggtgcagggtcttcacgtcgacctggtgcacggcaaagacgacgttgctgaactgcataagcgtctgccgagtgattggctgctgtccgccggcctgattaacggccgtaacgtatggcgtgctgatctgaccgaaaagtacgcccagattaaggacatcgtgggtaaacgtgacttgtgggttgcctcatcatgttcgctgctgcactctccgatagacctgtctgttgaaactcgcctggacgctgaagtcaaaagctggttcgcattcgcgctgcagaaatgccatgagttagcactgcttcgtgatgcactgaactctggtgataccgcagccctggcggagtggtctgccccaatccaagcgcgtcgtcacagcacccgcgttcacaacccggcggttgaaaaacgtctggctgcgatcacggcgcaggacagccagcgtgctaacgtatacgaagttcgtgcagaagcccagcgtgctcgctttaaattgccggcttggccaaccaccactattggttccttcccgcagacgactgagatccgaacgctgcgcctggacttcaaaaaaggcaacctggatgccaacaattatcgtacgggaatcgcggagcacattaaacaggcgatcgtggagcaagaacgtttgggtctggacgttctcgtacatggcgaagctgagcgtaacgacatggttgaatactttggtgaacacctggatggatttgttttcacccagaatggttgggttcagtcttacggttctcgctgtgttaaacccccgattgtgatcggcgatatctcccgtccagcaccgattaccgtggaatgggccaagtacgcccagtctctgaccgacaagccggtcaaaggtatgctgaccggccctgttacaattctgtgctggagcttcccgcgcgaggatgtatcccgggaaactattgctaaacagatcgctctggcactgcgtgatgaagtcgcggatctggaagcggcaggcattggtatcatccaaattgacgaaccggcattgcgcgaagggctgccgctgcgtcgctctgactgggatgcgtacctgcaatggggcgtagaggcatttcgcattaacgcggcagtggcaaaagacgatactcagatccacacccacatgtgttactgcgaatttaacgacatcatggactccatcgcagcactggatgcggatgttatcacaattgaaacctcccgctctgatatggagctgctagaaagcttcgaagaattcgattacccgaacgaaattggtccgggcgtatacgatatccatagccctaatgttccgagcgttgagtggatcgaagctctgctgaaaaaagcggcgaaacgtatcccggcggaacgtctgtgggtcaaccctgactgcggtctgaaaacgcgtggttggccagagacccgcgcggctttggcgaatatggtccaagctgcccagaaccttcgtcgcggctaa

SEQ ID NO: 2145 - DNA, 213 bp, Artificial Sequence
  Optimized genes for E. coli.
atgaaaaaagatatccacccgaaatacgaggaaatcaccgcaagctgctcttgtggtaacgtcatgaagattcgttctacggttggtcatgacctgaacctggatgtatgctctaaatgtcacccattcttcactggcaaacagcgcgacgttgcgaccggtggccgcgtggaccgttttaacaagcgtttcaatattccgggctccaaataa

SEQ ID NO: 2146 - DNA, 429 bp, Artificial Sequence
  Optimized genes for E. coli.
atggcgaaaaaggttcaggcttacgtgaagcttcaagtcgcggcagggatggctaatcctagcccgccggttggcccagcactgggtcagcagggtgttaacattatggaattttgcaaagcgttcaacgccaagactgattccatcgaaaaaggcctcccgatcccggtagtgatcactgtttatgcggatcgtagtttcaccttcgtaaccaaaactccgccggctgctgttctgctgaaaaaagcagcgggcattaaatccggttctggcaaaccaaacaaagataaagtgggtaaaatttctcgtgctcagctgcaggaaatcgcccaaaccaaagcagctgacatgaccggtgccgacatcgaggcaatgacgcgttcaatcgaaggtacagcgcgcagcatgggcctggtagtcgaggactaa

SEQ ID NO: 2147 - DNA, 705 bp, Artificial Sequence
  Optimized genes for E. coli.
atggcgaaactgacgaaacgtatgcgcgtcatccgtgaaaaggtagatgcaaccaagcagtatgacatcaacgaggctattgccctgcttaaagagctggctaccgcaaaattcgtggaatctgtagatgtggccgttaacctggggattgacgcccgtaagtctgatcagaacgtgcgtggtgctaccgtactgccgcacggcactggccgttcggttcgcgtcgctgttttcactcagggcgcgaacgctgaagcagctaaagcggcaggtgcggaactggttggtatggaagacctggccgaccagatcaaaaaaggcgaaatgaactttgacgttgtaatcgcaagcccggacgcgatgcgtgtggtgggacagttaggtcaggtgctgggtcctcgcggtctgatgccaaacccgaaagttggtacagttaccccgaacgttgcggaagcggttaagaatgcgaaagcaggccaggttcgctaccgtaatgataagaatggcattatccatacgactatcggcaaagtagatttcgatgctgataaactgaaagaaaacctcgaggcgctgctggttgccttgaaaaaagcaaaaccgactcaagctaaaggcgtctacattaaaaaagtgagcatctccaccaccatgggcgctggtgttgcggtagaccaagcaggtctgtccgcaagtgtcaactaa

SEQ ID NO: 2148 - DNA, 498 bp, Artificial Sequence
  Optimized genes for E. coli.
atggcgttgaatcttcaagacaaacaggcaatcgttgctgaagtttctgaagttgcaaaaggtgcactgtccgcggttgtggcggacagccgcggtgttactgtagataagatgacggagctgcgtaaagctggtcgtgaggcgggcgtctacatgcgtgtggtacgtaacaccctgctgcgtcgtgctgtagagggtaccccgtttgaatgcctgaaagatgcgttcgtgggcccgaccctgattgcatattctatggaacacccaggggcagcggcgcgcctgtttaaggaattcgctaaagctaacgcaaagttcgaggttaaagccgctgccttcgaaggcgaactcatccctgcctctcagattgaccgtctggcgacattaccgacttacgaagaagcgatcgctcgtctgatggccactatgaaagaagccagcgcgggcaaactggtccgcaccctggcagcagtgcgcgatgctaaagaagcagcttaa

SEQ ID NO: 2149 - DNA, 366 bp, Artificial Sequence
  Optimized genes for E. coli.
atgagcatcaccaaggaccagatcattgaggccgtggcggcgatgtctgttatggacgttgtggaactgatctctgcaatggaggaaaaatttggcgttagcgcggctgccgcagtcgctgtagcggctggtccggtagaggctgcagaagaaaaaactgaattcgatgtaatcctgaaagccgcgggtgcaaacaaggttgcagttattaaggcggttcgtggtgcaaccggtctgggcctgaaagaagcaaaagatctcgtggaatccgctccggcggccctgaaagaaggtgtgtctaaagacgatgctgaagctttgaaaaaagcgcttgaagaagccggcgctgaagttgaggtcaaataa

SEQ ID NO: 2150 - DNA, 4029 bp, Artificial Sequence
  Optimized genes for E. coli.
atggtatactcatacaccgaaaaaaaacgtatccgcaaagacttcgggaaacgtcctcaggtgctggatgtgccgtacctgctgtctattcagctggacagtttccagaaattcatcgaacaggatccggagggccagtacggcctggaagctgcattccgtagcgtttttccgattcagagctatagtggcaacagcgaattgcagtatgttagctatcgtctgggggagccggttttcgacgtacaggaatgccaaatccgtggcgtcacttactcggctccgcttcgtgttaaactgcgcctggtgatctatgagcgtgaagctccagaaggaactgttaaagatataaaggaacaggaagtgtatatgggtgaaatcccgctgatgactgacaacggtacctttgtgattaacggtaccgaacgtgttattgtgtctcaactgcatcgctctccgggcgtgttcttcgactccgacaagggtaaaacccactcctctgggaaagtactgtacaacgctcgtattatcccgtaccgtggctcttggctggatttcgaattcgacccaaaagacaatcttttcgttcgtattgaccgccgtcgtaaactgccggccaccatcatcctgagggctttaaactatactactgaacagattctggacctcttttttgagaaggtaatcttcgagatccgtgacaacaaattacaaatggaactggttcctgaacgtctgcgcggtgaaaccgcctccttcgatattgaggccaatggtaaagtctatgtagaaaaaggccgccgtattaccgcgcgccacatccgtcagcttgaaaaagacgacgttaaattgattgaagttccagttgaatacatcgcgggcaaagtcgttgctaaagattatatcgatgaatctaccggtgaactgatttgcgcggctaacatggaactgtccctggacctgctggctaaactgagccaatcaggtcacaaacgtattgaaactctgttcactaacgatctggaccatggtccgtatatcagcgaaactctgcgcgttgatccaaccaacgaccgcctgtctgcactggttgaaatctaccggatgatgcgtcctggtgagcctccgacccgtgaagcagcggaaagtctgttcgagaacctgttcttctctgaagaccgctacgatctgtctgcggttggtcgtatgaaatttaaccgctcgctcttgcgtgaagaaatcgaaggcagtggcattctgtccaaggatgacattatcgatgtgatgaaaaaactgattgacatacgtaacggcaagggtgaagttgatgatatcgaccatctgggtaaccgtcgaattcgtagcgttggcgagatggcggaaaaccagtttcgcgtgggcctggtgcgcgtggagcgcgcggttaaagagcgcctgtctcttggcgatttggacacgctgatgcctcaggatatgattaatgcaaaaccgatcagcgcggcggtaaaagaattcttcggtagctctcaactgtctcagttcatggaccaaaacaacccgctcagcgaaattactcacaaacgtcgcatctcagccctgggcccgggtgggcttactcgtgaacgtgcgggtttcgaagtacgtgacgttcatcctacccactacggtcgtgtttgtccgatcgaaacgcccgaaggcccgaatatcggccttatcaactccctgagcgtctacgcccaaacaaacgagtatggttttctggaaactccgtaccgcaaagttactgacggtgtggtaacggatgaaattcactatttgtctgctatcgaagagggtaactatgtgatcgcccaagcaaactctaacctggatgaagagggtcactttgtcgaagacctggtcacctgccgttcgaaaggggaaagctcgctgttttcccgtgatcaggttgattacatggatgttagtacccagcaggtcgtaagcgtgggcgcctccctgatcccgtttctggagcacgacgatgcgaaccgcgcgctgatgggagcaaacatgcagcgccaggcggtgccgaccctgcgcgctgacaagccgctggttggtacaggtatggagcgtgccgttgcagttgattcgggcgtgacggctgtggcaaaacgtggtggtgtcgtacagtacgtagatgcctcccgcatcgtaatcaaggtaaacgaagacgagatgtacccgggcgaagctggtattgacatttacaatctgacgaaatacacacgcagcaaccagaacacctgtatcaaccagatgccatgtgtatcactgggggaaccagtggaacgtggcgatgttctggcggacggtccgagcacggatctgggcgagctggcattaggtcagaacatgcgtgtggcattcatgccgtggaatggttataactttgaagattctattctggtttctgaacgcgttgtgcaagaagatcgtttcaccaccatccatattcaggaattagcatgcgtctcccgtgacaccaagttgggccccgaggagattacggcagacattcctaacgttggcgaagctgcgctgtccaaactagatgaatccggtattgtttatattggcgctgaagtaactggtggcgatatcctggttggcaaggtaactccgaaaggtgaaacgcaactcaccccggaagaaaaactgctgcgcgcaatctttggcgaaaaagcttctgacgttaaagatagcagtctgcgtgtgccgaacggcgtctccggtactgttatcgacgttcaggtattcactagagatggtgtcgaaaaagataagcgtgcgttggaaatcgaagaaatgcagctgaaacaggcgaaaaaagatctgtctgaagagctgcagattctggaagcaggtttgttctcccgtatccgcgcagttctggtcgcagggggtgtagaggcggaaaagctggacaaactgccgcgagatcgttggctcgaactgggcctgaccgacgaggagaaacaaaaccagctggaacagctggctgaacaatacgacgaacttaaacacgagtttgagaaaaaactggaagcgaagcggcgcaaaattacccagggcgacgaccttgccccgggtgtgctgaagatcgtgaaagtgtatctggcggtgaagcgtcgtatccagccaggtgataaaatggctggccgccatggcaataaaggcgttatctcaaagatcaatccgatcgaagacatgccgtacgacgagaatggtacccccgtcgatatcgttttgaacccactgggcgttccgagccgtatgaatatcggtcagatcttagaaacccacctgggcatggctgcaaaaggtatcggtgacaaaatcaatgctatgcttaaacaacagcaggaagttgctaaactgcgtgaatttattcagcgtgcatacgacctgggcgctgatgttcgccagaaagttgacttatccaccttctctgatgaagaagtcatgcgcctcgcagaaaatctgcgtaagggcatgccgatcgccaccccggtttttgatggagcgaaggaagctgagatcaaagaactgctaaaactgggtgacctgccaacgagcggacagattcgtctgtacgatggccgtaccggtgaacagtttgagcgtccagtcaccgtaggctatatgtacatgctgaaactgaaccacctggtagatgataaaatgcacgcccgttctactggttcgtacagcctggttacacaacagccgctcggcggcaaagcgcagttcggcggccaacgcttcggtgagatggaagtatgggccctggaagcatacggtgctgcatataccctgcaggagatgctcactgtgaagtctgacgatgttaacggccgtaccaaaatgtacaaaaacatcgtagatggtaatcatcagatggaaccgggcatgccggaatcattcaacgtgttactgaaagaaattcgttctctcggtatcaacatcgaacttgaagatgagtaa

SEQ ID NO: 2151 - DNA, 273 bp, Artificial Sequence
  Optimized genes for E. coli.
atgaacaaaacccagctcattgacgtaatcgctgagaaggctgaactgtctaagacgcaagctaaagccgcgcttgaatccaccctggcagcaatcaccgaaagcctgaaggaaggcgacgcggttcagctggtcggcttcggcactttcaaagttaaccaccgtgcggaacgcactggtcgtaatccgcagacaggtaaagagatcaaaattgccgctgcgaacgttccggcatttgtgtctggtaaagcactgaaagatgcggtgaaataa

SEQ ID NO: 2152 - DNA, 1602 bp, Artificial Sequence
  Optimized genes for E. coli.
atgacagaacaagcgactacgactgacgaactggcatttactcgtccgtacggtgaacaggaaaagcaaatcctgactgctgaagccgtagaattcctgaccgaactggttacccacttcactccgcagcgtaacaagctgctggcagcgcgcatccagcagcaacaggatatcgacaacggtaccctgccggattttatttctgaaaccgcatctatccgtgatgctgactggaaaattcgtggcatcccagcagacctggaggatcgccgtgttgagatcaccggtccggttgaacgcaaaatggttatcaacgcgctgaacgcaaacgtcaaagtatttatggctgacttcgaggattctctggccccggattggaataaagtgatcgacgggcagatcaacctgcgtgatgcggtcaatggtaccattagctacaccaacgaagctggcaagatctaccagctgaagccaaacccggcagttctcatctgtcgtgtgcgtggcctgcacctcccggagaaacacgtgacttggcgcggcgaggcgatccctggcagcctgttcgacttcgcgctgtactttttccataactatcaggctctgctggctaaaggttcaggtccgtacttctatctgccaaaaacgcagagttggcaggaagctgcctggtggtctgaagtattctcctatgcggaagatcgttttaaccttcctcgtggcacgatcaaagcgaccctgttgattgaaactctgccggctgtgtttcagatggacgaaattctgcacgccctacgcgatcatattgtgggtctgaattgcggccgttgggactacatcttctcgtacatcaaaaccctgaagaattacccggatcgtgttctgccggatcgccaagcagtcactatggataaaccgttcctgaacgcctattctcggcttctgatcaaaacctgccacaaacgtggagctttcgcgatgggtggtatggcggcattcataccgtccaaggacgaagaacataacaaccaggtgttgaataaagtaaaagcagacaaatcactggaggctaacaacggccacgacggtacctggattgctcaccccggcctggcggatacggcaatggccgttttcaacgacatcttaggttcgcgcaaaaaccaactggaagtcatgcgtgaacaggacgcaccgatcaccgcggaccagttactcgctccttgtgacggtgaacgtacggaagaaggcatgcgcgcaaatatccgtgttgcggttcagtatattgaagcgtggatttccggcaacggttgcgttccaatttacgggttaatggaagatgcagccactgctgaaatctcccgtacctccatctggcagtggatccatcaccagaaaaccctgagcaacggcaaaccggttaccaaagcgctgtttcgccagatgctgggcgaggagatgaaagtaattgcctctgaactcggcgaagagcgcttcagccagggtcgttttgacgatgccgcacgactgatggaacaaattactacaagcgatgagctgattgatttccttaccttgccgggttatcgtctgcttgcttaa

SEQ ID NO: 2153 - DNA, 1305 bp, Artificial Sequence
  Optimized genes for E. coli.
atgaagactcgtacacagcagattgaggaattgcagaaagaatggacccagccccgttgggaaggtattacccgtccttacagcgccgaagatgttgtaaaactccgtggcagtgtaaatcctgaatgcactctggcgcagcttggtgccgccaaaatgtggcgcctgctgcatggtgaatctaaaaaaggctacatcaactccctgggggcgctgaccggtggtcaggcgttacagcaggcgaaagcaggcatcgaggcagtttacctgtcaggctggcaggtggcggcagatgctaacctggcggcttctatgtatccggatcagtccctgtatccggctaacagcgtaccggccgtcgttgaacgtattaataacaccttccgtcgcgcggaccagatccagtggtcggctggcatcgaaccgggcgacccacgctacgttgattactttctgccgatcgttgcggacgcagaggcgggttttggcggtgtactgaacgctttcgaattaatgaaagctatgattgaagccggtgcagccgctgttcatttcgaagatcagctggcgtctgtcaaaaaatgtggtcacatggggggtaaagtgctggttccgactcaagaagcaatccaaaaattggtcgcagctcgcctggcagcagacgttaccggcgtgccaacccttctggtcgctcgtaccgacgcagacgcggcagacctgatcacgtccgactgcgacccgtacgactcagaatttattaccggcgagcgtacttctgaaggctttttccgtacgcatgctggcatcgaacaggcaatttctcgtggtctggcatatgccccgtatgcggatctggtgtggtgcgagactagcactccggacctcgagctggcgcgccgttttgcccaggctatccacgctaaatacccgggcaagctgctggcttacaattgtagtccgtctttcaactggcagaagaaccttgatgataaaaccatcgcgtccttccaacagcaactgtccgatatgggttataaattccagtttattacactggcgggcattcacagcatgtggttcaacatgttcgatctggctaacgcctatgctcaaggtgaaggcatgaagcactacgttgagaaggtacagcaaccagaattcgcagcagctaaagacggatacaccttcgttagccaccagcaagaagtgggtactggttacttcgataaagtgaccactatcatccagggtggtacctccagcgttacggcgctgaccggctctacggaagaatcgcagttttaa

SEQ ID NO: 2154 - DNA, 294 bp, Artificial Sequence
  Optimized genes for E. coli.
atgaacattcgtccgctgcacgatcgtgtgattgttaaacgcaaagaagtagagaccaaatctgcgggtggcattgttctgaccggctctgctgctgcgaagtctactcgtggcgaagtcctggcagttggtaatggtcgcattctggaaaacggcgaagtaaaaccgcttgatgtcaaggtgggggatatcgttatcttcaacgacggttacggtgtgaaatccgaaaaaatcgacaacgaggaggtactgatcatgagcgaaagcgacatcctcgccatcgttgaagcataa

SEQ ID NO: 2155 - DNA, 951 bp, Artificial Sequence
  Optimized genes for E. coli.
atgtccgacatctccaaagcatccctgccgaaagcgattttcctgatgggcccgacggctagcggcaagacagccctggcgatcgaactgcgtaaaatcctgccggtcgaactgatttcggtggatagcgctctgatctacaaaggtatggacatcggtaccgcgaaacccaatgcggaggaattattagctgcccctcaccgtctgctggatatccgtgacccgtcacaggcgtacagtgcggcagattttcgtcgcgatgccctggctgaaatggctgacatcaccgcggctggccgcattccactgcttgttggcggcactatgctgtacttcaaggcactgctggaaggtctctccccactgccgagcgcagatccggaagttcgcgcacgtatcgaacagcaggcggcagagcaaggttgggaaagtctgcatcgtcagctgcaagaagtagatcctgttgctgcagcccgcattcacccgaacgatccacaacgtctgtctcgtgcactggaggtgttctttatcagcggtaaaactctgaccgaattgacccagacgagcggcgatgcgctcccgtaccaggttcatcaatttgcgattgcaccggcttcgcgtgaactgcttcaccaacgcatcgaacagcgtttccaccagatgcttgcatctggcttcgaggctgaagttcgtgcgctgttcgcccgtggagacctgcacaccgacttgccgtctattcgttgcgtcgggtatcgccagatgtggtcctacctggaaggtgaaatctcttatgacgagatggtttatcgcggtgtgtgtgctacccgtcagttggccaaacggcagattacttggctgcgcggctgggaaggtgttcattggctcgactctgaaaaaccggaacaggctcgtgacgaggtgctgcaggtagtaggcgccatcgcgggttaa

SEQ ID NO: 2156 - DNA, 309 bp, Artificial Sequence
  Optimized genes for E. coli.
atggccaaaggccagtctctgcaggacccgttcctgaatgcgcttcgccgtgaacgtgtgcctgttagcatctatctggtaaacggtattaaactgcagggccaaattgaatctttcgaccagtttgttatcctcctgaagaacacggtgagtcagatggtttacaaacacgctatcagcaccgttgtaccatctcgtccggtcagccaccattccaacaacgcgggtggtggcacttcatccaactaccatcacggttcgtccgcacagaatacctctgcacaacaggattctgaggaaaccgaataa

SEQ ID NO: 2157 - DNA, 396 bp, Artificial Sequence
  Optimized genes for E. coli.
atgcgccactatgaaattgttttcatggtacatccggaccaatctgaacaggttccgggtatgatcgaacgttacactgctgctattaccggtgcagaaggcaaaatccaccgtctggaagactggggccgtcgtcagctggcttacccgattaacaaactgcacaaagcacattatgttctgatgaacgtggaagcaccacaggaagtgatcgacgagctggaaaccacatttcgtttcaacgacgccgtaatccgttccatggtcatgcgcaccaagcacgcggttactgaagcgtctcctatggttaaagcgaaagacgagcgccgtgaacgtcgcgatgatttcgcaaatgaaacggccgatgatgcggaagctggtgatagcgaggagtaa

SEQ ID NO: 2158 - DNA, 315 bp, Artificial Sequence
  Optimized genes for E. coli.
atgactaatcgtcttgttctgtctggtaccgtatgccgcgctccactgcgtaaagtctcgccgtctggcatcccgcattgtcagttcgtactggaacaccgttctgttcaggaggaagctggttttcatcgtcaggcatggtgtcaaatgcctgttatcgtgagtggccacgaaaaccaggccattacccattccatcacggtgggtagccgcatcaccgttcaaggcttcatttcatgccacaaagcgaagaacggtctcagcaaaatggttctgcacgcggagcagattgaactgatcgactccggtgattaa

SEQ ID NO: 2159 - DNA, 228 bp, Artificial Sequence
  Optimized genes for E. coli.
atggcacgttactttcgccgccgtaaattctgccgtttcaccgctgagggtgttcaggaaattgattataaagacattgcgaccctgaaaaactacatcaccgaaagcggcaaaatcgttccgtcccgtatcacgggtactcgtgctaagtaccaacgtcagctggcgcgcgcaatcaaacgtgcccgttatctgtctctgctgccgtacactgaccgccaccagtaa

SEQ ID NO: 2160 - DNA, 387 bp, Artificial Sequence
  Optimized genes for E. coli.
atgtctaaaaccattgctactgaaaacgcaccggctgcgatcggcccgtacgtgcagggcgtggatctgggtaacatgatcatcacctccggccaaattcctgttaacccgaaaaccggtgaagttccggctgatgtggcggctcaggcgcgccagagcctggacaacgttaaagcgattgtcgaggctgcaggtctgaaggtaggtgatatcgttaaaacaaccgtattcgtgaaagacctgaacgactttgcaacggtaaatgccacctatgaagcgttctttactgaacacaatgcaactttcccagcccgttcttgcgtcgaagttgcccgcctgccgaaggacgttaaaatcgagatcgaagcgattgcagttcgtcgttaa

SEQ ID NO: 2161 - DNA, 936 bp, Artificial Sequence
  Optimized genes for E. coli.
atggcgaacccgctgtatcagaagcacatcatctctatcaatgacctctctcgcgacgatcttaacctggtcctggcaactgcggctaaactgaaagcaaaccctcaaccggagctgttgaaacacaaagttattgcctcttgcttttttgaggcaagcacccgcacccgtctgagtttcgaaacttccatgcatcgtctgggtgcctctgtcgttggcttctctgactcggcaaacacttccctcggtaaaaaaggtgaaaccctggctgacaccatctccgtgatctcgacatacgttgacgcgattgtaatgcgtcacccgcaggaaggtgcggctcgtctggcgacggaatttagcggcaacgtaccggttctgaatgcaggtgacgggagcaaccaacaccccacgcagactctgctggatctgttcaccatccaggaaacccagggccgcctggacaatctgcatgtagctatggttggcgatctgaaatacggtcgtaccgttcattcattaactcaggccctggcgaaattcgacggtaatcgtttctactttattgcacctgacgctttagcgatgccgcagtatatcctggatatgctggatgaaaagggcattgcgtggagcctgcatagttcaatcgaagaggttatggctgaagtagatattctgtatatgacgcgtgtacagaaagagcgcttggacccgtccgaatacgcaaacgtgaaagcgcaattcgttctgcgtgcttctgatctgcacaacgcaaaggccaacatgaaagtgcttcacccactgccgcgtgtggatgaaattgccaccgatgttgataaaaccccgcacgcgtggtacttccaacaggccggcaacggaatcttcgctcgccaggcactcctggctttggtgctgaaccgtgaccttgtcctataa

SEQ ID NO: 2162 - DNA, 417 bp, Artificial Sequence
  Optimized genes for E. coli.
atggccaatccggagcagttagaggaacagcgtgaagaaacccgtctcatcatcgaagaactgctggaagacggttccgatccggacgcactgtatactatcgagcaccatctgtctgccgacgatctggaaaccctggaaaaagctgcggttgaagcgttcaagctgggttatgaagtgactgacccggaagagctggaagttgaggatggcgatattgtaatttgttgcgatattctgagcgagtgcgcacttaacgcagatctgatcgacgctcaagtagaacagctgatgacgttggcggagaaatttgatgttgaatacgacggttggggtacctacttcgaagatcctaacggcgaagatggtgatgacgaagacttcgtcgacgaagacgacgatggcgtgcgccactaa

SEQ ID NO: 2163 - DNA, 954 bp, Artificial Sequence
  Optimized genes for E. coli.
atgaccgataaattgacttctctgcgtcagtataccactgtcgtcgctgacaccggtgatatcgccgcaatgaaactgtatcagccgcaggatgcaacaaccaacccgtccctgattctgaatgccgcgcagattccggaatatcgcaaattaatcgatgatgcggtagcctgggcgaaacaacaaagcaacgaccgtgctcagcagatcgttgacgcaacggacaagttagcagtaaatattggcctggagatcctgaaactggtgcctggccgcatttctacggaagtggacgctcgcctctcctacgataccgaagcatcaatcgctaaagcaaaacgcctgatcaaactgtacaacgatgctggtattagtaatgaccgtattcttattaagctcgcgtccacctggcaaggtatccgcgcagctgagcagctggaaaaagaaggtatcaactgtaacctgactctgctgttctcttttgcacaagcgcgtgcgtgcgccgaagcgggagtgtttctgatctctccgttcgttggtcgtatcctggactggtacaaagctaacaccgacaaaaaagaatacgcaccagcggaagatccgggtgttgtaagcgtttctgaaatctaccagtactataaagagcatggctacgaaaccgttgtgatgggtgcttccttccgtaacatcggtgaaattctggaactggcgggctgcgaccgtctgaccatcgcgccagcgctgttgaaagagctggcagaaagcgaaggggctatcgaacgtaagctgagctatactggcgaagttaaagcccgtccggcacgcatcactgaatcggagttcctgtggcagcacaaccaggacccgatggctgttgataagctggctgaaggcattcgtaaattcgccattgatcaggaaaagcttgagaaaatgatcggcgacctgctgtaa

SEQ ID NO: 2164 - DNA, 1917 bp, Artificial Sequence
  Optimized genes for E. coli.
atgggcaaaattattggtatcgacctcggcaccaccaacagctgcgtggcgattatggatggtactactccgcgcgtactggaaaacgctgaaggcgatcgcactacgccgtccattatcgcttacactcaggatggcgaaactcttgttggtcagccggcgaaacgccaggcagtgaccaacccgcagaacaccctgtttgccattaagcgcctgattggccgtcgtttccaggacgaagaagtccagcgcgacgtatccatcatgccattcaagatcattgccgccgataacggcgacgcatgggttgaggtaaaaggtcaaaagatggcgccgccacagatctccgctgaagttctcaagaaaatgaaaaaaaccgcagaggactatctgggtgaaccggtaaccgaagcggtgattaccgttcctgcttattttaacgacgcccagcgtcaggcgaccaaagacgccggtcgtattgctggtctagaagtgaaacgtatcatcaatgaaccgactgcagctgcacttgcatacggcctggacaaggggaccggcaaccgtaccatcgctgtttatgacctgggtggcggtaccttcgatatttctatcatcgaaattgatgaagttgatggagagaaaacctttgaagtgctggcaacaaacggtgacactcacctgggcggtgaagacttcgactcccgtctgatcaactacctggttgaagagttcaaaaaggatcagggcatcgatctgcgtaacgatccgctggcgatgcaacgtctgaaagaagccgcggaaaaagctaaaatcgagctgagcagcgcacagcaaaccgatgttaatctgccttacatcactgctgatgctaccggtccgaaacatatgaacatcaaagtgacgcgtgcaaaactggagtctctcgtagaagatctggtgaaccgctcaatcgaacccttgaaagtagctctgcaagatgcgggtctgtcggtcagcgatatcgatgatgtcatcctggttggcggccagactcgtatgccgatggttcagaagaaagttgctgaattcttcggtaaagagcctcgcaaagacgtaaatccggatgaggcagtagcaatcggtgcggcggtccaaggcggcgttctgactggcgacgttaaagatgtgttacttctcgacgtcacgccactttctctgggcattgaaaccatgggtggggtgatgaccacgctgatagccaaaaataccactatcccgaccaagcacagccaggtcttctctaccgccgaagataaccagtcagcggttactattcacgttctgcagggcgagcgtaagcgtgctgctgacaacaaatccttaggtcagttcaacctggatgggattaatccagcaccgcgtggtatgccgcaaattgaagtaacttttgacatcgacgccgacggtattctgcatgtttctgcgaaggataaaaactccggtaaagagcagaaaatcaccattaaagccagttctggtctgaacgaagacgagatccagaaaatggtgcgcgatgcagaagctaacgccgaggcagaccgtaaattcgaagaactggtacagacccgcaatcagggtgatcacttgttgcatagtacacgtaaacaggttgaagaagcaggcgataagctgccggcagatgacaaaacggcgatcgaaagcgcgctgaccgcgctggaaacggcactgaaaggcgaagataaagcggctatcgaagcgaaaatgcaggaactggctcaggtgtcgcaaaaactgatggaaatcgcgcagcagcagcacgcgcaacaacagacagctggcgctgacgcttctgcaaacaacgcgaaagacgacgacgtggttgacgcggaatttgaagaggttaaggacaaaaaataa

SEQ ID NO: 2165 - DNA, 1152 bp, Artificial Sequence
  Optimized genes for E. coli.
atgttcgagccgatggaattgacaaatgacgcagtaatcaaagttatcggtgtgggcggcggcggtggtaatgcggttgaacatatggttcgtgaacgtattgagggcgtagagttcttcgccgtaaacaccgacgcgcaggcgttacgtaagacggcagtcggtcagaccattcagatcggctcgggaatcactaaaggtctgggtgccggtgcgaacccggaagttggtcgtaacgctgcagacgaggatcgcgatgcactgcgtgcggcgctggaaggtgccgatatggtgttcatcgctgctggcatggggggcggtaccggtactggcgcagcgccggtagttgcagaagtggctaaagatctggggatcctgaccgtcgcggtggtgaccaaaccgttcaacttcgaaggcaagaaacgtatggcatttgccgagcagggcattactgaacttagcaaacacgttgactccctgatcaccatcccgaacgacaaactgctgaaagtgctgggccgcggcatctccttactggatgcgttcggtgcagctaacgatgtgctcaaaggcgctgttcagggtattgctgagctgattacccgtccgggcctgatgaatgtcgacttcgctgatgtacgtactgtgatgagcgaaatgggctacgcaatgatgggttctggcgttgcttccggtgaagatcgtgctgaagaagcggccgagatggctatttcttctccgctgctcgaagatatcgacttgtcaggcgctcgcggtgttctggttaacatcaccgctggttttgacctgcgtctggatgaatttgaaaccgtgggtaacacgattcgcgcctttgcaagtgataacgcaaccgttgttattggcaccagccttgatccggacatgaacgacgaactgcgcgttacagtggtcgccacgggtatcgggatggataaacgccctgaaatcactctggtaaccaacaaacaggttcaacagccagtaatggaccgttatcagcagcacggtatggcgcccctgactcaggaacaaaagccggttgcgaaggtcgtaaatgacaacgccccacagactgcgaaagaaccggattacctggacatccctgcattcctgcgtaaacaagctgactaa

SEQ ID NO: 2166 - DNA, 2664 bp, Artificial Sequence
  Optimized genes for E. coli.
atgagcgaacgtttcccgaacgacgttgatccgatcgaaactcgtgattggctgcaagctatcgagtccgtgatccgcgaagaaggggttgaacgcgcacagtacctgattgaccagctgctggcggaagcacgtaaaggtggtgttaacgtggctgctggtaccggtatctccaactatatcaacaccatcccagtagaagagcaaccggaatacccgggtaacctggaacttgagcgtcgtatccgtagcgccattcgctggaatgcgatcatgaccgttctgcgtgcttcgaaaaaagacctcgagctgggcggccacatggcttctttccagtccagtgcaactatctacgatgtctgcttcaaccacttcttccgtgcccgtaacgaacaagacggcggtgatctggtgtacttccagggtcacatttctccgggcgtttacgctcgtgcattcctggaaggtcgcctgactcaggagcagctggacaacttccgccaagaagttcacggcaacggcttgtcatcttatccgcatccgaaactgatgccagagttctggcagttcccgaccgtatccatgggccttgggccaatcggtgcgatttatcaggcaaaattcctcaaatacctggagcaccgtggtctgaaagacacctcaaaacagactgtttatgcgttcctcggcgatggcgaaatggatgaaccggaaagcaagggcgcaatcaccatcgccacccgtgagaaactggataacctggtatttgtcatcaactgcaaccttcaacgactcgacggtccggtaactggcaatggcaagattatcaacgaactggaaggcatcttcgaaggtgctggctggaacgtaatcaaagttatgtggggcagccgctgggatgagttgctgcgcaaagatacaagcggtaagttgattcagttaatgaacgaaaccgttgacggcgactaccagaccttcaaatccaaagacggtgcatacgttcgcgaacacttctttggtaaatatccagaaacagccgcactggtcgcggactggaccgacgagcagatctgggcgctgaaccgtggcgggcatgacccgaagaaaatctatgccgcctttaaaaaggctcaggaaaccaaaggcaaagcgacagttatcctggctcacaccattaaaggctacggtatgggtgacgcggcagaaggtaaaaatatcgcgcaccaggttaagaaaatgaatatggacggggtgcgccatattcgtgaccgcttcaacgttccggtttctgacgctgatatcgaaaaattaccatatattacctttcctgaaggctctgaagaacatacctatctgcacgcgcagcgccagaaactgcatggttatcttccttcccgtcagccgaatttcaccgaaaagctggagctgccttctctgcaagattttggcgcgctgcttgaagaacagtctaaagagatctctaccactattgcgtttgttcgcgctctgaatgtgatgctgaaaaacaaatctatcaaggatcgtctggttcccatcatcgctgacgaagcgcgtactttcggcatggaaggcctgttccgtcagattggcatttactccccaaacggtcaacagtataccccgcaggaccgtgaacaggtagcctactacaaagaagatgaaaaaggccagatactgcaggaaggtattaatgaattaggggcgggctgttcctggctggcagctgcaacgtcttacagcaccaacaacctgccgatgattccgttctacatctactattctatgttcggttttcagcgtattggagacctgtgctgggcagcaggcgatcagcaggcgcgcggtttcctgatcggcggtacgtcaggccgtaccacgctgaacggtgaaggcctgcagcacgaagacggtcattcgcacatccagagcctgaccatcccgaactgcattagttatgatcctgcttatgcttacgaagtggcagtgattatgcacgacggtctggagcgcatgtacggtgagaagcaggaaaacgtctattactacatcactacgttgaatgagaactaccatatgccggcgatgcctgagggcgctgaagagggtatccgtaagggaatttataaactcgaaacgattgaaggaagcaaaggtaaagtccaactgctgggttctggttccattttgcgccacgttcgtgaagccgctgaaattctggctaaagattacggcgtgggtagcgatgtttactctgttacgagttttactgaactagcccgcgatggtcaggattgtgaacgttggaacatgctgcacccgctggaaactccgcgcgtgccgtacattgctcaagtaatgaacgatgcgccggcggttgcgtcgactgactacatgaaactgtttgctgagcaagtccggacttacgtaccggcagatgattaccgtgtgctgggtactgatggctttggtcgttccgacagccgtgaaaatctgcgtcaccattttgaagtcgatgcaagctatgtggtggtagcagcgcttggcgaactggcgaaacgtggtgaaatcgacaaaaaagtggttgcagacgccatcgccaagtttaacatcgatgccgataaagtaaacccgcgtctggcataa

SEQ ID NO: 2167 - DNA, 1893 bp, Artificial Sequence
  Optimized genes for E. coli.
atggctatcgaaatcaaagtgcccgatatcggtgctgacgaggttgaaattactgaaattctggttaaggttggcgacaaagtggaagcagagcagagcctgatcacagttgaaggtgataaagcatcaatggaggtaccgtctccgcaggctggcatcgtcaaagaaatcaaggtgtcagtcggcgataaaacccagactggcgcactgattatgatctttgacagcgccgatggcgcagctgatgcggcgccggcgcaagcggaagaaaaaaaagaagcggctccggctgctgctcccgccgctgcagcagcgaaagacgtaaacgttccggatatcggcagcgatgaagtagaagtcacggagattctggtgaaagttggtgataaggtagaagctgaacaatcgctgattacggttgaaggcgacaaagccagcatggaagtgccggcaccgttcgctggtactgtgaaggagatcaaagtgaatgtaggagataaagtttccaccggttctctgatcatggtttttgaagttgcgggtgaagcgggcgctgcagccccagcggcaaagcaggaagccgcgccggcagcggcccctgctccggctgcaggcgtgaaagaagtgaatgtcccggacattggtggtgacgaagttgaggtaaccgaggtgatggtgaaagtaggcgacaaggtagccgctgagcaaagtcttattaccgttgaaggtgacaaagcttctatggaagtacctgcaccgtttgctggggttgttaaagagctgaaagtcaatgtgggcgacaaggtaaaaactggttccttgattatgattttcgaagtcgagggtgcagctcctgccgccgccccagcaaaacaagaggcggcggccccggcgcctgcggcgaaagcggaggcacctgcggccgcaccagctgcgaaggcagaaggcaagagcgaatttgccgaaaacgacgcttatgttcacgcgaccccgctgattcgccgcctggcacgtgaattcggtgttaacctggctaaagtcaaaggcacaggacgcaaaggtcgcatcctgcgtgaagatgttcaggcgtacgttaaagaggccattaaacgcgctgaagccgcgccagcagcaaccggcggcggtatcccaggtatgctgccgtggccgaaagtagacttctccaaattcggcgaaatcgaagaggtcgaactgggtcgtattcagaaaatttccggcgctaacctctcccgtaactgggtaatgatcccgcatgtgacccatttcgacaaaacggacatcaccgaactcgaagcgttccgtaaacagcagaacgaagaagctgctaaacgtaagctggatgtgaaaatcactccggttgtgttcatcatgaaagcagttgccgcagcgctggaacagatgccgcgcttcaacagctcgttatctgaagacggtcagcgtctgactctgaagaaatacatcaacatcggcgttgctgttgacacgccgaacggtctggtagtgccggtattcaaagatgtcaacaaaaaaggcattattgaactttctcgcgaactgatgaccatttctaagaaagcgcgtgatggtaaactgaccgcgggggaaatgcagggtggctgcttcactatctcttctatcggtggtttgggtaccactcacttcgcgccgatcgttaatgcaccggaagttgcaattcttggtgtgagcaaatccgcaatggaaccggtctggaacggcaaagagtttgttccgcgtttaatgctgccaatctccctgagttttgatcaccgtgttatcgacggcgcggatggggctcgttttatcaccatcatcaacaacaccctgtctgatattcgtcgtctggttatgtaa

SEQ ID NO: 2168 - DNA, 1425 bp, Artificial Sequence
  Optimized genes for E. coli.
atgtcgactgaaatcaaaacccaggttgtagtactcggcgcaggtccggcaggctacagcgcggcgttccgctgcgcagacctgggccttgaaactgtgattgtagagcgttataacacgctgggcggcgtttgcctgaacgttggctgtatcccatccaaagctctgttgcatgtcgcaaaagttattgaagaagcgaaagcactggctgaacacggtatcgtgttcggcgaaccgaagaccgatatcgacaaaatccgtacctggaaagaaaaagttatcaaccagctgactggcggcttggcgggtatggcgaaaggtcgtaaagtgaaagtcgttaacggtctgggtaaattcaccggtgctaacaccctggaagttgaaggcgaaaacggcaaaacggtaattaacttcgataacgcgatcatcgccgctggcagccgtccgattcagcttccttttattccgcatgaagatccgcgtatctgggattctactgacgcattagaactgaaagaagtgccggaacgtctgctggtgatgggaggtggtattatcggtctggagatgggtactgtttatcacgctttagggtcacaaattgatgttgttgaaatgtttgatcaggtcatcccggcggctgataaagacattgttaaagtattcactaaacgcatttctaaaaagtttaatctgatgctggaaaccaaggtgacagcggtagaagctaaagaagacggtatctacgttaccatggaaggaaagaaggcgcccgccgagccgcagcgttacgacgctgtgctggtcgctatcggccgcgtaccaaatggtaaaaacctggatgcgggtaaagccggtgttgaggttgacgaccgtggtttcatccgcgttgataaacaactgcgcaccaatgttccgcacatcttcgccattggcgacatcgttggtcagccgatgctcgctcacaagggggttcacgaaggtcacgttgctgcagaagtcattgctggtaagaaacactacttcgacccgaaagtgatcccttctatcgcttacaccgagcctgaagtagcatgggtgggcctgacggaaaaggaagccaaagagaaaggcatcagctatgaaacggcaaccttcccgtgggcggccagcggccgggcaattgccagtgattgtgctgacggcatgaccaaactgatttttgacaaagagtctcaccgtgtgatcggtggcgcgattgtcggcaccaacggcggtgagctgctgggtgaaattggtctggcaatcgaaatgggctgcgacgcggaagatatcgcgctgaccatccatgcacatccaactctgcatgagtccgtggggcttgccgcagaggtatttgaaggttccatcactgatctgccgaacccgaaagcgaagaaaaaataa

SEQ ID NO: 2169 - DNA, 663 bp, Artificial Sequence
  Optimized genes for E. coli.
atgaaagacattgatactctgatttccaacaatgcgctgtggagcaaaatgctggtagaagaagatccgggcttttttgaaaaactggctcaggcacagaagccacgcttcctgtggatcggctgttctgacagccgtgtgcctgcagagcgcctgaccggtctggaaccgggtgagctgttcgttcaccgtaacgttgctaacctggttatccataccgatctgaactgcctgtctgttgtacagtacgctgttgacgtactggaagttgagcacatcatcatttgcggtcactacggttgcggtggtgtccaagccgccgtcgaaaacccggaattagggctgatcaacaactggctgctgcacattcgcgatatctggttcaaacattcgtcattgctcggcgaaatgccgcaggaacgtcgtctggacaccttgtgtgaactgaatgtgatggaacaggtttacaacctgggccactctactatcatgcaatccgcatggaaacgcggtcagaaagtgaccatccacggctgggcgtatggcattcatgacggcctgctgcgtgacctggatgtgactgcgaccaaccgtgaaacgcttgagcagcgttatcgtcacggtatcagtaatcttaagctgaaacacgcgaaccataaataa

SEQ ID NO: 2170 - DNA, 726 bp, Artificial Sequence
  Optimized genes for E. coli.
atggcaaccgtttctatgcgcgacatgctgaaagcgggcgttcacttcggtcaccagactcgttattggaacccgaaaatgaaaccgttcatcttcggcgcgcgtaacaaggtacatatcatcaacctcgaaaaaactgttccgatgttcaacgaagctttagcagagctgaacaaaattgccagccgtaaaggtaaaatcctgtttgtcggtactaagcgcgctgcttctgaagcggtgaaagatgcggcgctgtcctgcgaccagttcttcgtgaatcaccgctggctggggggtatgttgactaactggaaaaccgtgcgtcagtctatcaaacgtctgaaagacctggaaacccaaagccaggacggcacatttgacaaactgaccaaaaaagaggcactgatgcgtacccgtgaactggagaagctggaaaacagccttggcggtattaaggatatgggcggcctgccagatgccctgttcgttatcgacgccgatcatgaacacattgcgattaaagaagcaaataacctgggtatccctgtgtttgctatcgttgacaccaactccgatccggatggcgtcgacttcgtaatcccgggtaatgatgacgcaattcgtgctgttacgctgtacctgggcgcagtagctgcaacggtacgcgaaggtcgctcacaggatctggcgtcgcaagctgaagaaagttttgttgaagccgagtaa

SEQ ID NO: 2171 - DNA, 852 bp, Artificial Sequence
  Optimized genes for E. coli.
atggctgaaatcactgccagtctggtgaaagaactgcgtgaacgtaccggagctggcatgatggactgcaaaaaggcacttactgaagcgaacggtgatatcgaattggctatcgaaaacatgcgtaaatccggtgcgattaaggccgcgaagaaagctggtaatgttgccgctgacggtgtgattaaaaccaaaattgatggcaactacggtatcatcctggaagtgaactgtcaaacagacttcgttgctaaagacgcgggtttccaggcgtttgccgataaagtgttagatgcggcggtagccggtaaaatcaccgatgtagaagtgctcaaagcgcagttcgaagaagaacgcgtggcactggtagctaagatcggcgaaaatatcaacatccgccgcgttgcagcgctggagggcgatgttctgggcagctatcagcacggtgcacgtattggcgtgctggttgctgcgaaaggcgcagacgaagagctggtcaaacacattgcgatgcacgttgcggcatccaaacctgaatttatcaaaccagaagacgtttctgcagaagtcgttgagaaggaataccaggttcagctggatattgcaatgcagagcggcaagccgaaagagatcgctgagaaaatggttgaaggtcgtatgaaaaaattcaccggtgaggtatcgctgaccggtcagccgttcgtaatggaaccgtctaaaactgtcgggcaactgctgaaagaacataacgccgaggtaacgggcttcatccgttttgaagttggtgaaggcattgaaaaagttgaaaccgactttgcagcagaggtcgctgctatgagcaaacagtcttaa

SEQ ID NO: 2172 - DNA, 1026 bp, Artificial Sequence
  Optimized genes for E. coli.
atgccgtctatccgtctggcagatctggcgcaacagctggatgctgaactgcacggtgacggtgatatcgttatcactggcgtcgcttccatgcagagcgcgcagaccggtcacatcaccttcatggttaacccgaaataccgtgaacacctgggtctgtgtcaggcgtcggcagtggtgatgactcaggacgacctgccgttcgctaaatccgcagcactggtggttaaaaacccatacctgacctatgcgcgtatggctcagatcctggacaccactccgcagccagcccagaatatcgctcctagcgccgtaattgacgccacggcgaaactgggcaacaacgtttctattggtgcgaatgcggtcatcgaatccggtgtagaactcggcgacaatgtgatcattggcgctggctgtttcgttggtaaaaattcaaagatcggcgcgggtagccgcctgtgggcgaacgtgaccatctaccatgaaattcagatcggtcagaactgcctgatccaaagcggcaccgttgttggcgcagacggctttggttatgctaacgatcgcggtaactgggtgaaaattccgcaaattggtcgcgttatcatcggcgaccgtgttgaaatcggcgcctgtactacgattgatcgtggtgctttagacgataccattattgggaacggtgttattatcgacaaccagtgccagattgctcacaacgtagtgattggcgataacaccgccgtcgcaggcggcgtaatcatggcaggttctctgaaaatcggtcgttactgcatgatcggaggggcttctgtcatcaacggccatatggaaatctgcgacaaagttacagtaactggtatgggcatggtaatgcgtccgattacggagcctggcgtttattccagtggtatcccgctgcaaccgaacaaagtctggcgtaaaaccgcagcgctggttatgaacatcgatgatatgagcaaacgcttgaagtctcttgagcgcaaggtgaatcagcaggattaa

SEQ ID NO: 2173 - DNA, 816 bp, Artificial Sequence
  Optimized genes for E. coli.
atggcgttcaaatttaaaactttcgctgcagtgggcgctcttatcggcagtttggccctcgtaggttgcggtcaggatgaaaaagatccgaaccatattaaagtcggagtgatcgttggcgcagagcagcaagtggcggaagttgcacaaaaagttgcgaaagacaaatacggtcttgacgtcgaactggtaaccttcaacgattacgttctgccaaacgaagccctctccaaaggcgacatcgacgctaacgcattccagcacaagccatatctggatcagcagctgaaagaccgtggttacaaactggttgctgttggtaatacctttgtttatccgatcgctggctacagcaagaaaatcaaatctctggacgaactgcaagacggttctcaggttgccgtacctaatgacccgaccaacctgggtcgctcgctgctgttgctgcagaaagtaggcctgattaagctgaaggatggtgtcgggctgctgcctacagtgctggacgttgttgaaaacccgaaaaacctgaaaattgttgagctggaagcaccgcaactgccgcgttcactggatgatgcgcagattgcgctggcagttatcaacaccacttatgcctctcagatcggtctgactccggcaaaagatggcattttcgtagaagataaagagtccccgtatgtgaatctgatcgtcacgcgtgaagacaacaaggatgctgaaaatgtgaaaaaattcgttcaggcttaccagagcgacgaggtttacgaagcggcgaacaaagtgtttaacggcggtgcggtaaagggctggtaa

SEQ ID NO: 2174 - DNA, 474 bp, Artificial Sequence
  Optimized genes for E. coli.
atgggtcgcatttcttccggcggtatgatgttcaaagctatcaccaccgttgctgcactcgtgattgccacatctgcaatggcgcaggacgatctgaccatctcctcgctggcgaaaggcgaaactaccaaagcggcattcaaccagatggttcagggccataaactgccggcatgggtgatgaaaggtggtacttacaccccagctcagactgtcacgctgggcgacgaaacctatcaggttatgagcgcctgtaaaccgcacgactgcggttctcagcgtatcgccgtaatgtggagcgagaagagtaatcaaatgaccggtctgttctccactattgatgaaaaaacgtcacaagagaaacttacctggctgaacgttaacgatgcgctgtctatcgacggtaaaaccgtactgtttgctgcgttgactggcagcctggaaaaccacccggatggctttaacttcaagtaa

SEQ ID NO: 2175 - DNA, 333 bp, Artificial Sequence
  Optimized genes for E. coli.
atgagcttctttatttctgacgctgttgctgccacgggcgcaccagcacaagggagcccgatgtccctcattctgatgctggttgtttttggtctgatcttctacttcatgatcctgcgtccgcagcagaagcgtaccaaagagcacaagaaactgatggattctatcgcgaaaggtgatgaagttctgaccaacggcggcctggtcggtcgtgtaactaaagtggctgaaaacggttatatcgccattgcgcttaatgacaccactgaagtggttatcaaacgcgacttcgtagcagcggtgctgccgaaaggcaccatgaaagcgctgtaa

SEQ ID NO: 2176 - DNA, 645 bp, Artificial Sequence
  Optimized genes for E. coli.
atgcgcatcatcctgttgggcgctccaggagcggggaaaggcacccaggcgcagtttattatggaaaaatacggtatcccgcagatcagcactggcgatatgctgcgtgctgcagtgaagagcggttctgaactgggtaaacaagctaaagatatcatggatgctggcaaactggtcactgacgaattagtcattgcacttgtgaaagagcgtatcgcccaagaagactgccgtaacggtttcctgctggatggcttcccgcgtaccatccctcaggctgacgcaatgaaagaagcaggcattaatgtggattatgtgctggaatttgacgttccggatgagctgatcgttgatcgcattgtcggtcgtcgcgttcacgccccatctggccgcgtttatcacgttaaattcaacccgccgaaagtggaaggtaaagacgacgtaaccggtgaagagctgaccactcgtaaagatgaccaggaagaaaccgtacgtaagcgtctggttgaataccatcagatgacagcaccgctgattggctactactccaaggaagctgaagcgggtaacaccaaatatgcgaaagttgacggtacgaagccggtagcggaagttcgcgccgacctggagaaaatcctcggttaa

SEQ ID NO: 2177 - DNA, 495 bp, Artificial Sequence
  Optimized genes for E. coli.
atggtgaccttccataccaaccatggcgacatcgttattaaaacctttgacgacaaagctcctgaaaccgtgaaaaactttcttgattactgccgtgaaggcttctacaacaacaccatcttccaccgtgtgattaacggtttcatgattcagggcggtggttttgaaccaggtatgaaacagaaggcaaccaaagagccgattaagaacgaagccaataatggtctgaaaaatactcgcggtacgctggcgatggcacgcactcaggcgccgcacagcgcaactgcgcagttcttcatcaacgtagttgacaacgacttcctgaacttctctggtgaaagcctgcaaggctggggctattgtgtgtttgctgaagttgttgatggcatggatgtcgtcgataaaatcaaaggcgtagctactggtcgttccgggatgcaccaggacgttccgaaagaagatgttatcatcgaatccgtaacagtttctgagtaa

SEQ ID NO: 2178 - DNA, 954 bp, Artificial Sequence
  Optimized genes for E. coli.
atgcgtgcgaaactgctgggtatcgttctgactactccgattgctatttcttccttcgcctcgaccgaaaccctgagctttacaccagataacatcaacgctgacatcagcctcggcacgctgtctggtaaaaccaaagagcgcgtatacctggctgaagaaggtggtcgtaaggtgagtcagctggactggaaattcaacaatgcagcaatcatcaaaggcgcaattaactgggacctgatgccacaaatctccattggtgcggcgggttggactacacttggaagccgtggcggcaacatggttgatcaggactggatggattccagtaacccgggcacctggaccgatgaatcccgtcacccggacacgcaactgaactatgcgaatgaatttgatctgaatattaagggctggctgttaaatgagccgaactaccgtctggggttgatggcgggttaccaggaaagccgctacagcttcactgcgcgcggcgggtcttacatctattcctctgaagagggcttccgtgacgatatcggttcattcccgaatggtgaacgcgccattggctacaaacagcgttttaaaatgccgtatatcggcctgaccggttcttatcgttacgaagattttgaactgggcggtactttcaaatatagcggctgggtggagtcttcagacaacgacgaacattatgatccgggtaagcgtatcacctatcgctcgaaggtgaaagaccagaactactactccgtagctgttaacgcaggttattatgtcactcctaatgctaaagtttacgttgaaggcgcctggaaccgtgtcaccaacaaaaaaggtaacacgtctctgtacgatcacaacaacaacacctctgactacagcaaaaacggtgcaggcatcgaaaactacaacttcattaccactgctggtctgaaatacaccttctaa

SEQ ID NO: 2179 - DNA, 564 bp, Artificial Sequence
  Optimized genes for E. coli.
atgtctttgatcaacaccaaaatcaaaccgttcaaaaaccaggcttttaaaaatggcgagtttatcgaaatcactgaaaaagataccgaaggccgctggtcagtgtttttcttctatccggctgacttcacctttgtttgtccaacggagctgggtgatgtggctgatcactacgaagaactgcagaaactgggcgttgacgtttacgctgtctccactgacactcacttcactcataaagcctggcacagctcgtctgaaaccattgccaagattaaatacgcaatgatcggcgatccgaccggtgcgctgacccgtaacttcgataacatgcgcgaagatgaggggctggcggaccgtgctaccttcgtagtagacccgcagggcattattcaggcgattgaagtgacagcagagggtatcggtcgtgacgcttctgacctgctgcgtaagatcaaggcggcacaatatgtcgccagccatccgggtgaagtttgcccggcgaaatggaaagaaggcgaagcaacgctggcaccttccctcgatctggttggtaaaatctaa

SEQ ID NO: 2180 - DNA, 210 bp, Artificial Sequence
  Optimized genes for E. coli.
atgagcaaaatcaaaggcaacgtgaaatggttcaacgaaagcaagggctttggtttcatcactccggaagatggctccaaagacgtattcgttcacttctctgcaattcagacgaatggcttcaaaaccctggctgaaggtcagcgtgttgagtttgaaatcaccaacggtgcgaaaggtccgtctgccgctaacgtcattgcgctgtaa

SEQ ID NO: 2181 - DNA, 1218 bp, Artificial Sequence
  Optimized genes for E. coli.
atgagctcagtagacattctggtaccggatctccctgagtctgttgctgacgcaaccgtggcgacctggcacaaaaaaccgggcgatgcggtggtccgcgatgaagtgctggttgaaattgaaaccgataaagtggttctggaagttcctgccagtgcagatggtattttagatgctgttctcgaagacgaaggcaccactgtaaccagccgtcagatcctcggccgtttgcgcgaaggtaattccgcaggtaaagaaacttccgcgaaatccgaagaaaaagcgtctacgccagcgcagcgtcaacaagcttctctggaagagcagaacaacgacgcccttagtccggcaattcgtcgtctgctggcagaacataacctggacgcgtcagcgattaagggaacgggggtgggcggtcgtctgacccgtgaagatgtcgagaaacacttagctaaggcgccagctaaagagagcgcccccgccgcagctgcgccggctgctcagcctgctctggcagcacgttctgagaagcgcgttccgatgacccgcctgcgtaagcgtgtggcagagcgtctgctggaagccaaaaacagcactgcgatgctgacaaccttcaacgaagttaacatgaaaccaatcatggatctgcgcaaacagtacggcgaagcgtttgaaaaacgtcacggtatccgcttgggttttatgtccttctacgttaaggctgtagtcgaagcactgaaacgctatccggaagtcaatgcctctatcgatggcgacgacgttgtttatcacaactacttcgacgtatctatggcagtatcgacaccgcgtggtctggtgactccggttttgcgtgatgttgacactctgggcatggctgatatcgaaaagaaaatcaaagagctggctgtgaaaggtcgtgacggcaaactgaccgttgaggacctgactggtggcaacttcaccatcaccaacggcggcgtgtttggcagcctgatgtcgacgccgatcatcaacccgccgcagtccgccattctgggtatgcacgctatcaaagaccgtccgatggcggtaaatggtcaggttgaaatcctgccgatgatgtacctggcgctgtcttatgaccatcgcctgatcgacggtcgcgaaagcgttggtttcctggtcaccattaaagaactgcttgaagatccgactcgtcttctgctggatgtataa

SEQ ID NO: 2182 - DNA, 1167 bp, Artificial Sequence
  Optimized genes for E. coli.
atgaacctgcatgaataccaggcgaaacaactgtttgcacgttatggcttgcctgcgccagtaggctacgcctgtactacgccgcgtgaagctgaagaggccgccagtaagattggcgcgggcccgtgggtggtaaaatgccaggttcacgcgggtgggcgtggtaaagcaggtggcgtgaaggtcgtaaacagcaaagaagacatccgtgcttttgctgaaaactggctgggtaaacgcctggtaacctatcaaaccgatgctaacggtcagccagtcaaccagattctggtcgaagccgcaactgatatcgctaaagagctctatctgggcgctgtagttgaccgtagctcgcgtcgcgtggtatttatggcttctaccgaaggcggcgttgagatcgaaaaagtcgcagaagaaacacctcatctgattcacaaagttgctcttgaccccttgacgggtccgatgccgtaccagggtcgtgagctggcattcaaattagggctggaaggtaagctggttcagcagttcaccaaaatcttcatgggtctggctaccatcttcctggaacgtgatctggcgttaattgaaatcaacccgctggttatcaccaaacagggcgacttgatttgcctggacggcaaactgggagctgacggtaatgcactgttccgtcagccggatctgcgtgaaatgcgcgatcagtcccaggaagatccgcgcgaagcgcaagccgctcagtgggaactgaactacgttgcgctggatggcaacatcggctgtatggttaacggcgcaggccttgcgatgggcaccatggatattgttaaactgcacggtggtgaaccggcaaacttcctcgacgttggtggcggtgcgactaaagagcgcgtaactgaagcatttaaaattatcctgtctgacgacaaagtgaaagcggtgctggtgaatattttcggtggtatcgttcgctgcgacctgatcgcggatggcatcatcggtgctgttgcagaggtcggtgttaatgttccggtagtggttcgtctggagggtaacaacgccgaactgggggccaagaaactcgccgattccggtctgaatatcattgctgcaaaaggcctgaccgacgcggcgcagcaagtggtggcagcggttgaaggcaagtaa

SEQ ID NO: 2183 - DNA, 522 bp, Artificial Sequence
  Optimized genes for E. coli.
atgcagctgaacaaagtgctgaaaggcctgatgatcgcgctgccagtgatggcgattgctgcctgctcgagtaataagaatgccagcaacgacggttccgaaggcatgctcggcgcaggcaccggtatggatgctaacggcggcaacggtaacatgagctctgaagagcaggcgcgtctgcagatgcaacaattgcagcagaacaacatcgtttattttgacctggataagtatgatatccgttctgacttcgcgcagatgctggacgcacacgcgaacttcctgcgttccaacccgtcttacaaagttaccgttgaaggtcacgctgacgaacgtggtactccggaatacaacatttcccttggggagcgtcgcgcgaatgcagtgaaaatgtacctgcaaggtaaaggtgtatcagccgatcagatttctatcgtcagctatggcaaagaaaaaccggcagtactgggtcatgatgaagcagcttacagcaaaaaccgccgcgctgttctggtttactaa

SEQ ID NO: 2184 - DNA, 792 bp, Artificial Sequence
  Optimized genes for E. coli.
atgagctcaaatttccgtcaccagcttttaagtctttcgctgctggttggcattgctgcaccgtgggcggcgtttgcccaggctccgatttcttctgtgggcagcggttccgttgaagatcgcgtaacacaactggaacgtatctctaatgcacatagtcaattgctgacccagctgcagcaacaactctccgataaccagagcgatatcgattccctgcgtggccagatccaggaaaaccagtaccagctgaatcaggttgtcgagcgtcagaagcagattctgctgcaaatcgacagcctgtcgtccggcggtgcagctgcgcaatctacctctggcgatcagtctggggccgcagcttctactacgcctactgctgacgcaggtactgcgaacgcgggcgcgccggtgaaatctggtaacgccaacaccgattacaatgctgctatcgcgctggtacaggacaagagccgccaggatgatgcgatggttgcattccagaacttcatcaaaaactatccggactccacctatctgccgaacgctaactactggctgggtcagctcaactacaacaaaggcaaaaaagacgacgccgcttactactttgcatcagtagtcaagaactacccgaaatccccaaaagcagcagacgctatgttcaaagttggtgtgattatgcaagacaaaggtgataccgctaaagcgaaggccgtttatcagcaggtgatcagcaaatatccaggaaccgacggtgcgaaacaggcgcagaaacgtctgaacgcaatgtaa

SEQ ID NO: 2185 - DNA, 753 bp, Artificial Sequence
  Optimized genes for E. coli.
atggcggttaccaaactggtgctggtacgccatggcgaatctcaatggaataaagagaaccgtttcaccggctggtacgacgttgatctgagcgaaaaaggcgtttctgaagccaaggctgcagggaagctgctgaaagaagaaggctacagctttgacttcgcttacaccagcgtccttaagcgcgcaatccacactctgtggaacgtgttggatgagctggatcaggcctggctgccggttgaaaagtcctggaaactgaatgagcgtcactacggtgctctgcaaggtctgaacaaagctgaaacggcggaaaaatacggcgacgaacaggtgaaacagtggcgtcgtggcttcgcggtaactccgccggaattgactaaagacgacgagcgctatccgggtcatgatccgcgctatgcgaaactctcagagaaagaactgccacttacagaatcgctggcgctgaccattgatcgcgtaatcccttactggaacgaaaccatcctcccacgtatgaaatctggtgaacgtgttattattgcagctcacggcaactccctgcgtgcactggttaaatatctggacaacatgagtgaagaggagatcctggaattaaacatcccgaccggtgttccgctggtctatgaatttgatgaaaacttcaaaccgctgaaacgttattacctgggtaatgctgacgaaatcgccgctaaagcagcagcggtggccaaccagggtaaagcgaagtaa

SEQ ID NO: 2186 - DNA, 747 bp, Artificial Sequence
  Optimized genes for E. coli.
atgaaatctgtccttaaggtatctctggctgcattgactctggcattcgctgtaagttcgcatgccgctgacaagaaactggtggttgctactgacaccgcgttcgtaccgttcgaattcaaacagggcgataagtatgttggctttgacgttgatctgtgggcggcgattgctaaagaactgaagctggattacgaactgaaaccgatggatttctccggtatcatcccggcactgcaaaccaaaaacgttgacctggcgttagccggtattaccatcaccgatgaacgtaaaaaggcaatcgacttctctgacggctactacaaaagcggtctgctggttatggttaaagccaataacaacgatgtgaagtcagtaaaagatctggacggtaaagtggtggcggtgaaatccgggacgggtagcgtcgattatgcgaaagcgaacatcaaaactaaagaccttcgccagttcccgaacatcgataacgcttacatggaactcggtaccaaccgtgcagacgcagttctgcacgacacaccaaatattctgtattttattaaaacggctggtaatggtcagtttaaagcagtcggcgactccctggaagcgcagcagtacggcattgccttccctaaaggcagcgatgagctgcgcgataaagttaacggcgctttgaaaaccctgcgtgaaaacggtacttacaacgaaatctataaaaaatggtttggcaccgagccgaaataa

SEQ ID NO: 2187 - DNA, 504 bp, Artificial Sequence
  Optimized genes for E. coli.
atgtctacagcgaaactggttaagagcaaagcgaccaacctgctgtacacccgtaacgacgtttctgacagcgaaaaaaaagcaaccgtagagttgctgaaccgtcaggtaattcagttcatcgacctgtcgctgatcaccaaacaggcgcactggaacatgcgtggtgcgaattttattgctgtccatgaaatgctggacggcttccgtactgcactgattgatcaccttgataccatggctgaacgcgccgtgcagctgggcggcgtggcgctgggtactacgcaagtgatcaactccaagactccgttaaagagttatccgctggatatccacaatgttcaggaccatctgaaagaactggctgaccgctacgcaatcgttgctaacgatgttcgtaaagctatcggtgaagcaaaagatgacgatacggccgatattctgaccgccgcttctcgcgatctcgacaaattcctgtggtttatcgaatccaacattgagtaa

SEQ ID NO: 2188 - DNA, 516 bp, Artificial Sequence
  Optimized genes for E. coli.
atgaaaaaaatcgcctgcctgtccgcattggcagctgttcttgcgttcacagccggtacttccgttgctgctacgtccaccgtaactggcggctacgcacagagcgatgcgcagggtcagatgaacaaaatgggtggtttcaacctgaaatatcgttatgaagaagataacagcccgctgggtgttatcggttcttttacctataccgagaagtcccgtactgccagttcaggcgattacaacaagaatcagtactacggtatcaccgcaggcccagcttaccgtatcaacgactgggcgtcgatttatggcgtggtcggcgtagggtatggtaaattccagaccactgaatacccgacctacaaacacgacacgtctgactacggcttctcttacggtgcgggtctgcaatttaacccgatggaaaatgtggcgctggattttagctacgaacaaagccgcattcgttctgttgacgtgggcacctggattgctggcgttggttatcgcttctaa

SEQ ID NO: 2189 - DNA, 225 bp, Artificial Sequence
  Optimized genes for E. coli.
atggaaaaaggtactgtgaaatggttcaacaacgccaagggctttggcttcatctgcccggaaggcggcggtgaagatatctttgctcactacagcaccattcagatggacggttatcgtaccctgaaagcgggtcagtctgtacagttcgacgttcatcaaggtccgaaaggcaatcacgcttccgttatcgtcccagttgaagttgaggcagcagtggcgtaa

SEQ ID NO: 2190 - DNA, 219 bp, Artificial Sequence
  Optimized genes for E. coli.
atggcgaaagaagataacatcgaaatgcagggcacggtgctcgaaaccctgccgaacaccatgttccgcgttgaactggaaaatggtcatgtcgtaactgctcacatttccggtaaaatgcgtaaaaactacatccgcattctgaccggcgacaaagtgaccgttgagctgactccgtatgacctgagcaagggtcgtatcgtttttcgttctcgttaa

SEQ ID NO: 2191 - DNA, 495 bp, Artificial Sequence
  Optimized genes for E. coli.
atggttgacagcaagaaacgccctggtaaagatctggatcgcatcgaccgtaacatcctgaacgaactgcagaaagacggtcgtatttccaatgtcgagctgtctaaacgtgtgggtctctcgccaacgccgtgcctggagcgcgttcgtcgtctggaacgtcagggctttattcagggttacaccgcgctgctcaacccgcactacctggacgcttctctgctggtgttcgttgaaattactctgaatcgtggtgcgccggacgtatttgaacagttcaacaccgcagtacaaaaactggaagaaatccaggaatgtcatctggtttccggcgacttcgattacttactgaaaacccgtgttccggatatgagcgcctatcgcaagcttttgggcgaaaccctgctgcgtctgccgggcgttaacgatacccgcacttatgtcgtgatggaagaggtgaaacaaagtaaccgcctggtaatcaaaactcgttaa

SEQ ID NO: 2192 - DNA, 2283 bp, Artificial Sequence
  Optimized genes for E. coli.
atgtctgaactgaacgaaaaactggcgaccgcatgggaaggtttcaccaaaggtgactggcagaacgaagtgaatgtccgcgacttcatccagaaaaactacaccccatatgagggcgatgagtctttcctcgcaggcgcaactgaagccacaacgactctgtgggataaagtgatggagggtgttaagcttgaaaatcgtactcatgcccctgtagatttcgacactgcagtggcaagtacgatcacctctcacgatgcggggtacatcaacaaacaactggaaaagatcgtcggtctgcaaaccgaagcaccgctgaagcgtgcactgatcccgtttgggggtattaaaatgatcgaaggttcttgtaaagcatacaaccgtgagctggatccgatgatcaagaaaatcttcacagaatatcgcaaaacccacaaccagggcgtgtttgatgtatacactccggacattctgcgttgccgtaagtctggtgtattaaccggcttgccggatgcctatggccgtggtcgtatcattggtgattaccgtcgtgtcgcgctttacggcatcgactatctgatgaaagacaaactggcacagttcacttccctccaggctgatcttgagaacggcgttaatctggaacagaccattcgtctgcgtgaagaaattgctgaacaacaccgtgcgctgggtcagatgaaagaaatggcagctaagtacggttatgatatcagcggaccggcaaccaacgcgcaggaagcgattcagtggacctatttcggttacctggcggcggttaaaagccagaatggcgcggcgatgtccttcggccgcacttcaacctttttggatgtttacatcgagcgcgatctgaaagcgggtaagattaccgagcaggaagctcaggagatggtcgaccacctggtgatgaaattacgcatggttcgcttcctgcgcaccccggaatacgatgaactgttctctggcgacccaatctgggcgacggaaagcatcggcggtatgggtcttgacggccggacgctggtcactaaaaatagtttccgtttcctgaacaccctgtatacgatgggcccgtctccagaaccgaacatgaccatcctgtggagcgaaaaactccccctcaacttcaaaaaattcgccgctaaagtctcaattgatacctcgagtctgcagtacgaaaacgatgacctgatgcgcccagactttaacaacgacgactacgcaatcgcttgctgcgtgtctccgatgattgtgggtaaacaaatgcaattttttggtgcgcgtgctaacctggcaaaaaccatgctgtacgctattaacggtggtgtggacgagaagctgaaaatgcaggttggtccgaaatccgagccgattaagggggacgttcttaactacgacgaagttatggaacgtatggatcacttcatggactggctggccaaacagtatattacagccctgaacatcatccactacatgcatgacaaatacagctatgaagcgagcttgatggcgctgcacgaccgtgatgtgattcgtaccatggcctgtggtatcgcgggcctctcagtagccgcagacagcctgtccgctatcaaatacgccaaggtgaaaccgatccgtgacgaagatggattggcgatcgattttgaaatcgaaggcgaatacccacagtttggcaacaatgacccgcgtgttgatgatctggctgtagacctggttgaacgctttatgaagaaaattcaaaaactgcatacctaccgcgatgctattccgactcagtctgtgctgactatcacttccaacgttgtttatggtaaaaagactggtaacactcctgacggtcgtcgcgctggcgctccgttcggtccgggtgcgaatcctatgcacggccgagatcaaaaaggcgcagttgcttcgctgacgtcggtagctaaactgccgtttgcttacgcgaaagatggcatttcttataccttctccatcgttcctaatgctctgggcaaagacgatgaagtacgtaaaactaacctggctggtctgatggatggctacttccatcatgaagcaagcattgaaggcggccagcacttaaatgttaacgtaatgaaccgcgaaatgctgctggacgcaatggaaaacccggagaaatatccgcagctgaccatccgcgtttccggctatgccgttcgtttcaactccctgaccaaagagcaacagcaggacgtaatcacccgtacgtttacccagagcatgtaa

SEQ ID NO: 2193 - DNA, 1674 bp, Artificial Sequence
  Optimized genes for E. coli.
atgaccgaaagctttgctcagctgttcgaagaatccctgaaagaaattgaaacccgtccaggatcaattgttcgtggtgtggttgttgcaattgacaaagatgtggtattggtcgatgctggcctgaaaagtgaatctgctatccctgccgaacaatttaagaacgcgcagggcgaactggaaatccaggttggtgatgaagtagatgttgccctcgatgccgttgaagacggtttcggcgaaactctgctgtcgcgcgaaaaagcaaagcgtcacgaagcatggattaccctggagaaggcttacgaagacgcggaaacggtgactggcgttatcaacggcaaagttaaaggtggcttcactgtcgaactgaacggtatccgtgcgttcctgccgggtagcctggtagacgtacgtccggttcgcgatacgctgcatctggaaggtaaagagctggaattcaaagtgatcaaactggaccagaaacgtaacaacgtagtagtctcccgtcgcgcagtgattgagtctgaaaactccgccgagcgtgatcagcttcttgagaacctgcaggaaggtatggaagttaaaggcattgtcaaaaatctgaccgactatggggcattcgttgacctgggtggtgtcgacggtctgctgcacatcactgatatggcgtggaaacgcgtaaaacacccatcagaaatcgtgaatgtgggcgacgaaattactgttaaggtattaaagtttgatcgcgagcgtactcgcgttagcttaggattgaaacaactgggtgaagatccgtgggtggcgattgctaagcgctatccggaaggcaccaaattgacaggtcgtgtcaccaacctgacggattacggctgttttgttgagatcgaagagggggtagaaggtctggttcacgtttccgaaatggactggaccaacaagaacatccatccgtctaaagtcgtcaacgtgggtgacgttgttgaagtgatggttctggatatcgacgaggaacgccgtcgtatctcgcttggtctcaagcagtgcaaagctaacccgtggcagcagttcgctgaaacccataacaaaggcgatcgtgttgaaggcaagattaaatctatcaccgattttggcatcttcatcggcctcgacggcggtattgatggcctggtccacctgtctgacatctcctggaacgttgcgggtgaagaagctgtgcgtgaatacaaaaaaggggacgaaatcgctgcggtggtgctgcaagtggatgctgaacgggagcgcatttctctgggcgtgaaacagctggcagaagacccgttcaacaactgggtagcgctgaataagaaaggcgcgatcgttactggtaaagtgaccgctgttgatgcaaaaggtgcgaccgtagagctggctgatggtgtagaaggctacctgcgtgccagcgaagcgagccgtgaccgcgtggaagatgcaacccttgtactgtccgttggcgacgaggtagaagccaaattcaccggtgttgaccgtaaaaaccgtgcaatcagtctgagcgttcgtgctaaagatgaagcggatgagaaagacgctattgccacagtcaataaacaggaggacgcaaacttctctaataatgcaatggcagaggcctttaaagcggcgaaaggtgagtaa

SEQ ID NO: 2194 - DNA, 285 bp, Artificial Sequence
  Optimized genes for E. coli.
atgaccaaatctgaactgattgagcgtctggcaactcagcagagccatattcctgcgaaaaccgttgaagacgcagtgaaagaaatgctggaacacatggcctcgacgctggcgcaaggcgaacgtatcgaaatccgtggttttggttccttctctctgcactaccgcgctccgcgtaccggtcgtaacccgaaaactggcgacaaagtagaacttgaaggcaagtatgttccgcacttcaagccaggtaaagagctgcgcgatcgcgctaacatctacggctaa

SEQ ID NO: 2195 - DNA, 1191 bp, Artificial Sequence
  Optimized genes for E. coli.
atgtttgaaaacatcaccgcggcgcctgcggatccgatcctgggtctggctgacctgttccgtgcagatgagcgtccgggcaaaattaatttgggcatcggtgtttacaaagacgaaaccggaaagactccggtactgacttccgtgaaaaaagcggaacaatacctgctggaaaatgagacaaccaagaactatctgggcattgatggtattccggaattcggtcgttgtactcaggagctgttgttcggtaaaggttctgcacttatcaacgacaaacgtgcccgtaccgcacaaaccccgggtggtactggcgcgttacgggtcgctgccgatttcctggcgaaaaatacgtcggtaaaacgcgtctgggtgagcaacccgtcctggccgaaccacaagtctgtgttcaactccgctggtcttgaggtacgcgaatacgcttactacgatgcagaaaaccataccctggacttcgacgccttgatcaacagcctgaatgaagcgcaggcgggcgatgtggttctcttccacggttgctgccacaacccaaccggtatcgacccgactctcgagcagtggcagacgctggcacaactgagtgttgaaaaaggctggctgccgctgtttgattttgcttatcagggcttcgcgcgtggtctggaagaggacgctgaaggcctccgcgcctttgcagcaatgcacaaagaactgatcgttgcctcttcttatagcaaaaacttcggcctgtacaacgaacgtgttggtgcttgcactctggttgctgctgattctgaaactgttgaccgtgcgtttagtcagatgaaagcagcgattcgtgctaactacagcaatccgccagctcatggcgcttcagtagtagcgaccattctgtcgaatgacgcgctgcgcgcaatctgggaacaggaattaaccgatatgcgtcagcgcattcagcgtatgcgccagctgttcgttaacaccctgcaagaaaagggggcgaaccgtgacttctcctttatcatcaaacagaacggtatgttctccttctctggcctgaccaaagagcaggttctgcgtctgcgtgaagaatttggcgtttatgccgtagccagcggtcgcgtgaacgttgcaggcatgacgcctgataacatggcaccactttgtgaagctatcgtcgcagtgctgtaa

SEQ ID NO: 2196 - DNA, 1089 bp, Artificial Sequence
  Optimized genes for E. coli.
atgatgaaacgtaacattctggctgtgattgttcctgcactgttagtggcgggtactgcgaatgctgctgaaatctataacaaagatggtaacaaggtcgatctgtatggtaaagcagtaggtctgcactacttcagcaaaggcaatggcgagaatagttacggtggtaacggtgatatgacttacgcacgtctcggtttcaaaggtgaaacccagatcaactctgacctcacgggttacgggcaatgggaatacaacttccagggcaacaacagcgaaggcgcggatgctcaaacaggtaataaaacccgtctggcattcgcaggcctgaaatatgccgacgtcggcagcttcgactacggtcgtaactatggcgtagtttacgatgcgctgggctacactgacatgctgccggaattcggtggcgacacggcttacagcgatgacttcttcgtaggacgcgtaggcggcgtggcgacttatcgcaactccaacttttttgggcttgtcgacggcctgaacttcgcggttcagtatctgggcaaaaacgaacgtgataccgcacgccgctctaacggcgatggcgttggcggttccatttcttatgagtacgaaggttttggcatcgtcggcgcttatggcgcagctgaccgtactaacctgcaggaagcgcaaccattggggaatggtaaaaaagctgagcagtgggcgaccggtcttaagtatgatgcaaataacatctacctggccgctaactacggcgaaactcgtaatgccacgccgatcaccaacaaattcaccaacacctccggctttgccaataagactcaggatgtgctgctggttgcgcagtaccagtttgactttggtctgcgtccgtctatcgcctacaccaaatccaaagcgaaagacgttgaaggtattggtgacgttgacctggtaaactactttgaagtgggtgcaacctactacttcaacaagaacatgtctacctatgttgattacatcatcaaccagattgattcagataacaaactgggtgtgggatcggacgacaccgttgctgttggtatcgtttatcagttctaa

SEQ ID NO: 2197 - DNA, 168 bp, Artificial Sequence
  Optimized genes for E. coli.
atgaaacgtcagaagcgcgatcgtctggagcgtgctcaccaacgcggttaccaggcaggtatcgccggtcgttctaaagaaatgtgcccgtatcagaccctgaaccagcgtagccagtggctgggcggctggcgtgaagcgatggctgaccgcgttgtgatggcgtaa

SEQ ID NO: 2198 - DNA, 1041 bp, Artificial Sequence
  Optimized genes for E. coli.
atgaaaaaaactgcgattgctattgccgttgctctggcaggtttcgcaaccgttgcgcaggctgctccgaaagataacacctggtacaccggcgctaagctgggctggtcccagtaccatgacacgggcttcatcaacaataacggtccgactcatgaaaatcaacttggtgctggcgcattcggcggttaccaggttaatccatatgtcggatttgaaatgggctacgactggctgggtcgtatgccgtataaaggctccgtagaaaacggcgcgtacaaagctcagggtgttcaactgaccgcgaaactgggttatccgatcaccgatgatctggacatttatacccgtcttggcggcatggtctggcgtgctgataccaagagtaatgtttacggtaaaaaccacgacactggcgtttctccggtgttcgccggtggtgtggagtacgccattacgccagaaatcgccactcgtctggaatatcagtggaccaacaacatcggcgatgcgcacaccatcggtactcgcccggacaacgggatgctgtctctgggcgtatcttaccgctttggccagggcgaagctgcacccgtggtggcccctgcaccggcaccagcacctgaagttcagaccaaacacttcaccctgaaatcggatgtgctgtttaacttcaacaaagcgactctgaagccggaaggtcaggcagccttggatcagctgtacagccagctctccaacctggatccgaaggacggttctgttgttgtactcggctatactgaccgtattggttccgacgcttacaaccaggggttatcagagcgtcgcgcacaaagcgtcgttgattacctgatttctaaaggtatcccggctgacaaaatcagcgcgcgtggtatgggtgaaagcaacccggtaacaggtaatacctgtgataacgtaaaacagcgtgcggcgctgatcgactgcctggcgccggatcgccgcgttgagatcgaagtgaaaggcatcaaagacgtggtcacgcaaccgcaggcgtaa

SEQ ID NO: 2199 - DNA, 375 bp, Artificial Sequence
  Optimized genes for E. coli.
atgaccatgtacgcaactcttgaagaagcgatcgacgcagcgcgtgaagagttcctggctgacaacccgggtattgatgctgaagatgcgaatgttcagcagttcaacgcgcagaaatatgtgctgcaagacggcgatatcatgtggcaggttgaattctttgccgatgaaggcgaagagggcgaatgcctgccgatgctgagcggtgaagccgcacaatctgtatttgacggtgattacgacgaaatcgaaattcgtcaggagtggcaggaagaaaacacgctgcacgaatgggacgaaggcgagttccagctggaaccaccgctggataccgaagaaggtcgtgctgctgcagacgagtgggatgagcgctaa

SEQ ID NO: 2200 - DNA, 522 bp, Artificial Sequence
  Optimized genes for E. coli.
atgcaaaaagttaaactgccgctgaccctggatccggttcgtaccgcgcaaaagcgtctggactatcagggcatctacactccggatcaggttgagcgcgttgctgaaagcgtggtttccgtcgacagcgacgtcgaatgttcaatgagttttgcaattgataaccagcgtttggccgttctcaatggtgatgcgaaagtgaccgtaacgctggaatgccagcgctgcggtaaaccattcactcaccaggtgtacaccacttactgcttctctccggtacgttctgacgagcaggcagaagcacttccggaagcctatgagccgatcgaagttaacgaatttggcgaaatcgacctgctggcaatggttgaagatgaaattatcctggcgctgccagttgtacctgtacatgactccgagcactgtgaagtcagcgaggctgatatggtgttcggtgaactgcctgaagaagcgcagaaaccgaacccgttcgctgtgctggcttctctgaaacgcaagtaa

SEQ ID NO: 2201 - DNA, 174 bp, Artificial Sequence
  Optimized genes for E. coli.
atggcggttcagcagaacaaaccgactcgctccaaacgtggtatgcgtcgttctcatgatgcgctgaccgccgtaacgtcgctgtctgttgacaaaaccagcggcgaaaaacacctgcgtcaccacatcaccgctgacggctactatcgcggtcgtaaagtgattgcaaagtaa

SEQ ID NO: 2202 - DNA, 954 bp, Artificial Sequence
  Optimized genes for E. coli.
atgtacaccaaaattatcggtacgggatcttacctgcctgagcaggttcgcacgaatgctgacctggaaaaaatggttgacaccagcgacgaatggatcgttacccgtactggcattcgtgaacgccatatcgctgctccgaacgaaaccgtttcaacgatgggctttgaagcggcaactcgtgctatcgaaatggcgggtattgagaaagaccagatcggcctgatcgtggttgcaaccacttccgctactcacgcgttcccgtctgcagcttgccagattcagtctatgctgggcatcaaaggctgcccggcattcgacgttgctgccgcctgtgcgggttttacttacgcactctccgtagcggatcagtacgttaaatccggtgctgtgaaatatgcgctggtcgtcggttctgacgtactggcgcgtacctgtgatccgaccgaccgcggcaccatcatcatcttcggcgacggtgcgggcgcagccgtattagccgcttctgaagaaccggggatcatctccacccatctgcacgctgatggcagctatggcgagctgttgacgctgccaaatgccgatcgtgttaacccggaaaactccattcacctgaccatggcaggtaatgaagtgttcaaagttgcggtcaccgaactggcacacattgttgatgagactctggctgcgaacaacctcgatcgcagccaacttgactggctggtcccccatcaagctaacctgcgtatcatttctgcgactgcgaagaaactgggtatgagcatggataacgttgtggtgaccctggaccgtcacggtaacacctcggctgcaagcgtgccgtgcgcactggatgaagccgtacgtgatggtcgtattaagccaggtcagctggtgctgttggaagcatttggcggtggtttcacctggggcagtgccctggtacgcttctaa

SEQ ID NO: 2203 - DNA, 930 bp, Artificial Sequence
  Optimized genes for E. coli.
atgacgcaatttgcctttgtgttcccgggacagggttcccagactgttggtatgctggcagatatggctgcttcttatccgattgtagaagaaacctttgctgaggcgtcagcagccctgggctacgacctgtgggcgttgactcaacaaggtccggctgaagaactgaacaaaacctggcagacccagcctgcgctgctgaccgcttcggtagctctctatcgcgtctggcagcagcaaggcggcaaagcaccggcgatgatggccgggcacagcctgggtgaatattccgcacttgtctgtgcgggcgttatcgacttcgctgacgccgttcgtctggttgaaatgcgtggtaaattcatgcaggaagcggtaccggaaggcaccggtgcgatggcggctatcatcggtctggatgacgcatccatcgctaaggcctgtgaagaggctgcagaaggtcaggtggtgagccccgtgaacttcaattctcctggtcaggttgtgattgccggtcacaaagaagctgtagagcgcgcaggcgcagcctgcaaagcggcgggtgctaaacgtgcactgccgctgccagtcagcgtgccaagtcattgcgcactgatgaaaccggcagctgataaactggctgttgagctggcgaaaatcaccttcaacgcgccaaccgttccggttgttaacaacgttgacgttaagtgcgaaactaatggcgatgcgattcgtgacgctctcgtacgccagctgtacaacccggtacagtggaccaaaagcgtcgaatacatggcagcgcagggcgtggagcacctgtacgaagttggcccgggtaaagtgctgactggcttgacaaagcgtatcgttgatacgctgactgcatctgctcttaacgaaccgtctgcaatggccgccgcgctggaactgtaa

SEQ ID NO: 2204 - DNA, 735 bp, Artificial Sequence
  Optimized genes for E. coli.
atgaacttcgaaggtaagatcgccctggtaaccggtgccagccgtggtatcggtcgtgctattgccgagacgctggcggcacgcggcgctaaagtgattggcaccgcaacctctgaaaacggtgcacaagctatcagcgactatctgggtgcgaatggtaaaggcttaatgctgaacgtaactgacccagcgtctattgagtccgtgctggaaaaaatccgcgctgaatttggcgaagttgacatcctggttaacaacgctggcatcactcgcgataacctgctgatgcgtatgaaagacgaagagtggaacgatatcatcgaaaccaaccttagttcggtgttccgtttgagcaaagctgtgatgcgcgcaatgatgaagaaacgtcacggtcgcattattaccatcggcagcgtagtcggaaccatgggcaacggcggtcaggcgaactacgctgccgcgaaagcgggtctgattggtttttccaaatccctcgcgcgtgaagtggcatcacgtggcattacagtaaatgttgttgcaccgggcttcatcgagaccgatatgactcgtgcgctgtctgacgatcagcgtgccggtattctggctcaggttccggcagggcgtctgggcggcgcacaggaaatcgctaacgccgttgcgttcctggcatctgatgaagcggcttacatcacgggtgaaactctgcatgtcaatggtggtatgtacatggtttaa

SEQ ID NO: 2205 - DNA, 237 bp, Artificial Sequence
  Optimized genes for E. coli.
atgtccaccatcgaagagcgtgtcaagaaaattattggcgaacaactgggcgtgaaacaggaagaagttaccaacaatgccagctttgttgaagatctgggtgctgactctctggataccgtagaactggtgatggcgctggaagaggagttcgacactgaaatcccggacgaagaagctgaaaaaatcactacggttcaggcagcaattgattacatcaacggtcaccaggcgtaa

SEQ ID NO: 2206 - DNA, 1434 bp, Artificial Sequence
  Optimized genes for E. coli.
atgttcaaaaacgcgtttgccaacctgcaaaaggtcggcaagtctctgatgctgcctgtttccgtattaccaatcgcgggcatcctgctgggggttggcagcgcaaacttctcctggctgccggcagtggtgtcgcatgtgatggctgaagcgggtggctcagtatttgctaacatgccgctgatctttgcgatcggcgttgcattgggctttaccaacaacgacggcgtcagcgcactggctgcagtagtagcctatgggatcatggttaaaaccatggcggtagtggcaccgctggtactgcacctgccagcggaagaaatcgcttctaagcatctggcggatactggcgttctgggtggtatcatttctggcgcaattgctgcttacatgttcaaccgtttctaccgcatcaaattgccagaatatctgggcttcttcgctggcaaacgctttgttcctatcatctcaggacttgcagctatcttcaccggtgttgttttgagctttatttggccgccgatcggttctgcaattcagaccttcagtcagtgggcggcttatcagaacccggttgtcgcttttggtatctacggttttatcgaacgttgcctggttccgtttggcctgcatcacatctggaacgtgccgttccagatgcaaattggtgaatacaccaatgctgctggtcaggttttccatggcgacatcccgcgttatatggcaggcgatccgactgcaggtaagctgagtggcggtttcctgtttaaaatgtacggcctcccagctgcggcaatcgccatctggcacagcgcgaaaccggaaaatcgcgcaaaagtgggcggtattatgatctccgcggcgctgacctccttcctcacgggcattacggagccgattgagttcagcttcatgtttgtggcgcctattctgtacattatccacgcgattttagccggcctggcattcccgatttgcattcttctcggtatgcgtgacggtacttcgttctctcacggtctgattgatttcatcgtgctgtccggtaacagcagcaaactgtggctgttcccgatcgttggtatcggttatgccattgtttactacactattttccgtgttcttattaaagctctggacctgaaaacgccgggtcgtgaagacgcgaccgaagatgctaaagcgacaggtacctctgaaatggcccccgccctggtggcagcgttcggtggtaaagaaaacatcactaacctggatgcctgtatcacccgtctgcgtgtatctgttgccgatgtgtccaaagttgatcaggctgggctgaaaaaactgggcgctgccggcgtagtcgtcgcaggatctggtgttcaggcgatcttcggcaccaaatctgacaatctgaagactgagatggacgagtacatccgcaatcactaa

SEQ ID NO: 2207 - DNA, 1251 bp, Artificial Sequence
  Optimized genes for E. coli.
atggaatctaaagtggtggttcctgctcagggcaagaagatcaccttgcagaacggtaagctgaacgttccggaaaatccaatcattccttatatcgaaggcgacggtatcggcgttgacgtaacgcccgcaatgctgaaggtagtagacgcagcggttgaaaaagcttacaaaggtgaacgtaaaattagctggatggagatctataccggagagaaatctactcaggtttacggtcaggatgtctggctgccggccgaaaccctggacctgattcgtgagtaccgtgtggcaattaagggcccgctgactaccccggtaggtggtgggatccgttcactcaacgtggcgctgcgtcaggaactggatctgtacatctgcctgcgtccggttcgctactatcagggtactccgtctccggtgaaacacccagagctgaccgatatggtgatcttccgtgaaaacagcgaagatatctacgccgggattgagtggaaagcggattccgctgatgccgagaaggtcatcaagtttttacgcgaagaaatgggtgtcaaaaaaatccgcttcccggaacactgtggtattggcatcaaaccgtgctccgaagagggcaccaaacgtctggttcgtgctgctatcgagtatgccattgctaacgatcgcgacagtgtgacgctggtacataaaggcaacatcatgaaattcaccgaaggtgcgttcaaagactggggctaccagctggcgcgtgaagaatttggtggcgaactgatcgacggcggtccgtggctgaaagtaaaaaacccgaacaccggtaaagaaatcgttattaaagatgtgattgccgacgcgttcctgcaacaaattcttcttcggccagctgaatacgacgttatcgcttgtatgaacctgaatggcgattacatctccgacgctctggcagcacaagttggcggcattggtatcgcgcctggtgcaaatatcggtgacgaatgcgcactgtttgaagcgactcacggcacagcaccgaaatatgcaggccaggacaaagtcaatccgggttctattattctgtcggcggaaatgatgctccgccatatgggctggactgaagccgctgacttgattgttaaaggtatggaaggcgcaatcaacgcgaaaaccgttacgtatgatttcgaacgcctgatggatggcgctaaactgctgaaatgcagcgagttcggtgatgcgatcatcgaaaacatgtaa

SEQ ID NO: 2208 - DNA, 414 bp, Artificial Sequence
  Optimized genes for E. coli.
atgtctgaagcgctgaaaatcctgaataacatccgcactctgcgtgctcaggcgcgtgagtgcactcttgagacgctggaagagatgctggaaaaactcgaagtggtggttaacgagcgccgcgaagaagagtcggcagccgccgctgaagttgaagaacgtacccgtaaactgcaacagtaccgtgaaatgttgatcgctgacggtattgatccgaacgaactgctgaacagcctggcagcggtcaagtctggcaccaaggctaaacgcgcacagcgtcctgcgaaatacagctatgttgatgaaaacggcgaaaccaaaacctggaccggtcagggccgtactccggcagtaattaagaaagcgatggacgaacaaggtaaatccttagatgacttcctgatcaaacagtaa

SEQ ID NO: 2209 - DNA, 1632 bp, Artificial Sequence
  Optimized genes for E. coli.
atgaccaacatcaccaaacgctcattggtcgccgccggtgtgctggcagctctgatggcaggtaatgtagcactggcggcagacgttcctgccggggtcaccctcgccgaaaaacagaccctggttcgcaacaacggttccgaagttcagtctctcgacccgcataaaatcgaaggcgtaccggaaagcaatattagccgtgatctgtttgaaggtctgttggtttctgaccttgatggccatccggcaccgggtgttgctgagtcctgggataacaaggacgctaaagtctggaccttccacctgcgtaaagatgcgaaatggtccgacggtactccggtaactgctcaggacttcgtatacagctggcagcgttccgttgatccgaacaccgcgtccccgtatgccagctacctgcagtatggtcacatcgcagggatcgacgaaattctggaaggtaaaaaaccaattaccgacctgggtgtcaaagcaatcgatgatcacactctggaagtcactttatcggaaccggtgccttacttctacaaactcctggttcacccgtctaccagccccgtgccgaaagctgctatcgagaagttcggcgaaaaatggactcaaccaggtaacattgtgactaacggcgcttatacgctgaaagactgggtggttaacgaacgtatcgttctggagcgctctccgacttactggaacaatgccaaaaccgttatcaaccaggttacgtatctgccgatcgcctctgaagtgacggatgtcaaccgttaccgttctggtgaaattgatatgacaaataactctatgccgattgaactgttccagaaactcaagaaagaaatcccggatgaggtacacgttgacccgtacctgtgcacctactactacgaaatcaacaaccaaaagccgccgttcaacgacgtgcgcgtacgtactgcgctgaaactgggcatggatcgcgatatcattgtgaacaaagttaaggcgcagggcaacatgccagcttacggttataccccgccatatactgacggcgcaaaactgactcagcctgagtggtttggttggagccaagagaaacgtaacgaagaagctaagaagctgctggctgaagccggatataccgctgacaagccactgaccattaacctgctgtacaatacatcagatctgcacaagaaacttgcgatcgctgcatccagtctgtggaaaaaaaacatcggcgttaacgttaaactggtgaatcaggaatggaaaacgttcctggatacccgtcatcagggtacattcgacgtagcacgtgctggctggtgtgcggattacaacgagccgaccagttttctgaacaccatgctgagcaactccagcatgaacacggcgcattataaatctcctgcgtttgactcgattatggcggaaaccttgaaagtgaccgatgaagcgcaacgtaccgcactttatacgaaagcggagcagcagctggacaaagactctgcgattgttccggtttactattacgtaaatgcacgcctggtaaaaccgtgggttggcggctacactggcaaagatccgctggacaacacctatactcggaatatgtacatcgtgaaacactaa

SEQ ID NO: 2210 - DNA, 507 bp, Artificial Sequence
  Optimized genes for E. coli.
atgagccagactgttcacttccagggcaacccggtaacggtcgccaacagcatcccgcaggcgggttctaaagcgcaaaccttcaccctggtggcgaaagatttatcagacgttacacttggtcagtttgccggtaaacgtaaagtgctgaatatcttcccgtccattgataccggtgtttgcgcagcaagtgtacgcaaattcaaccagttggcaaccgaaatcgataacaccgttgttctgtgtatctccgctgacctcccatttgcacaaagccgtttctgcggcgctgaaggcctgaacaacgtcattactctgtctacttttcgcaatgccgagttcctgcaggcttatggcgttgctattgctgatggcccgctgaaaggtctggcggcacgtgctgtagtggttatcgacgaaaacgacaacgtgattttctctcagctggttgacgagatcaccactgaacctgattacgaagcggcgctggcagtactgaaggcgtaa

SEQ ID NO: 2211 - DNA, 138 bp, Artificial Sequence
  Optimized genes for E. coli.
atgaaatctaatcgccaggcgcgtcacattctgggtctggatcataaaatctccaaccagcgtaagatcgttactgaaggcgacaaaagctcggtggtaaacaacccgaccggtcgtaaacgcccggctgaaaaataa

SEQ ID NO: 2212 - DNA, 342 bp, Artificial Sequence
  Optimized genes for E. coli.
atgaaaatcactctcagtaagcgtattggtctgttggcgattctgctgccgtgcgcactggcactttctaccaccgttcatgctgaaaccaacaaactggtaatcgaaagcggtgactccgcgcagagccgtcagcacgcggcgatggaaaaagagcagtggaacgatacccgtaacctgcgccagaaagtgaataagcgcactgagaaagaatgggataaagctgacgccgcattcgataaccgtgacaaatgtgaacaatctgccaacatcaacgcttactgggaaccgaataccctgcgttgcctggaccgtcgtactggccgcgttatcacgccataa

SEQ ID NO: 2213 - DNA, 1533 bp, Artificial Sequence
  Optimized genes for E. coli.
atgcgtattggcatcccgcgtgaacgtctgaccaacgaaactcgcgttgccgcaactccgaagactgtagagcagctgttgaagctgggctttaccgttgctgtagaaagtggtgctggccagctcgcctccttcgacgacaaagcattcgtacaggctggcgcagagattgttgaaggtaatagcgtctggcagagcgaaatcattctgaaagttaacgctccgctggatgatgaaattgccttgctgaacccgggcaccaccctggttagctttatctggccggcgcaaaatccagagctgatgcagaaactggcagaacgcaacgtgacggtgatggcaatggattccgttccgcgcatctcccgtgcccagtcactggacgctttgagttccatggccaacatcgcgggctaccgcgcgatcgttgaagcggcgcatgaatttggccgcttcttcaccggtcagatcacggctgcgggtaaagtgccgccagcaaaggtcatggtgatcggtgcaggcgtagcaggtctggctgcaatcggcgccgctaactccttaggggccatcgtgcgtgcttttgacacccgtcctgaggtgaaagaacaggttcagtctatgggtgcggaattcctggaactcgacttcaaagaagaagctggttctggcgacggttatgcgaaagtaatgagcgatgcgttcatcaaagctgaaatggaactgtttgcagcacaagctaaagaagttgatattattgtcacaactgcgctgattcctggcaaaccggcacctaagcttatcactcgcgagatggttgacagcatgaaagccggttccgtaatcgtcgatctggcagctcagaacggtggtaactgcgaatacaccgtgccaggcgaaatcttcactaccgaaaacggcgttaaagtcattgggtataccgacctgccgggtcgtcttccgactcagtcgtcgcaactgtacggtactaacctggtaaatctgctgaaactgctgtgtaaagaaaaagatggcaacatcaccgttgattttgatgacgtagttattcgtggtgtgacagttatccgcgcaggagagatcacctggccagccccgccgattcaggtgtctgcacagccgcaggcggctcaaaaagcggcaccggaagtgaagactgaagagaaatgtacctgcagcccgtggcgtaagtatgccctgatggctcttgctatcatcctgttcggctggatggcgtctgttgcgccgaaagagttcctgggtcacttcaccgtatttgctctggcgtgcgtggttggttactacgttgtgtggaacgtttctcacgcgctgcacacgcccttaatgtcagtaaccaatgcgatttctggtatcatcgttgttggcgcgctactgcaaattggtcagggcggttgggtgagcttcctctcttttattgctgttctgatcgcttctatcaacattttcggtggcttcacggtcacccagcgtatgctgaaaatgttccgtaaaaactaa

SEQ ID NO: 2214 - DNA, 468 bp, Artificial Sequence
  Optimized genes for E. coli.
atgatcaaacgcgtgctggtagtctcgatggttggcctgtctctggtgggttgcgtgaacaacgatacactcagcggcgacgtttatactgcaagtgaagcgaagcaagtacagaacgtcagctacggtactatcgttaacgttcgtccggtacaaattcagggcggcgatgattccaacgtgattggcgctatcggtggcgcggtacttggcggtttcctgggcaatactgttggtggtggtaccggtcgttccctggcaacggctgctggcgcagtcgccggtggagtagccgggcaaggcgtgcagagcgcgatgaacaaaacccagggcgttgagctggaaatccgtaaagacgacggtaataccattatggtggttcagaaacagggtaacacccgcttttcaccaggtcagcgtgttgttctggcttctaacggttctcaggttaccgtttccccgcgttaa

SEQ ID NO: 2215 - DNA, 582 bp, Artificial Sequence
  Optimized genes for E. coli.
atgagcttcgaactgccagcactgccgtatgcgaaagacgcactcgctccgcacatttctgcagaaaccatcgaataccactacggtaagcaccatcaaacttatgtgaccaacctgaacaacctgattaaaggcacagcctttgaaggcaagtctctggaagaaatcatccgttcaagcgaaggtggcgtattcaacaatgcagcacaggtctggaaccataccttctactggaactgcctggcgccgaacgcgggtggtgagccgaccggtaaagtggctgaagctatcgctgccagctttggtagttttgccgatttcaaagcgcagttcaccgatgcggcaatcaaaaacttcggttcgggctggacctggctggtgaaaaactctgacggcaaactggcaattgtttccacttccaacgccgggactcctttgacgacggatgctactccgctgctgaccgttgacgtatgggagcatgcttactacatcgactatcgcaatgcgcgtccgggctaccttgagcacttctgggcgctggttaactgggaatttgttgctaaaaatctggctgcgtaa

SEQ ID NO: 2216 - DNA, 237 bp, Artificial Sequence
  Optimized genes for E. coli.
atgaaagcgactaaactggttctcggcgcggtgatcctgggttccacgctgctggctggttgctcgtctaacgccaaaattgatcagcttagctccgacgttcagaccctgaacgcgaaagttgaccagctgagcaacgatgtcaatgcaatgcgttctgacgtacaagccgctaaagatgacgcagcacgcgctaaccagcgtctggataacatggcgaccaaataccgtaagtaa

SEQ ID NO: 2217 - DNA, 300 bp, Artificial Sequence
  Optimized genes for E. coli.
atggctctgaccaaagctgaaatgagcgaatacctgtttgacaaactgggtctgtctaagcgtgacgcgaaagagcttgttgaactgttctttgaagaaatccgccgcgcgctggaaaacggcgaacaagtcaagctctccggcttcggtaacttcgatctgcgtgataaaaaccagcgtcctggccgtaacccgaaaaccggtgaagatatcccgattactgcacgtcgtgtggttacgttccgtccgggtcagaaactgaaatctcgcgtagagaatgcctcgccaaaagacgagtaa

SEQ ID NO: 2218 - DNA, 2388 bp, Artificial Sequence
  Optimized genes for E. coli.
atgaaattctctgagctgtggctgcgcgagtgggtgaatcctgcgattgactccgacgctctggccaaccaaatcaccatggcaggtctggaagttgacggcgtagagccggtagctggctccttccatggcgtggtggtaggcgaggtcgttgaatgcgctcagcacccgaacgctgataaattacgcgtcaccaaagtgaacgttggtggcgaccgtctgctcgacatcgtttgtggtgcaccaaactgccgccagggcttacgcgtagcagttgccacgattggcgcggtactgccgggtgatttcaaaatcaaagcggcgaagctgcgcggtgaaccgtccgaaggtatgctgtgttcattttctgaactgggtatctctgatgaccatagtggaatcatcgaactccccgcagatgcgccaatcggtactgatatccgtgaatacctgaagcttgacgacaacaccattgaaatttctgtaactccgaaccgcgctgactgcctggggattattggtgttgctcgtgatgtggcagtgctgaaccagctgcccttagtgcagccagaaatcgtacctgtcggcgcaaccatcgacgatactctgccgatcaccgttgaagcgccggaagcatgcccgcgttatctgggccgggttgtgaaaggtatcaacgtaaaagcaccgactcctctgtggatgaaggaaaaactgcgtcgctgcggcattcgttctatcgacgccgttgttgatgttaccaactacgttttgttagagcttggtcagccgatgcacgcgtttgacaaagatcgtattgagggggggatagtcgttcgcatggcgaaagaaggcgaaacgctggttctgctggatggcaccgaagcgaagctgaatgcggatacgctggtgattgccgatcacaacaaagcccttgcaatgggcggcatcttcggcggtgagcactctggtgtaaacgatgaaactcagaatgtgctgttagagtgcgcattcttctccccgctgtctattactggccgtgcgcgccgccacggtctgcatactgacgcatctcaccgttacgaacgtggtgtagatccggcactgcaacataaagctatggaacgtgctacgcgacttctgattgatatctgcggtggtgaagctggtccggttatcgatattactaacgaagcgactctcccaaagcgtgccacaatcactcttcgtcgtagcaaactggaccgcctgatcggtcaccacatcgccgatgagcaagtgaccgacatccttcgccgtctgggctgtgaagtaaccgagggtaaagacgaatggcaggcggttgcaccatcctggcgttttgatatggaaatcgaagaagatctggttgaagaggttgcgcgtgtttatggttacaacaacatcccggacgaacctgtgcaagcgtcactgatcatgggtacacatcgcgaagccgacctgtcgctgaaacgcgttaaaaccctgctgaacgacaagggttatcaggaagttattacctacagctttgttgacccgaaagttcagcagatgatccacccgggcgtagaagcactcttgctgccaagcccgatttccgtagaaatgagcgcgatgcgtctgtccctatggaccggcctgttggccaccgtagtctataatcagaaccgtcagcaaaatcgcgtgcgtatctttgaaagcggtttgcgctttgttccggatacccaggctccgctgggtattcgtcaggacctgatgctggcgggagtaatttgcggtaaccgttatgaagaacactggaatctggcaaaagaaaccgtggacttctacgatctgaaaggcgatctggaatctgttctggacctgaccggtaagctcaatgaagtcgagttccgtgcagaagctaacccggcgctgcaccctggccaaagtgcagctatctacttgaaaggcgaacgcatcggctttgtcggcgtggttcatccggaactggaacgtaaactggatctcaacggtcgtactctggtcttcgaactggagtggaacaagctggctgaccgtgttgtaccgcaggcacgtgagatctcccgtttcccggccaatcgtcgcgacattgctgtagttgtggcggaaaacgtgccggctgctgatatcctgagcgaatgtaaaaaagtcggtgttaaccaggttgttggcgtcaacctgttcgacgtttaccgtggcaaaggtgtggctgaaggctacaaatctctggctatttcgttgattctgcaggataccagccgtaccctggaagaggaagaaatcgctgccacggttgctaaatgtgtggaggcgctgaaagagcgtttccaggccagcctgcgtgactaa

SEQ ID NO: 2219 - DNA, 357 bp, Artificial Sequence
  Optimized genes for E. coli.
atggcacgcgtgaaacgtggcgtgattgctcgcgcccgtcacaaaaaaatcctgaaacaagctaaaggctactacggtgcgcgttctcgcgtttaccgcgtagcattccaggcggttatcaaagctggtcagtatgcctatcgtgaccgtcgtcagcgtaaacgccagttccgtcagctgtggatcgctcgtattaatgctgctgcacgtcaaaacggcatttcctacagcaaattcatcaacggtctgaagaaagcatcggtagaaatcgatcgcaagattctggctgatatcgccgtctttgacaaagttgcgtttaccgcgctggttgaaaaagcgaaggcagcacttgcgtaa

SEQ ID NO: 2220 - DNA, 198 bp, Artificial Sequence
  Optimized genes for E. coli.
atgccgaaaatcaaaaccgtacgtggcgcagctaaacgtttcaagaaaactggtaaaggtggctttaaacataagcacgctaacctgcgtcacatcctgaccaaaaaagcaacgaagcgtaaacgccacctgcgcccaaaagcgatggtttctaaaggcgacctgggtctggtgattgcctgcctgccgtacgcgtaa

SEQ ID NO: 2221 - DNA, 1929 bp, Artificial Sequence
  Optimized genes for E. coli.
atgccggtgatcactctgccagacggtagccagcgtcactacgatcatgccgtttctccgatggatgttgctctggatatcggccctggcctggcgaaagcgtgtatcgccggtcgtgtcaatggcgaattggttgacgcctgtgatctgatcgaaaacgatgctcagctttctatcatcaccgctaaagatgaagaaggtctggaaatcatccgtcattcctgcgcacacctgctgggccacgctatcaagcagctgtggccgcataccaaaatggcgatcggtccggtaatcgataacggcttctactacgacgtagacctggaccgtaccctgacgcaagaagacgttgaagcacttgagaaacgtatgcacgagctggctgaaaaaaactatgatgtcattaaaaagaaagtatcctggcacgaagcgcgtgaaacctttgctaaccgtggtgagagttataaagtgtcgattcttgacgaaaacatcgctcacgacgacaaaccaggactttacttccatgaagagtatgttgatatgtgtcggggtccgcacgttccgaacatgcgcttttgccaccacttcaaactgatgaaaacggcaggcgcttactggcgtggcgacagcaataacaaaatgttgcagcgtatctacggtactgcatgggcggataagaaggcgctgaacgcctatctgcagcgcctggaagaagccgcgaagcgcgatcaccgtaaaatcggtaaacaattggatctgtaccatatgcaagaggaagcaccaggtatggtgttctggcataatgatggctggaccatcttccgtgaactcgaagtctttgttcgttcaaagctgaaagaataccagtatcaggaagtgaaaggcccattcatgatggaccgcgtgctgtgggaaaaaaccggtcactgggacaactacaaagacgcgatgttcaccaccagcagcgaaaatcgcgaatactgcatcaaaccgatgaactgcccgggtcatgtacagattttcaaccagggtctgaagtcataccgtgacctgcctttacgcatggcagaatttggcagttgtcatcgtaacgaaccgtccggttccctgcacggcttaatgcgtgttcgcggctttacccaggacgatgcgcacatcttctgtaccgaggagcagatccgtgatgaagttaatggttgcattagactcgtttatgacatgtactccaccttcggttttgaaaagattgtcgtaaaactgagcacacgccccgagaagcgtattggctctgacgaaatgtgggatcgtgcggaagctgatctagctgtagcactggaagagaacaacattccgttcgaatatcaactgggtgaaggcgcattctatggcccgaaaattgagtttactctctatgactgcctggatcgcgcctggcagtgcggtacggtgcaactcgacttctctctgccgtctcgtctgtccgcttcttacgtcggcgaagataacgagcgcaaagtccctgtgatgatccaccgtgctattctggggtctatggaacgtttcatcggcatcctgaccgaagaatttgcaggtttcttcccgacctggctggcaccggttcaggttgtgattatgaacattactgactcccagtcggagtacgttaacgaactgactcagaaactgtctaacgcgggtatccgcgttaaagcagacctgcgcaatgaaaaaatcggatttaaaattcgcgagcacactctgcgtcgtgtaccgtacatgctggtttgcggcgataaagaggtggaaagcggcaaagttgcggtacgtactcgtcgcggtaaagacttagggagcatggatgtgaacgaagttattgaaaaactgcaacaggaaattcgttctcgcagcctgaaacagctggaagagtaa

SEQ ID NO: 2222 - DNA, 1344 bp, Artificial Sequence
  Optimized genes for E. coli.
atggatcagacctatagcttagaaagcttcctgaaccacgtacagaaacgcgatccgaaccaaacggaattcgctcaagcggtacgcgaggtgatgactactctgtggccgttcctggaacagaatcctaaataccgtcagatgtccctgctggagcgtctggttgaaccagaacgcgtaattcagttccgcgttgtctgggtagacgaccgtaaccagatccaggttaaccgtgcctggcgtgttcagtttagctctgcaattggtccgtacaaaggtggtatgcgtttccacccaagtgtgaacctgagcattctgaaattcctcgggtttgaacaaaccttcaaaaatgcgctgacaacgcttccgatgggtggcggtaaaggcggtagcgattttgacccgaaaggtaaatctgaaggtgaagttatgcgcttctgtcaggcactgatgaccgaactgtatcgtcacctgggtgcggataccgacgtccctgctggtgacatcggtgttggtggccgcgaagtgggcttcatggctggcatgatgaaaaaactgtctaacaacaccgcctgtgtgttcactggcaaggggctctccttcggtggttctctgatccgtccggaagccacgggttacggtctggtctattttactgaagcaatgttgaagcgtcatggtatgggcttcgaagggatgcgtgtatccgtatcgggaagtggtaacgttgcacagtacgcgattgagaaggcgatggaatttggcgcgcgtgtgatcactgcttctgactcctcaggcaccgttgttgatgaatctggtttcaccaaagaaaagcttgcccgcttaattgaaatcaaagcttcccgtgacggtcgtgtagccgattacgctaaagagttcggcttggtttatctggagggtcagcaaccgtggtcacttcccgtcgatatcgctctgccgtgcgcaactcagaacgaactggacgttgacgcggcacatcagctgattgcgaacggcgtgaaagcggtggctgaaggcgcaaacatgccgaccaccatcgaagcgaccgagctgttccagcaggcgggcgtactgtttgctccgggtaaggcagcgaatgcaggcggagtcgcaaccagcggcctggaaatggcgcaaaatgctgcacgtctgggctggaaagcagagaaagtggatgcgcgcctgcaccacatcatgctggatattcatcatgcctgcgtggaacacggcggcgaaggcgagcagactaactacgttcaaggtgctaacatcgccggctttgttaaagttgctgacgctatgctggctcagggcgttatctaa

SEQ ID NO: 2223 - DNA, 996 bp, Artificial Sequence
  Optimized genes for E. coli.
atgaccattaaagttggtattaatggcttcggtcgtatcggtcgcattgtctttcgcgcagcgcagaagcgttccgatatcgaaatcgtagcgatcaacgatctgctggacgccgattacatggcttatatgctgaaatacgacagcacacatggccgtttcgacggtactgttgaagtgaaagacggccacctgatcgttaacggtaaaaaaatccgtgtcactgcagagcgcgatccggctaacctgaaatgggatgaggtaggagttgacgttgttgctgaggcaaccggcctgttcctgactgacgaaaccgcgcgtaaacacattacggccggcgcgaagaaagtggtaatgacagggccttctaaagataacaccccgatgttcgttaaaggcgctaattttgacaaatatgccggtcaggacatcgtcagtaatgcttcctgcaccaccaactgcctggctccgctggcaaaggtgattaacgacaactttggcattattgagggtctgatgacgacggttcacgcgaccactgccacccagaaaaccgtggatggtccgtctcataaagactggcgtggtggccgcggcgcatcacaaaacatcatcccatccagcacgggggctgccaaggctgttggcaaagttctgccggaactgaacggtaaactgaccggtatggcgttccgtgtaccaactccgaacgtttctgtggttgatttaaccgttcgtctggaaaaagcggcgacttacgaacagatcaaagcagcagtgaaagctgcagctgaaggtgaaatgaaaggtgtgttgggctacaccgaagatgatgtggtgtcgaccgacttcaacggcgaagtctgtacttctgtatttgatgcgaaagccggtatcgcgctgaatgacaacttcgtaaagctcgtatcctggtacgataacgaaactggctatagcaacaaagtccttgacctgattgcacacatcagcaagtaa

SEQ ID NO: 2224 - DNA, 801 bp, Artificial Sequence
  Optimized genes for E. coli.
atggaaatcactacgctgcaaatcgtacttgtgtttattgttgcgtgtatcgccggtatgggctcaattctggacgaattccagttccaccgtccgctgattgcctgcactctggttggcattgtccttggcgatatgaaaaccggtatcatcattggtggtaccctggaaatgatcgctctgggctggatgaacatcggcgcagcagtcgctccggatgcggcgttagctagtatcatctctaccatcctggtcattgcgggtcaccagtctatcggtgctggaattgcattggcaatcccgctggcggccgcaggtcaggttctgaccattatcgttcgtactatcaccgttgcctttcagcacgcggctgacaaggcggcagacaacggcaacctcacagccatttcctggatccatgtatcgagcctgttcctgcaggcgatgcgtgttgctatcccagctgttatcgtcgcgctgtctgtaggtacttccgaggttcagaatatgctgaacgcgattccggaagttgttaccaatggtctgaatatcgcaggcggcatgattgtggtggttggttatgcaatggtgatcaacatgatgcgcgccgggtatctgatgccgttcttctacctgggttttgttacggctgcattcaccaacttcaacctggtagccttgggcgtgattggcaccgtgatggcggtgctgtacatccagctgagcccgaaatacaaccgcgtagctggcgcgcctgcacaagctgctggtaacaacgacctcgataacgaactggattaa

SEQ ID NO: 2225 - DNA, 210 bp, Artificial Sequence
  Optimized genes for E. coli.
atggcgaaaattaaaggccaggttaaatggttcaacgaaagcaagggctttggcttcatcaccccggctgatggttccaaagacgtgttcgttcacttctctgccattcagggcaacggtttcaaaaccctggctgaaggtcagaacgttgagtttgaaatccaggacggtcaaaaaggtccggcagcggtaaatgtcactgcaatctaa

SEQ ID NO: 2226 - DNA, 144 bp, Artificial Sequence
  Optimized genes for E. coli.
atgtgtggtatcttcagcaaagaagtgctgagcaagcacgttgacgttgaataccgcttttctgctgagccgtatattggcgcatcctgctccaacgtctcggtactgtctatgctgtgcctgcgtgcgaaaaaaaccatctaa

SEQ ID NO: 2227 - DNA, 801 bp, Artificial Sequence
  Optimized genes for E. coli.
atgaaattggcacatctgggtcgccaggcgctgatgggcgtaatggcagtcgccctggtggctggcatgtcggtgaaatcctttgctgacgaaggcctgctgaacaaagtcaaagaacgtggtacgctgctggtcggtctggaagggacttatccgccgttctctttccagggtgacgacggtaaactgaccggttttgaagttgaatttgcgcagcagctggctaaacacctgggcgttgaggccagcctgaaaccaaccaaatgggatggtatgctggcttctctggattccaaacgcattgatgtggttatcaaccaggttaccatttctgacgagcgtaaaaagaaatatgacttctccactccttacaccatcagtggtatccaggcactggttaagaagggcaatgaaggtactatcaaaacggctgatgacctgaaaggcaagaaagttggtgtgggccttggaacaaactacgaagagtggctgcgtcaaaacgttcagggcgtggatgttcgtacctacgacgatgatccgactaaataccaggacttacgcgtaggccgtatcgacgcgattctggttgaccgtctggcagcattggatctggtaaaaaaaaccaacgataccctcgcggtgactggcgaagcgttcagccgtcaggaaagcggtgttgcgctgcgcaaaggtaacgaagatctccttaaggcggtaaatgacgccatcgctgaaatgcaaaaagatggcaccctgcaagctctgtctgagaaatggttcggtgcagacgtaaccaagtaa

SEQ ID NO: 2228 - DNA, 330 bp, Artificial Sequence
  Optimized genes for E. coli.
atggaaaccactaaaccatccttccaggatgtgctggaatttgttcgtctgttccgtcgtaaaaacaaactgcaacgtgaaatccaggacgtagagaaaaaaattcgtgataaccagaaacgcgtcttgctccttgacaacctgtctgactacatcaaaccgggtatgagcgttgaagccattcagggtatcatcgcttctatgaaaggcgattacgaagatcgcgttgacgactatatcattaaaaatgctgaactgagcaaagagcgtcgcgatatctccaagaagctgaaagcaatgggtgaaatgaagaacggcgaagcgaaataa

SEQ ID NO: 2229 - DNA, 1407 bp, Artificial Sequence
  Optimized genes for E. coli.
atgtccaagcagcagatcggcgttgttggtatggcggtgatgggtcgtaacctggctctgaacatcgaatcccgtggttacaccgtttccatctttaaccgctcgcgcgaaaaaactgaggaagttatcgctgaaaacccgggcaaaaaactggtaccttattatacggttaaagagttcgttgaatctctggaaactccgcgtcgcattttgctgatggtaaaagcgggtgctggtactgatgctgcaatagacagtttaaaaccgtacctcgacaagggcgacattatcattgatggcggcaacaccttcttccaggataccatccgtcgcaaccgtgaactgagcgcagaaggtttcaacttcatcggcaccggggtatcaggtggcgaagaaggcgcactgaagggtccgtctatcatgccgggtggtcagaaggaagcctacgaactcgtggcgccaatcctgaccaaaatcgcagccgtcgccgaagatggtgaaccgtgcgtgacttacatcggtgcagacggcgctggccattatgtgaaaatggttcacaacggtattgaatacggtgatatgcagctgatcgcggaagcttattctttacttaaaggcggtctgaatctcaccaacgaagagctggcacaaacctttacagagtggaacaacggcgagctgtcttcatatttgatcgatatcactaaagatattttcaccaagaaagacgaagacggtaactacctggttgatgtcattctggatgaagcggcaaacaaaggcacgggtaaatggaccagccagagcgcgctggacctgggtgagccgctgagtcttattactgaaagcgtctttgctcgttacatttcctcgttgaaagaccagcgcgtggccgcaagcaaagtgctttccggcccgcaggcccaacctgcgggcgataaagctgaatttatcgagaaagttcgtcgtgctctgtacctggggaaaattgtttcttacgcacagggcttttcccaactgcgcgcagcttctgaagagtacaactgggatctgaattacggcgaaatcgccaagatcttccgtgcaggctgtatcatccgcgctcagttcctgcagaaaatcaccgatgcgtatgccgagaatccacaaattgcgaacctgctgctggcgccgtattttaaacagattgctgacgactaccagcaagcactgcgtgacgtcgtggcctatgctgttcagaatggtatcccggtaccaactttctctgcagcggttgcttactacgacagctatcgtgcggcggtactgccggcaaatctgattcaggcgcagcgtgattacttcggtgcgcacacctacaaacgtattgacaaagaaggagtattccacacggaatggctggactaa

SEQ ID NO: 2230 - DNA, 285 bp, Artificial Sequence
  Optimized genes for E. coli.
atgaaacgcaagatcatcgtcgcctgtggcggcgcagtggctacttctaccatggcagctgaagagatcaaagagctgtgccagaatcacaacatcccagtagaactgattcagtgccgtgttaacgaaatcgaaacctacatggatggcgtgcatcttatttgtactacggcgaaagttgaccgtagctttggcgacattccgctggttcacggtatgccgttcatctccggtatcggtattgaagcgctgcagaacaaaattctgaccatcctgcaaggttaa

SEQ ID NO: 2231 - DNA, 453 bp, Artificial Sequence
  Optimized genes for E. coli.
atgaccaacctgttcgtacgcagcggtatcagctttgtagaccgttctgaagttctgactcacatcggtaacgaaatgttggcaaaaggcgtggtacatgacacctggccgcaggcgctgattgcgcgtgaagcagagttcccgactggcattatgctggagcagcacgcgatcgctatcccgcactgtgaagcgattcatgctaagtcgtccgcaatttatctgctgcgcccaacgaataaagttcacttccagcaggccgatgacgataacgacgttgctgtgtctctggttatcgccttaattgtcgaaaacccgcaacagcaactcaagcttctgcgttgcctgtttggtaaactgcagcagcctgatatcgttgaaactctgatcaccctgccggaaacccagctgaaagaatacttcaccaaatacgtgctggattccgacgagtaa

SEQ ID NO: 2232 - DNA, 1263 bp, Artificial Sequence
  Optimized genes for E. coli.
atgaaaaccctgatcgcgcgtcacaaggcaggcgaacacattggtatctgcagcgtctgttcagcacacccgctggtaatcgaagcagctctggcatttgaccgtaactccactcgtaaagtgctgattgaagccacgtcgaatcaggttaaccagttcggtggttacaccggtatgacgccagctgacttccgtgaattcgtgttcaccattgctgataaggtgggatttgctcgcgagcgcattattctgggcggcgaccatctgggtccgaactgctggcagcaggagaatgccgatgcagcgatggaaaaatctgttgagctggtgaaagaatacgtccgagctggcttctctaagattcatcttgacgccagcatgtcctgcgcaggtgatccgatcccgctggcgccagaaactgttgctgagcgtgcggcggtactgtgtttcgccgctgaatccgttgcgaccgactgccagcgtgaacagctgtcttacgttatcggtaccgaagttccggtaccaggcggtgaggcttctgcgattcagagcgttcacatcactcacgttgaagacgcagctaacactctgcgtacccatcagaaagcgttcatcgcccgtggtctgactgaagcgctgacgcgcgtgatcgctattgtcgtgcaacctggcgtagagttcgatcatagcaacatcatccactatcagccgcaggaagcgcaacccttggcacagtggatcgaaaatacccgtatggtttacgaagctcactctaccgattaccagacccgcacagcttactgggaactggttcgcgatcacttcgcaatcctgaaagtcggcccggcactgacctttgccctacgcgaagctatcttcgcgttagcgcagatcgagcaagagttgattgcaccggaaaaccgttctggttgcctggctgtaattgaagaagtgatgctggatgaaccgcaatattggaaaaaatactatcgtactggctttaacgattccctgctggacatccgctattcactctctgaccgcatccgttactactggccgcacagccgtattaaaaacagcgtagaaaccatgatggtgaacctggaaggcgttgatatccctctcgggatgatctcccagtacctgccgaaacagtttgaacgtatccagtcgggtgaactgagtgccattccgcatcaactgatcatggacaaaatctatgacgttcttcgcgcataccgttatggctgtgcggagtaa

SEQ ID NO: 2233 - DNA, 855 bp, Artificial Sequence
  Optimized genes for E. coli.
atgtacgttgtttctactaagcagatgctgaacaacgcgcaacgtggtggttatgccgttccggcatttaacattcacaacctggaaaccatgcaagtcgtagttgaaacggcagctaacctgcacgctccggttatcatcgctggcacacctggcaccttcactcacgcgggtacggaaaacctgctggcactggtatccgcaatggctaaacagtaccatcatccgctggctatccatctggatcaccacaccaagttcgatgacatcgcccagaaagtgcgcagcggagttcgttccgtaatgatcgacgcgtctcacctgccgttcgcccaaaacatctcccgcgtgaaagaagtggttgatttttgccaccgtttcgacgtctctgtagaggccgagctgggtcagctggggggccaggaagacgacgttcaggttaacgaagccgatgcgctgtacaccaacccggctcaggcgcgtgaatttgctgaagcgaccggtatcgattcacttgcggttgctattggtactgcacacggcatgtatgcttcggccccagcactcgacttcagtcgcctcgagaatattcgtcagtgggtgaatcttccattagtgctgcatggcgcgagcggtctgtctaccaaagatattcagcagaccatcaaactgggcatttgtaaaatcaacgtggcaactgaactgaaaaatgcattctctcaggcattgaaaaactacctgactgagcacccggaagctaccgatccgcgtgattatctgcaaagcgcgaagtccgcgatgcgtgacgtagtcagcaaagttattgctgactgcggttgtgaaggccgcgcgtaa

SEQ ID NO: 2234 - DNA, 567 bp, Artificial Sequence
  Optimized genes for E. coli.
atggttaaatctcaaccgattctgcgttacatcttgcgcggcattccagcgatcgctgtcgccgtgctgctgagcgcatgttctgcaaacaacaccgcgaaaaacatgcacccggaaacccgtgcggtgggttctgaaacttccagtcttcaagcgtctcaggatgaatttgaaaacctggttcgtaacgttgacgtgaaatcccgtattatggatcagtatgccgactggaaaggcgtacgctaccgtctgggtggttccaccaaaaagggcatcgactgctccggttttgttcagcgtaccttccgcgagcagttcggtctggaactgccgcgttccacttacgaacagcaggaaatgggcaagtctgtcagccgcagcaatctgcgcacgggggatctggtactgttccgtgctggcagcactggccgtcatgtaggtatctatatcggtaataaccagttcgttcacgcttctacaagttcgggcgttatcatttcatcgatgaacgagccttactggaaaaaacgctataacgaagcacgtcgtgtgctcagccgttcttaa

SEQ ID NO: 2235 - DNA, 285 bp, Artificial Sequence
  Optimized genes for E. coli.
atgttcaccatcaatgctgaagttcgtaaagagcagggcaaaggcgcttctcgccgcctgcgtgctgccaacaaattcccggcaattatttatggtggtaaggaagcgccgctggcaatcgaactggatcacgacaaagtgatgaacatgcaagccaaggcagagttctacagcgaagtgctgactattgtcgttgacggtaaagaaatcaaagttaaagcgcaggacgttcagcgtcatccatacaaaccgaaactgcagcacatcgattttgtacgtgcgtaa

SEQ ID NO: 2236 - DNA, 1104 bp, Artificial Sequence
  Optimized genes for E. coli.
atgaaagttaaggtcctttctttgctggttccggcgctgctggtagccggtgctgcaaacgccgctgaagtttataacaaggacggtaacaaactggatctgtacggtaaagtggacgggctgcactacttctccgacaataaagacgttgatggcgatcaaacctacatgcgtctgggcttcaaaggcgaaacccaggttactgatcagctgaccggttacggtcagtgggaataccagatccagggtaacagcgcagagaacgaaaataactcctggactcgcgtagcgtttgcaggccttaaattccaggacgtgggctcttttgattatggccgcaactacggcgtggtttacgatgtgaccagctggaccgatgtgctgccggagttcggcggtgacacctatggttctgacaacttcatgcagcagcgtggcaacggttttgccacataccgtaacacggatttcttcggtctggtcgatggtctgaacttcgctgtacaataccagggcaaaaatggaaatccatcaggtgaaggcttcacctctggcgtaaccaacaatggacgcgatgcattacgtcagaatggcgacggcgtgggtggcagcattacgtacgactacgaaggttttggtatcggtggtgcgattagttcctcgaagcgcactgacgcacagaacaccgctgcctacatcggcaatggtgatcgtgctgagacatacaccggcggcctgaaatatgacgccaacaacatttatctggcagctcagtatactcagacttacaacgcgacccgtgttggttccctcggctgggcgaacaaagcgcaaaactttgaagcggttgcgcaatatcagtttgactttggcctgcgtccgtctctggcttacctgcaaagcaaaggtaagaacctgggtcgcggttatgatgatgaagatatcctgaaatacgttgacgtcggtgcaacgtactatttcaacaaaaacatgagcacttatgtagattacaaaattaatttgctggacgataaccagttcactcgtgacgcgggcatcaacaccgacaacatcgttgctctcgggctggtgtatcagttctaa

SEQ ID NO: 2237 - DNA, 501 bp, Artificial Sequence
  Optimized genes for E. coli.
atgcatgaaaaccagcaaccgcaaacggaagcgtttgaactgtccgcagctgagcgcgaagctatcgaacacgaaatgcaccactacgaagatccgcgtgctgcttctattgaagcactgaaaatcgttcagaaacagcgtggctgggttccggatggcgcaattcacgcgattgccgatgtattgggtatcccggcatctgacgttgaaggcgtggcgaccttctacagccagatcttccgtcagcctgtagggcgccacgttatccgctactgcgacagcgtggtctgtcacatcaacggctatcagggcattcaggcggcgctggaaaaaaaactgaacatcaagccaggtcagaccacttttgacggtcgtttcaccctgctgccgacctgctgcctgggtaattgtgataaaggtccgaacatgatgatcgacgaagacacacatgctcatctgactccggaagccattccagagctccttgagcgttataagtaa

SEQ ID NO: 2238 - DNA, 1203 bp, Artificial Sequence
  Optimized genes for E. coli.
atgagcagcaaactggtactcgtgctgaactgcggttcttcctcactgaaattcgctattattgatgctgtaaatggtgaggaatacctgtccggtcttgctgaatgtttccatctgcctgaagctcgtattaaatggaaaatggatggtaacaaacaggaagccgcgctcggcgctggcgcagctcactctgaagcacttaacttcatcgttaacaccatcctggcacagaaaccggaattaagtgctcagctgactgctatcggtcaccgcattgttcacggcggcgaaaaatataccagcagtgtcgtcatcgacgaatccgtaattcagggcatcaaagacgccgcatcatttgccccactgcacaacccggcacacctgatcgggatcgaagaggcgctgaaatccttcccgcaactaaaggacaaaaacgtcgcagtatttgacaccgcattccatcagaccatgccggaggagagctatctgtatgccctgccgtacaacctttacaaagaacacggtatccgtcgttacggtgcccatggcacttcccacttctacgtgactcaagaggcggcgaagatgctgaataagccggtagaagagctgaacatcatcacctgccatttaggcaacggcggttccgtttcggcgattcgcaatggcaaatgtgtggatacctctatgggcctcactccgctggaaggtctggtgatgggtactcgttctggcgatatcgatccagcgatcattttccacttgcatgacacgctggggatgtctgttgacgcaatcaacaagctgctgaccaaagagtctggtttgctgggcctgaccgaagtgacgtctgactgccgttatgttgaagacaactatgcgaccaaggaagatgcgaaacgtgcgatggatgtttactgccaccgtctggctaaatacatcggagcttacactgcactgatggacggccgcctggacgctgttgtcttcaccggtggtattggtgaaaacgccgcaatggttcgtgaactgagcctgggtaaactgggcgttctgggttttgaagttgatcacgaacgtaacctggcggcacgcttcggtaaatcgggctttattaataaagaaggcacacgccctgctgtggtgattccgaccaacgaagaactggttatcgcgcaggatgccagccgtctgacggcgtaa

SEQ ID NO: 2239 - DNA, 1221 bp, Artificial Sequence
  Optimized genes for E. coli.
atgaagcgtgctgtaatcaccggtctcggcatcgtttcttctattggcaataaccagcaggaagttctggcttcgctgcgtgaaggtcgttctggtattaccttctctcaagagttgaaagatagcggcatgcgttcccatgtctggggcaacgttaagctggacaccactggcttgattgaccgcaaagtggtacgcttcatgagcgatgcttcaatctacgcattcctgagcatggaacaggcgattgctgacgctggcctcagccctgaagcgtatcagaacaacccgcgggtgggtctgatcgccggttctggcggagggtcgccgcgtttccaggtttttggtgccgatgcaatgcgcggtccgcgcggcctgaaggcggtaggaccatatgtcgtgaccaaagcgatggcgtcaggcgtatccgcgtgcctggcgaccccgttcaaaatccatggcgtcaactacagcatctccagtgcctgcgcaacgtcggcgcattgtatcggtaacgccgttgagcaaattcagctgggtaaacaggatatcgtgtttgcaggcggcggcgaagaattatgctgggaaatggcatgtgaatttgacgcgatgggtgcgctttccactaaatacaacgacactccggaaaaagcaagccgtacctatgatgcgcaccgtgacggcttcgttatcgcaggtggcggtggtatggttgtggttgaagagctggaacacgcgctggcacgtggtgctcacatctatgctgaaatcgtcggctacggcgcaaccagcgacggtgcagacatggtggcgccgtccggtgaaggcgctgttcgttgcatgaaaatggctatgcacggcgttgatacgccgattgattacctgaattctcatggtacgagtacacctgttggtgatgtgaaagagcttgctgctatccgcgaagtatttggcgacaaatctccggcaatttctgcaacaaaggcaatgactggtcacagcctgggggccgcgggtgttcaggaagccatttactctctgctgatgctggagcacggtttcatcgctccatctatcaacatcgaagaactggatgaacaagccgctggtctgaacattgttactgaaaccaccgatcgcgagctgaccactgtgatgtccaattccttcggttttgggggcaccaacgctactctggtaatgcgtaaactgaaagactaa

SEQ ID NO: 2240 - DNA, 972 bp, Artificial Sequence
  Optimized genes for E. coli.
atgagcaaaatttttgaagacaacagcctgaccatcggtcacactccgctggtacgcctgaaccgcattggcaacggtcgcatcctggcgaaagttgaaagccgtaacccgtccttctctgtaaaatgccgtatcggtgcgaacatgatctgggatgcggagaagcgtggtgtgctgaagccgggggtagaactggttgaaccgacttccggtaacaccggtatcgcgctggcttacgttgcagccgcccgcggctacaaattaacacttacgatgccggaaaccatgtctatcgaacgccgtaaactgctgaaagcactgggcgcgaatctcgttctgaccgaaggtgctaagggcatgaaaggcgcaattcagaaagcggaagaaattgtcgcttctaacccggaaaaatatctgcttctgcaacagttcagcaatcccgccaatccagaaatccatgaaaagactacgggacctgaaatctgggaagataccgacggtcaggttgacgtcttcatcgctggcgtgggtactggcggcaccctgactggcgtatcccgttatatcaaagggaccaaaggtaaaaccgacctgatttctgttgctgttgagccgaccgatagcccggttatcgcacaggcactggcaggcgaagagattaaaccaggtccgcacaaaatccagggcattggtgcaggttttatcccggctaacctggacttgaagctggtggacaaagtgatcggcattaccaacgaagaggcaatctccaccgcgcgtcgtctgatggaagaagaaggcatcttggccggtattagttctggcgctgctgtggcagcggcgctgaaactgcaggaagatgagtctttcactaacaaaaacatcgttgtcattctgccttcctcaggtgaacgttacctgtcgactgctctgttcgccgatctgtttacggagaaagagctccagcaataa

SEQ ID NO: 2241 - DNA, 258 bp, Artificial Sequence
  Optimized genes for E. coli.
atgttccagcaggaagtgaccatcaccgctccgaacggcctgcacacccgtccggcagcgcagttcgttaaagaagcgaaaggttttacaagcgaaatcactgtaacttccaacggtaaatctgccagcgctaaatccctgttcaaactgcaaacgctgggtctgacccagggcaccgttgtcactatttctgcagaaggcgaagatgagcagaaagcggttgaacatctcgtgaagctgatggctgaacttgagtaa

SEQ ID NO: 2242 - DNA, 1728 bp, Artificial Sequence
  Optimized genes for E. coli.
atgatcagtggtatcctggcaagcccgggtattgccttcggtaaggctttgctgttgaaagaagatgaaatcgtgatcgatcgcaagaagatctccgccgatcaggtcgatcaggaagtagaacgtttcctgtctggccgcgcaaaagcgtccgctcagctggagaccattaaaaccaaagctggtgaaaccttcggcgaagagaaggaagcgatctttgaaggtcacatcatgctgctggaagatgaagaacttgaacaagagatcatcgcactgatcaaagataaacatatgactgcagacgccgcagcgcacgaagtgattgagggtcaggccagcgcgctggaagagcttgatgacgaatacctgaaagagcgtgccgctgacgtacgcgatatcggtaaacgtctgctgcgaaatattctgggtctgaagattattgatctgagcgccattcaggacgaagttattctggttgctgctgatctgaccccaagcgaaacggcacaactgaacctgaaaaaagtgctgggctttatcactgatgcaggcggtcgtacgtcgcacaccagtattatggcacgttctctggaactgccagctatcgttggtactggctccgtaaccagccaggttaaaaacgatgattacctgattctggacgcggttaacaaccaggtttatgtcaatccgaccaacgaagtcatcgacaaaatgcgtgctgttcaggagcaggtagcttctgaaaaagccgaactagccaaactgaaagacctgcctgcaatcaccctggatggccatcaggtggaagtttgcgctaacatcggtacagtacgtgacgttgaaggggcagaacgcaacggtgcggaaggcgtgggcctgtaccgtactgaattcctgttcatggaccgcgatgcgctgccgactgaggaagaacagttcgctgcctataaagcagtggctgaagcctgcggttctcaggcggtaattgtccgtaccatggacatcggcggcgataaggaactgccgtacatgaactttccgaaagaagaaaacccgtttttaggctggcgtgcgatccgtattgcgatggatcgtcgtgaaatcctgcgcgaccagcttcgggctatcctccgcgcgtcagcatttggcaagctgcgcatcatgttcccgatgattatcagcgtcgaagaagtgcgcgctctgcgtaaagagattgaaatttacaaacaggaactgcgtgatgaaggcaaagcgtttgacgaatctatcgaaatcggagtgatggttgaaactccggcagcagcaaccatcgcgcgtcacctggcgaaagaagttgacttcttctccatagggacgaatgacctgactcagtacacccttgcggtggaccgtggtaacgacatgatctctcatctgtatcagccgatgtctccctccgttctgaatctgatcaaacaagttatcgacgcatctcacgctgaaggtaaatggaccggtatgtgtggcgagctggctggcgacgagcgcgcaacgctgttactcctcggcatgggtctcgacgagttcagcatgtccgcgatttcgattccgcgtatcaagaaaatcattcgtaacaccaacttcgaagacgctaaagttttggctgagcaagcgttggcgcaacctacaaccgatgagctgatgactctggtaaacaaattcatcgaagagaaaactatttgttaa

SEQ ID NO: 2243 - DNA, 510 bp, Artificial Sequence
  Optimized genes for E. coli.
atgggtctgttcgacaaattgaaatccctggtttctgacgataagaaagacaccggcactatcgaaatcatcgcgccactttcaggtgaaattgtcaatattgaagatgtaccggatgtggtgttcgcagaaaaaatcgttggcgacggcattgctatcaagccgaccggtaacaaaatggttgcccctgtcgatggcaccatcggtaaaatttttgaaaccaaccatgcattctctatcgaaagcgacagcggcgttgaactgtttgttcacttcggtatcgacactgtagagctgaaaggcgaaggcttcaaacgtatcgctgaagaaggtcagcgtgtgaaagtgggtgataccgtgattgagtttgacctgccgctgctggaagagaaagcgaaatcgacactcacgccggttgttatctccaacatggatgagatcaaagaactgatcaaactgagcggttctgtaaccgttggggaaactccggtaattcgcattaagaagtaa

SEQ ID NO: 2244 - DNA, 879 bp, Artificial Sequence
  Optimized genes for E. coli.
atgttcaccggttctatcgttgctatcgtgaccccgatggatgaaaaaggcaatgtctgccgtgcttctctcaagaagctgatcgattaccacgttgccagcggcaccagcgccattgtcagcgtcggaactaccggcgaatctgcaacgctgaaccatgacgaacacgctgatgtggtgatgatgactctggatctggctgacggtcgcattccggtaattgccggtacgggggccaatgcaacagccgaggcgattagtttaacccagcgtttcaacgactccggcattgttggttgcctgaccgtaactccgtattacaaccgtcctagccaggaaggcctgtatcagcacttcaaagcaattgctgagcacactgacctgccacaaattctgtacaatgttccgtcccgtactggctgtgatcttttgcctgaaacggtgggtcgtctcgcaaaagtgaaaaacatcatcggtatcaaggaagcgactggtaacctgactcgtgttaaccagatcaaagaactggtatctgacgatttcgttctgctttctggcgacgacgcttcagcgctggacttcatgcagctgggcggtcacggcgtaatctccgtaaccgctaacgtggcggcgcgcgatatggcgcagatgtgcaaactggcggctgaaggtcattttgcagaagctcgcgttatcaaccaacgcctgatgccgctgcacaacaaactgtttgttgaaccgaacccgatcccggttaaatgggcgtgtaaagagctgggtctggttgcgaccgataccctgcgcctgccgatgacaccaatcaccgactcgggccgtgaaaccgttcgtgcagcactgaaacatgcaggtttgctgtaa

SEQ ID NO: 2245 - DNA, 324 bp, Artificial Sequence
  Optimized genes for E. coli.
atgagcattacgctgtctgactccgctgcagcccgcgtaaataccttcctcgcgaaccgtggcaaaggcttcggtctgcgtctgggcgttcgtacctcaggctgctccggtatggcttacgtgctggaatttgttgatgagccaactccggaagatatcgtctttgaagacaaaggtgtaaaggtggttgttgacggtaaatctctgcagttcctggatggcactcagcttgacttcgtaaaagagggcctgaacgaaggtttcaaattcaccaacccgaacgtgaaagatgaatgtgggtgcggtgaaagctttcacgtttaa

SEQ ID NO: 2246 - DNA, 651 bp, Artificial Sequence
  Optimized genes for E. coli.
atgcaaaaagagcagctctctgcgctgatggatggcgaaacgctggattcagagctgctgaatgaactggcgcacaacccggaaatgcagaaaacctgggaaagctaccatctgatccgtgactccatgcgtggtgacactcctgaagttcttcacttcgatatctccagccgcgtgatggctgctatcgaagaagagccggttcgtcagccggcaacgctgattccggaagcgcagccagcaccgcatcagtggcagaaaatgccgttctggcaaaaggtacgtccgtgggcggcacaactgacccagatgggtgttgctgcctgcgtttctctggctgtcatcgttggtgtacagcactacaacggccagagcgaaaccagccagcaaccggagactccggtattcaacaccctgccgatgatgggcaaagcgtcgcccgtctccttgggggtgccaagtgaagcaaccgctaacaacggtcagcagcagcaggttcaggaacagcgtcgccgcattaatgcgatgctgcaggactatgaactgcaacgccgtctgcactctgaacaattacaatttgaacaggctcagacccaacaggccgccgtgcaggtgcctggcattcagactctgggtactcagtctcagtaa

SEQ ID NO: 2247 - DNA, 342 bp, Artificial Sequence
  Optimized genes for E. coli.
atgaccatgaacatcacctccaaacagatggaaatcactccagcaattcgtcaacatgtcgcagaccgtctggcgaagctggaaaaatggcagactcacctgattaacccgcacatcattctcagcaaagaaccgcagggttttgttgccgatgcgaccatcaatactccgaacggcgtgctggtagcttctggtaaacatgaagatatgtacaccgctatcaacgaactgatcaataagcttgagcgtcagctgaacaaactgcagcacaaaggcgaagcgcgccgcgctgcaacgtcagtgaaagacgccaacttcgttgaggaagttgaagaagagtaa

SEQ ID NO: 2248 - DNA, 348 bp, Artificial Sequence
  Optimized genes for E. coli.
atgagcaacatcatcaaacaactggaacaggagcagatgaaacaggacgttccgtctttccgtccaggcgataccgttgaagttaaggtctgggtcgtagaaggttctaagaaacgccttcaggcgtttgaaggcgtggtgattgctatccgtaaccgtggcctgcattcggctttcaccgtacgtaaaatttctaatggtgaaggcgttgagcgcgtgttccagactcacagcccggttgttgactccatctccgtgaaacgtcgtggtgcagtacgcaaagcgaaactgtactatctgcgtgaacgcacgggtaaagcagcccgcattaaagaacgtctgaactaa

SEQ ID NO: 2249 - DNA, 768 bp, Artificial Sequence
  Optimized genes for E. coli.
atgtggatcggtatcatcagcctgttcccggaaatgttccgtgcaatcaccgactacggtgttacaggtcgtgctgtgaaaaacggtctgctgtcgattcaatcctggagcccgcgtgacttcactcacgatcgtcaccgtactgtagatgaccgcccgtacggcggtggtccgggcatgctgatgatggttcagccgctgcgcgatgctatccacgcggcgaaagcggcagctggtgaaggcgcgaaggttatctatctgtctccgcagggccgtaaactggatcaggctggcgtaagcgaattggccaccaaccagaagctgattctggtctgtggtcgctatgaaggtattgatgagcgcgtgattcagactgagattgacgaagaatggtctattggcgattacgttctcagtggcggcgaactgccggcaatgacgctgatcgactccgttagccgtttcatcccgggagtcctgggtcatgaagcctcagcaaccgaagattcctttgctgaaggcctgcttgactgcccgcactacacccgtccagaagttcttgaggggatggaagtgcctccagtattactctctggtaatcatgccgaaatccgtcgctggcgtctgaaacaatctctgggccgcacctggctgcgtcgtcctgagctgctggaaaacctggcgctgactgaagagcaggcacgcttgctggcagaatttaaaaccgagcatgctcaacagcagcacaaacacgacggtatggcgtaa

SEQ ID NO: 2250 - DNA, 549 bp, Artificial Sequence
  Optimized genes for E. coli.
atgagcaagcagctgactgctcaggcaccggtagatccgattgttctgggtaaaatgggttcttcctacggtatccgcggctggctgcgtgtgttctcttcaacggaagatgctgaaagcatttttgactatcagccgtggttcattcagaaagcaggtcagtggcagcaggttcagcttgagtcctggaaacatcacaaccaggacatgatcattaaactgaaaggcgtagacgaccgcgatgcggcgaatctgctgaccaactgtgaaatcgttgttgacagcagtcaattacctcaactggaagaaggcgattactactggaaagacctgatgggctgccaggtcgtaaccactgaaggttatgatctgggcaaagtggtcgatatgatggaaaccggttccaacgacgtgctggttatcaaagcgaacctgaaggatgcctttgggatcaaagagcgtctggtaccgttcctggacggtcaagtgatcaagaaagttgatctcacaacccgttctatcgaagttgactgggatccaggcttctaa

SEQ ID NO: 2251 - DNA, 249 bp, Artificial Sequence
  Optimized genes for E. coli.
atggttaccatccgcctcgcacgtcatggcgcgaagaaacgtccgttctaccaggttgtcgtagctgattcccgcaatgcccgtaacggtcgttttatcgaacgtgtgggcttcttcaacccgatcgccagcgaaaaagaagaaggtactcgtctggacctggatcgcattgctcactgggtgggtcagggcgcaaccatttctgaccgcgttgctgcactgatcaaagaggttaacaaagcggcgtaa

SEQ ID NO: 2252 - DNA, 186 bp, Artificial Sequence
  Optimized genes for E. coli.
atgctgatcctgacccgtcgcgtaggtgaaaccctgatgatcggcgacgaagtgacggtcactgtactgggcgtgaaaggtaaccaggttcgcattggtgttaacgctccgaaagaagtttccgttcaccgtgaagaaatctatcagcgtattcaggcggagaagagccagcaatcgtcttactaa

SEQ ID NO: 2253 - DNA, 2631 bp, Artificial Sequence
  Optimized genes for E. coli.
atgagcaaatccactgctgaaatccgtcaagcgtttctggattttttccacagcaaaggtcatcaggttgttgccagtagttcgctggtgccgcataacgatccgacgctgctgttcaccaatgctggcatgaaccaatttaaagatgtgttcctgggcctcgacaaacgtaactacagccgtgcaaccacttctcagcgttgcgtgcgcgctgggggtaaacacaatgacctggaaaatgtgggctacaccgcacgtcaccacaccttcttcgaaatgctgggtaacttttcttttggtgactacttcaaacatgacgcaattcagttcgcatgggaactgctgacctctgaaaaatggttcgccctcccaaaagagcgtctgtgggtgacggtttatgaatccgacgacgaagcttacgaaatttgggaaaaagaagtgggtatcccgcgtgagcgcatcattagaattggcgataacaagggcgctccctatgcttctgacaacttctggcagatgggcgatacggggccttgtggcccttgtactgagatcttctatgaccatggcgatcatatctggggcggtccgccgggttctccggaagaagatggagaccgttacatcgaaatctggaacatcgttttcatgcagttcaaccgtcaggcagacggtacgatggaaccgctgccaaagccgtctgttgacaccggtatgggtctggagcgtattgccgctgtcttgcagcacgtaaactctaactatgatatcgatctgttccgtacccttatccaggcagtggctaaagtcacgggcgcaactgacctgagcaacaaatctctgcgcgtaatcgcagatcacattcgttcttgcgcattcctgattgctgacggcgtaatgccaagcaatgaaaaccgcggttatgtgttacgccgcattatccgtcgtgcggtccgtcatggcaacatgctgggcgcaaaggaaacctttttctacaaactggtagggccactgatcgacgtgatgggaagtgctggcgaagacctgaaacgccaacaggcgcaggttgaacaggtactgaaaaccgaagaagagcagtttgcccgcactctggagcgcggcctggctctgctggacgaagagctggcgaaactgtctggcgacaccctggatggtgaaactgcgttccgcctgtatgatacctacggtttcccggtagatcttacagctgacgtttgccgtgaacgtaatatcaaagttgacgaggctggctttgaagccgcaatggaagaacaacgtcgtcgcgcgcgtgaagcgtcaggttttggcgcggattacaacgctatgatccgagtcgacagcgcatccgaatttaagggttacgaccacctggaactgaacggtaaagtaactgcactttttgttgatggcaaagcggtagacgcaatcaacgccggccaggaagcagtagtggtgctcgatcagactccgttctacgcggaatcaggcggtcaggttggtgataaaggcgagctgaaaggtgctaacttcagcttcgctgttgaagacacgcaaaaatatggtcaggcgattggtcacatcggtaagctggcggccggttcccttaaggtcggtgacgcggttcaggccgatgtcgatgaggctcgtcgcgcccgtatccgtctgaatcactctgcgacccatctgatgcacgctgcgctgcgccaggtgctgggtactcacgtttcgcagaaagggtccctggttaacgacaaagttctgcgtttcgacttctctcacaacgaagcaatgaaaccggaggaaatacgtgctgtagaagatctggtcaacacccagatccggcgcaacctgccgattgaaaccaacattatggatctcgaagcggcgaaggcgaaaggtgcgatggcgttgttcggtgagaaatacgatgaacgcgttcgtgttttaagcatgggtgatttcagtactgaactgtgcggtggtacccatgcctctcgcaccggcgacatcggcctgtttcgcattatttcggaatctggtacagctgccggtgttcgccgtatcgaggcagttactggtgaaggtgctatcgccaccgttcacgcggactccgatcgcctaagcgaagttgctcacttgctgaagggagattccaacaacctggccgacaaggtgcgttccgttctggaacgtactcgtcagctggaaaaagaactgcagcaactgaaagagcaggctgcagcacaagaaagcgcgaatctgtccagcaaggccattgatgtaaatggcgttaaactcttagtcagcgagttgagcggcgtggagccgaaaatgttgcgtaccatggttgatgatctgaaaaaccagcttggctccaccatcatcgtcttagctacagttgtcgaaggcaaagtgtcactgatcgctggtgtatccaaagacgtaaccgatcgtgtgaaagcaggcgaattgattgggatggtggcgcaacaagttggcggcaagggtggtggtcgtccggatatggctcaggcgggcggcaccgacgccgcggcactgcctgcagcgctggcatcagtaaaaggctgggtttctgcaaaacttcagtaa

SEQ ID NO: 2254 - DNA, 993 bp, Artificial Sequence
  Optimized genes for E. coli.
atgagccagaacaccctgaaagttcacgacctgaacgaagatgcagaattcgacgagaacggcgtcgaagtatttgatgaaaaggccctggttgaacaggaaccgtctgacaacgatcttgctgaagaggaactgctttctcagggtgcaacgcaacgcgttctggatgcgactcaactgtacctgggcgaaatcggttattccccgctgctgactgctgaagaagaagtttacttcgcgcgtcgtgcgttacgcggcgatgtggcttctcgccgccgtatgatcgaatccaacctgcgtctggtagtaaagattgcacgtcgctacggtaaccgtggcctggcgctgctggatctgattgaggaaggcaacctcggactgatccgcgctgtagaaaaattcgatccggagcgtggtttccgttttagtacatatgcgacctggtggatccgtcagactatcgaacgtgctatcatgaaccagacccgtaccatccgactgccgattcacatcgtgaaagagctgaacgtttatctgcgtactgcacgggaattgtctcacaaactggaccatgaaccttcggccgaagagatcgctgagcagctggacaaaccggttgacgacgtcagccgcatgctgcgcctgaatgaacgtatcaccagcgtcgataccccactgggtggcgactcagagaaggctctgctcgacatcctggcagacgaaaaagaaaacggtccggaagatacgactcaggacgatgatatgaaacaatccatcgttaaatggctgtttgaactgaatgcgaaacagcgtgaagtgttagcccgtcgtttcggtctgttgggctacgaagcggccacgctggaagacgtgggtcgtgaaattggtctgacccgcgaacgcgtgcgccagattcaggttgaggggcttcgtcgtctgcgtgagattctgcaaacccagggcttgaatattgaagcactgttccgcgagtaa

SEQ ID NO: 2255 - DNA, 1140 bp, Artificial Sequence
  Optimized genes for E. coli.
atgtccgcaggcagcccgaaatttactgttcgtcgtattgccgctctgagcttagtcagcctgtggctggctggctgctctgacacctctaacccgccagcaccggtatcttctgttaacggtaacgcgccggcaaacaccaactctggtatgttgatcactcctccgccgaagatgggcaccacttccactgcgcaacaaccgcagatccagcctgtacagcaacctcagattcaggcgactcagcagccgcaaattcaacctgtgcaaccggtggcacagcagcccgttcagatggaaaacggccgtatcgtttacaaccgccagtacggtaacatcccgaaagggagttattccgggtctacttataccgtgaaaaaaggcgacactctgttctacatcgcctggattactggcaacgacttccgtgatctggcgcagcgcaacaacattcaagctccgtacgcactgaacgttggccagaccctgcaggttggtaatgcttccggtactccgatcaccggcggcaatgcaattacccaggcagacgcagctgaacagggcgtagtgatcaaaccagctcagaacagcacggtcgccgtagcttctcagccgaccatcacctacagcgagtcttccggcgaacaaagcgcgaacaaaatgctgccgaacaataagccaaccgccacgacagtaaccgcaccagtgaccgttccgacggccagtaccaccgagccgaccgtttcttcgaccagcacttcaacgccgatttctacctggcgttggccgactgaaggcaaagttatcgaaacctttggtgcgtctgaaggtggtaacaagggtatcgatatcgctggtagcaaaggtcaggctatcatcgcaacagctgacggccgcgtggtgtacgcgggaaatgcgctgcgtggttatggcaacctgatcattattaagcacaacgatgattacctctccgcctatgcgcataatgataccatgctggttcgcgagcagcaggaagttaaagcgggtcagaaaatcgcgacgatgggttccaccggtacatcatcgactcgtctgcacttcgaaatccgttacaaaggtaaatccgtcaatccgctgcgctatcttccacagcgttaa

SEQ ID NO: 2256 - DNA, 1299 bp, Artificial Sequence
  Optimized genes for E. coli.
atgagcaaaatcgtcaaaattatcggtcgcgaaatcatcgactcccgcggcaacccgaccgttgaagccgaggtacatctggaaggcggctttgtgggtatggcggccgctccgtccggtgcttccaccggttctcgtgaagcactggagctgcgtgatggcgacaaatcacgtttcctcggaaaaggcgtaaccaaagccgtcgccgcagttaacggtccgatcgcccaagctctgattggcaaagatgcgaaagatcaggctggcattgacaagatcatgattgatctggatgggactgaaaacaaaagtaaatttggcgcaaatgcaatcttggccgtatcgcttgcgaatgctaaagctgctgcagcggcgaagggcatgccgctgtacgaacacattgcagaactgaatggcacgcctggtaaatacagcatgccagttccgatgatgaacatcatcaacggcggagagcatgccgataacaacgttgatatccaagagttcatgatccagcccgtcggggccaaaaccgtgaaagaagcgattcgtatgggttccgaagtgttccaccacctggctaaggtactcaaggcgaaagggatgaacaccgcagtgggcgacgagggtggttatgcgccgaacctgggcagcaatgctgaagcgttagcggttatcgcggaagctgttaaagcagcaggctatgaactgggtaaagacatcaccctggcaatggactgcgcggcttctgaattctacaaagacggtaagtacgttctggcaggtgaaggtaacaaggcattcaccagcgaagaatttactcacttcctggaagagctgactaaacagtacccaatcgtttctatcgaagatggtctggacgaaagcgactgggatggcttcgcttaccagaccaaagtgctgggtgataaaattcagctggttggcgatgacctgtttgttaccaacactaagattctgaaagaaggtatcgaaaaaggtattgctaactccatcctgatcaaattcaaccaaattggtagcctgaccgaaacgctggctgcgatcaaaatggcaaaagacgctggttacactgcggtgatttctcaccgttctggcgagacagaagacgcaaccatcgctgacttagcggtaggtactgctgccggtcagatcaagacgggctcgatgtctcgcagtgatcgcgtggcgaaatataaccagttgatccgtattgaagaggcccttggcgaaaaggcaccgtataatggtcgtaaagagattaaaggccaggcgtaa

SEQ ID NO: 2257 - DNA, 1638 bp, Artificial Sequence
  Optimized genes for E. coli.
atgacgaccaactacatcttcgtgactggcggtgttgtttcttctctgggtaaaggcatcgccgcggcaagtcttgcagcaattctggaagcgcgcggcctgaacgtgacgattatgaaactggatccttacattaatgtggatccgggtacgatgtccccgatccagcacggcgaggtgttcgtaaccgaagacggcgctgaaactgatcttgacctgggccactacgaacgctttatccgtactaaaatgagccgtcgcaacaacttcaccaccggtcgtatctacagcgacgttctgcgcaaagagcgtcgtggtgactatctgggcgcaaccgttcaggtaatcccgcacatcacaaatgctatcaaagaacgggtgctggaagggggcgaaggtcacgacgtcgtactggtagaaattggcggcactgttggtgatatcgaaagcctgccgttcctggaggcgattcgtcagatggcagtggagatcggtcgtgaacacacgctgttcatgcacctgaccctggtgccgtacatggcggcctccggtgaagtgaaaaccaaaccaacacaacattcggtaaaggaactgctgagcatcggcattcagccggacatccttatctgccgttccgaccgtgctgtaccggcaaacgaacgtgcgaaaatcgctctgttctgtaacgttcccgagaaagcggttatctccttgaaagacgttgactccatttataaaattcctggtctgctgaagagccagggcctggacgactacatctgtaaacgttttagtctcaactgcccggaagccaacctgtctgagtgggaacaggttatttttgaagaagctaacccggttagcgaagtgaccatcggtatggttggcaaatatatcgagctgccggatgcttacaaatccgtgattgaagcactgaaacacggtggtctgaaaaaccgtgtctcggtaaatattaagctgatcgactctcaggatgttgaaacccgcggagtcgaaatcctgaaaggtttggatgcgattctggtcccaggtggcttcggttatcgtggcgtggaaggcatgatcaccactgcccgtttcgctcgcgaaaacaacatcccatatctcggtatttgcctggggatgcaagtcgcgctgattgattatgcgcgccatgtagccaacatggaaaatgcgaacagcaccgagtttgtcccagactgcaaatacccggtagtggcactcatcactgaatggcgtgatgaaaacggtaatgttgaagtacgttctgaaaaatctgatctgggcggcaccatgcgtctgggagcccagcagtgccagcttgttgatgattctttggttcgtcaactgtacaacgcaccgaccattgtcgagcgccaccgtcatcgctacgaggttaacaatatgctgttaaagcaaattgaagatgcagggctgcgtgttgccggtcgctcaggcgatgaccagctggttgaaatcatcgaagttccgaaccacccgtggttcgttgcttgtcagttccatcctgaattcacttctactccgcgtgacggtcatccgctgtttgctggttttgttaaggctgcttcagagttccagaaacgccaggcgaagtaa

SEQ ID NO: 2258 - DNA, 1098 bp, Artificial Sequence
  Optimized genes for E. coli.
atgtttgaaatcaacccggttaacaaccgcattcaagacctgaccgagcgctctgacgtgctgcgtggttatttagattacgatgcgaagaaagaacgcctggaagaagtgaatgcagaactggagcagccggatgtctggaacgagcctgaacgggcgcaagcgctgggtaaagagcgtagctctctggaagccgtggttgataccctggatcagatgaagcagggcctggaagacgtatctggattgcttgagctggctgtagaagctgacgacgaagaaaccttcaacgaagcggttgctgaactggacgcactggaagagaagctggcgcagctggagttccgtcgcatgttctctggtgaatatgattcagccgactgctaccttgatattcaggccggttccgggggtactgaggctcaggactgggcatctatgctggaacgtatgtacctgcgctgggcggaaagccgtggcttcaaaaccgaaatcatcgaagagtctgaaggcgaagttgcgggtatcaagagcgtgaccatcaaaatctccggcgactacgcttacggctggctgcgcacagagaccggtgttcaccgtctggttcgtaaatccccgtttgactccggtggtcgtcgtcataccagtttttccagcgcattcgtttatccggaagtagatgatgacatcgacattgaaattaatccagccgatctgcgtatcgatgtgtaccgtaccagcggcgctggcggtcagcacgtaaaccgtactgaaagtgccgtacgcatcactcacatcccgactggcattgtcacgcaatgtcagaacgaccgttctcagcataaaaacaaagatcaagcaatgaaacaaatgaaagcgaaactgtacgaactcgaaatgcagaaaaaaaatgctgaaaaacaggcgatggaagataacaagtctgatatcggttggggctcgcagattcgctcatatgtcctcgacgattcccgtattaaagacttgcgcacgggcgttgaaactcgtaacacccaggctgttctggatggcagcctggaccagttcatcgaagcatcgctgaaagcaggtctgtaa

SEQ ID NO: 2259 - DNA, 390 bp, Artificial Sequence
  Optimized genes for E. coli.
atgagcaacgtcccggcagaactgaaatacagcaaagaacatgaatggctgcgtaaagaggctgacggtacttacaccgttggtatcaccgaacacgcgcaggaattgctgggcgatatggtttttgttgacctgccggaagtgggcgcgaccgtgagtgcaggtgatgactgcgcagtcgctgaatcagtgaaggccgcttctgatatttatgctccagtatcgggtgaaatcgttgcggtaaatgacgccctctccgactcccctgagctggttaactctgaaccgtatgccggcggctggattttcaaaatcaaagcgtctgacgaaagcgaacttgagtctctgctggatgcaacggcttacgaagcgctgctggaagatgagtaa

SEQ ID NO: 2260 - DNA, 1233 bp, Artificial Sequence
  Optimized genes for E. coli.
atggcaaaagtttctcttgagaaagacaaaatcaaattcctgctggttgaaggcgttcaccagaaagctcttgaatccctgcgcgccgcaggctataccaacatcgaattccacaaaggtgctctcgacgacgagcaactgaaagaatctatccgcgatgctcacttcatcggcctgcgttctcgcacacatctcactgaagacgttatcaatgcagcggaaaagctagtcgcgattggctgcttctgtatcggtactaaccaggttgacctggatgcggccgcgaaacgcggtatccccgtgttcaacgcaccattctctaacacccgttccgtggccgagctggtaatcggcgaactgttgttgctgctgcgtggcgtgcctgaagctaacgctaaggcacaccgtggggtctggaacaagctggctgccgggagttttgaagcacgtggtaaaaaacttggcattattggctacggtcacattggtactcagctgggtattctggcagaaagcctcggtatgtacgtttacttctacgacatcgagaataaactgccactgggcaacgcgacccaggtacagcacctgtctgatctgctgaatatgagcgatgtagtgtcactgcacgttccggaaaacccgtctaccaaaaacatgatgggcgctaaagagatctcgttgatgaagcctggctcgttactgatcaacgccagccgtggaaccgttgttgatatcccggcgctgtgcgacgcgcttgcaagcaaacatctggcgggtgccgctatcgacgtatttccaaccgaaccggcaaccaatagtgatccgttcaccagcccgctgtgtgaatttgacaacgtgctgctcactccgcatatcggtggttccacgcaggaagcccaagagaacatcggtctggaagttgctggcaagttaattaaatattccgataacggttctacgctgtccgcggttaacttcccggaagtcagcctgccgctgcatggcggtcgtcgcctgatgcacatccatgaaaaccgtccgggtgttctgactgcactgaacaaaatttttgctgagcagggcgtaaatattgctgctcagtacctgcaaacttccgcacagatgggttatgtggtgattgatattgaagcggacgaagatgtcgctgaaaaagcgctgcaggcgatgaaagcaattccgggcaccatccgtgcgcgtctgctgtactaa

SEQ ID NO: 2261 - DNA, 1164 bp, Artificial Sequence
  Optimized genes for E. coli.
atgagcgttatcaaaatgaccgatctggacctcgccggtaaacgcgtttttattcgtgccgacctgaacgtaccagtgaaagacggtaaagttacttcagatgctcgtatccgtgcatctctgccgaccatcgaactggcacttaaacagggcgctaaggtgatggtgacatctcacctgggtcgtccgactgaaggtgaatacaacgaagaatttagtttgctgccagtcgtcaattatctgaaagataaattaagcaacccggtacgtctggtaaaagactacctggatggcgtagatgtcgcggagggcgagctggtggttctggaaaacgttcgcttcaacaaaggcgaaaaaaaagatgacgaaacgcttagtaagaaatacgcggcgctgtgcgacgtatttgttatggatgcgttcggtactgcacatcgcgctcaggcttctactcacggtatcggcaaattcgctgacgtagcctgtgcgggcccgctgctggctgctgaactggatgccctcgggaaggcgttgaaagaaccggcacgcccgatggttgcaatcgtgggcggttctaaagtcagcaccaaactgaccgttcttgactcgctgagcaaaattgctgatcagctgatcgttggtggaggcatcgccaataccttcatcgcagcgcagggtcacgacgtcggtaaatccctgtatgaagctgatctggttgatgaagccaagcgtttactgactacctgcaacatccccgtaccttccgatgtgcgcgtagccactgagttcagcgaaaccgcaccggcgacgctgaagtccgttaacgacgttaaagcggatgagcaaattctcgacattggcgacgcttccgcacaggaattggcagaaatcctgaaaaacgcgaaaaccattctgtggaacggtccggttggcgtgtttgaattcccgaacttccgtaaaggtacggaaattgttgctaatgcaattgccgattctgaagcgttttcaatcgctggcgggggtgacaccctggcggctatcgacctgttcggcattgcagacaaaatctcctacatctctaccggtggtggcgcattcctggagttcgttgaaggcaaagtgctgcctgcagtggcgatgctggaagagcgtgcgaagaagtaa

SEQ ID NO: 2262 - DNA, 216 bp, Artificial Sequence
  Optimized genes for E. coli.
atgccggttatcaaagttcgtgaaaacgaaccgtttgacgtcgcgctgcgtcgtttcaaacgcagctgcgagaaagcaggtgtactggctgaagttcgccgtcgcgaattctatgaaaaaccaaccactgaacgtaagcgtgctaaagcttctgcagtgaaacgtcacgcgaagaaactggcgcgtgagaacgcccgccgcacccgtctgtactaa

SEQ ID NO: 2263 - DNA, 369 bp, Artificial Sequence
  Optimized genes for E. coli.
atgaaataccgtatcgctctcgcagtatcgctgttcgcgctgagcgcgggttcctatgcaaccactttgtgccaggagaaagagcaaaacatcctgaaagaaatcagctatgccgaaaaacaccagaaccagaatcgcattgatggtctgaacaaagcgctttctgaagtgcgcgctaactgttctgactcccagctgcgtgcagaccatcaaaagaaaatcgccaaacagaaagatgaagttgctgagcgtcagcaggatctggcggaagcgaaacaaaaaggcgacgctgacaaaattgctaaacgtgaacgtaaactggctgaagcccaggaagaactgaagaagctggaagcacgcgattactaa

SEQ ID NO: 2264 - DNA, 306 bp, Artificial Sequence
  Optimized genes for E. coli.
atgtctaaagagcataccactgaacacctgcgtgctgaactgaaatctctgtctgacactctggaagaagtactcagctcgtcaggtgaaaaatccaaagaagagcttagtaagatccgtagcaaagcagagcaggcgctgaagcagagccgttatcgtctgggcgaaaccggtgatgcgattgcgaaacaaacgcgcgttgccgccgcacgcgctgacgaatacgttcgtgaaaacccgtggaccggcgttggtatcggcgcagctatcggtgtggtgttgggggtcctgctgtcccgtcgctaa

SEQ ID NO: 2265 - DNA, 1488 bp, Artificial Sequence
  Optimized genes for E. coli.
atgaacaaagaaatcctggcagtggtagaagccgtcagcaacgaaaaggcgctcccgcgcgagaagatttttgaagcgctggaaagcgcgctggcgacagcaaccaagaagaaatacgagcaggaaattgacgtacgcgtgcagatcgatcgcaagtctggtgattttgacaccttccgtcgctggctggtagtggatgaagttactcagccgactaaagaaattactcttgaagctgctcgttacgaagacgagagtttaaatctgggggactatgtcgaagatcagattgaatccgtaacctttgatcgtatcaccacccaaacggccaaacaggttatcgttcagaaagttcgcgaagccgagcgtgcaatggttgttgaccagtttcgcgaacacgaaggcgagatcatcactggcgtggtgaaaaaagtgaaccgtgacaatatttccctggacctgggtaacaacgctgaagcggttattctgcgtgaagatatgctgccgcgtgaaaacttccgccccggcgaccgtgtacgtggcgttctgtacagcgtgcgtcctgaagcccgcggtgcgcagctgttcgttacccgttctaaaccggaaatgctgatcgagttgttccgtatcgaagtaccagaaatcggcgaagaagtgatcgaaatcaaagcggcggcacgtgatccgggttctcgtgcgaaaatcgccgttaaaaccaacgataaacgcattgacccggttggcgcttgcgttggtatgcgtggtgcccgggtacaagccgtctccactgaactcggcggagaacgtattgatattgtcctgtgggatgacaacccggcacagttcgtaatcaacgcgatggcgccagctgatgttgcttctatcgtcgttgatgaggacaaacacaccatggatatcgcggtggaagcaggcaacctggcccaggctattggtcgtaatggtcagaacgttcgtctggcaagccagttgtcgggctgggaactgaatgtgatgactgtcgatgatctgcaagcaaaacatcaggcagaagctcacgcggctatcgataccttcaccaaatatctggatatcgacgaagacttcgccacggtgctggttgaagaaggcttttcaacgctggaggagctggcttacgttccgatgaaagagctgttggagattgaggggctcgacgaaccgaccgttgaagcacttcgtgagcgcgctaaaaatgcactggcgaccatcgctcaggcgcaagaagagtctctgggcgataacaagcctgcagacgatctgctgaacctggaaggtgttgaccgcgacctggcattcaaactggctgcacgcggcgtatgtactctggaagatttagctgagcaaggtatcgacgaccttgctgacattgaaggtctgaccgatgaaaaagctggtgctctgattatggcagcgcgtaacatctgctggttcggtgacgaagcgtaa

SEQ ID NO: 2266 - DNA, 312 bp, Artificial Sequence
  Optimized genes for E. coli.
atgtacgctgtcttccagtctggtggtaaacagcaccgtgtatccgaaggtcagaccgtacgtctggaaaaactggatatcgccacgggtgaaaccgttgaatttgcagaagttctgatgatcgctaacggcgaagaagtgaagattggtgttccgtttgttgacggcggcgttatcaaagcagaggtcgtggcgcacggccgcggcgagaaagtgaaaattgttaaattccgtcgtcgcaaacactatcgcaagcagcaaggtcatcgtcagtggttcaccgacgtaaaaatcactgggattagcgcgtaa

SEQ ID NO: 2267 - DNA, 4461 bp, Artificial Sequence
  Optimized genes for E. coli.
atgctgtacgacaaatccctggagcgtgacaactgcgggtttggcctgattgcacacatcgaaggtgaaccgtctcacaaagtggtgcgtacagcaatccacgctttagcccgtatgcagcatcgtggtgctatcctggctgatggcaagaccggcgatggttgcggtctgctgctgcaaaaaccagaccgcttcttccgcatcgtggcccaagagcgcggctggcgtctggcgaaaaactacgcagtcggcatgttgttcctgaataaagacccggaattagcagcagcggcgcgtcgcattgttgaagaagagctgcagcgtgaaaccctgtctatcgttggctggcgcgacgttccgaccaacgaaggggtactgggcgaaattgcgctgagttctctgccacggatcgagcagatcttcgttaatgctccggccggttggcgtccgcgtgatatggaacgtcgactctttattgctcgccgtcgtatcgaaaagcgcctggaagcagacaaagacttttacgtttgctccctgagcaacctggtaaacatctacaaaggcttgtgtatgccgactgatctgcctcgattctacctggatctggcggatttacgcctggaatccgctatctgcctgttccaccagcgcttctctactaacaccgttcctcgctggccgctggcgcagccctttcgctatctggctcacaacggagagatcaacacgatcactggtaaccgtcagtgggcgcgtgctcgcacctacaaattccaaaccccgctgatcccggatctgcatgacgcggcaccttttgttaatgaaaccggtagcgattccagctccatggataacatgctcgaattactgcttgctggcggtatggatatcatccgtgccatgcgtctgctggtaccgccagcctggcagaacaatccggacatggaccctgaactgcgtgcgtttttcgacttcaattctatgcacatggagccgtgggatggtccggcgggaatcgtaatgagcgacggccgctttgcagcttgtaatctggatcgtaatggtttgcgcccggcacggtatgttatcaccaaagataaactgattacctgcgcaagcgaagtgggcatctgggactaccagccggatgaagtggttgagaaaggtcgcgttggtccaggcgaactgatggtgattgatactcgtagtggtcgtatcctgcactctgcggaaacggatgacgacctgaagagccgtcatccgtacaaagagtggatggaaaaaaatgttcgtcgtctggtaccattcgaagacctgccggacgaagaggtcggttcgcgtgagctggacgatgacactctggcatcttaccagaagcagtttaactactctgcagaagaattggattctgttattcgcgtgctgggtgaaaacggtcaggaagccgttggcagcatgggtgatgatacacctttcgccgtgctgtcttcacaaccgcgtattatttacgattactttcgtcagcagttcgcacaggttaccaatccaccgatcgacccgctgcgtgaagcgcacgttatgtcactggcaacctctattggtcgcgaaatgaacgtgttctgcgaagcggaaggacaagctcatcgtctgagcttcaagtcaccaatcctcctctattctgacttcaaacaactgaccaccatgaaagaagagcattaccgcgccgacaccctcgatattacttttgatgtgactaaaaccactcttgaagctacggtcaaggaactgtgcgacaaggccgaaaaaatggtccgtagcggcactgttctgttagtcctttctgatcgcaacatcgccaaagatagactgccggttccggcaccgatggcagttggtgcgattcagacccgcctagttgatcagagcctgcgttgcgatgctaacattatcgtcgaaacagcgtccgcacgcgatccgcatcattttgcggtgcttctcggcttcggtgctactgcgatttatccgtatctcgcttacgaaacgttgggacgtctggttgatactcacgcgatcgccaaggattaccgtaccgtgatgctgaactatcgtaacggtatcaacaaaggtctgtataaaattatgagtaaaatgggcatttccactatcgccagctatcgctgcagtaagctgtttgaagctgtaggcctgcacgacgatgtcgtggggctgtgtttccagggtgcagtaagccgcattggcggcgcgtcgtttgaagatttccagcaggacctgctgaacctgtccaaacgcgcatggctggcacgtaaaccgatttctcagggcggactgctgaaatacgttcacggtggcgaatatcacgcctacaacccagatgttgttcgcacgctgcaacaagcggttcagagtggcgagtacagcgactatcaggaatacgctaagctggtgaacgaacgtcctgcgacgaccctgcgtgacctgctggctataacgccaggtgagaacgccgtaaatattgccgatgtagaaccggcttctgaactgttcaaacgtttcgataccgccgctatgtcgatcggcgctctgtcgccagaagcacatgaggctctagccgaggcaatgaattccatcggtggcaactccaactctggtgaaggcggtgaagacccagcgcgctacggtacgaacaaagtttctcgtatcaagcaagttgcttccggtcgtttcggtgtgacccctgcctatctggtcaacgctgacgtaatccagattaaagtagcacaaggcgcgaagcctggcgaaggcggccagctgcccggcgataaagtaactccgtacattgctaaattacgttattccgtgccgggcgtgacgctgattagcccgccgccgcaccacgatatctatagcattgaagatctcgcccagttgatctttgacttaaaacaggttaacccgaaggcgatgatctccgttaaacttgtcagcgagccgggtgttggtacaatcgcgactggtgttgcaaaagcatacgcggacctgatcaccatcgctggttatgacggtggcaccggcgcttctccgcttagttcggtgaaatatgcgggctgcccgtgggaactgggtctggttgaaactcagcaagcactggtcgcgaacggcctgcgccataaaatccgcctgcaggtggatggcggtctgaaaactggcgttgacattatcaaagctgctattctgggcgctgaaagctttggttttggtactggcccgatggttgcgctggggtgcaaatacctgcgtatttgccatctgaacaactgtgcgacaggcgtggcaacccaggatgataaactgcgcaaaaaccactaccacggcctgccgtttaaagttactaattacttcgaattcatcgctcgtgaaacccgcgagctgatggctcaactcggtgtaacccgtctggttgacttgattggtcgtactgaccttctgaaagaactggacggtttcaccgcgaaacagcagaaactggcacttagcaaactgctggaaactgctgagcctcacccgggtaaagccctttattgtactgaaaataacccgccatttgacaatggcctgctcaacgcgcaacttttacaacaggctaaaccgttcgtagacgaacgccagtctaaaaccttctggttcgacatccgtaacaccgaccgttcagtgggtgcatcgctgtccggctacatcgctcagactcatggcgaccaggggctggcggctgaccccatcaaagcgtacttcaacggtaccgctggtcagtccttcggtgtctggaacgcaggtggtgtcgagctgtatttgaccggtgatgcaaacgactatgtgggtaaaggcatggcgggtggtctgatcgcaattcgtccgccggtagggagcgcgttccgttctcatgaagcgtcaatcatcggtaatacctgtttgtacggcgcaaccgggggccgtctgtacgccgcaggccgtgcaggggagcgtttcggcgtacgtaacagcggtgccattaccgtagtagaaggtattggtgacaacggctgtgaatacatgaccggtggtatcgtttgtatccttggcaaaacgggcgttaacttcggcgcaggtatgactggcggctttgcttatgtcctggatgagtctggcgacttccgtaagcgtgttaacccggaactggttgaagttctgtcagtagatgcgctggctattcacgaagaacacctgcgcggtctgatcaccgagcacgtacagcacaccggttcccagcgtggcgaagaaatcttggccaactggtctaccttcgcgaccaagttcgctctggttaagccgaaatcttccgacgtgaaagcgctgctgggtcaccgttcccgttctgctgcagagctccgtgtgcaggcgcagtaa

SEQ ID NO: 2268 - DNA, 1419 bp, Artificial Sequence
  Optimized genes for E. coli.
atgtctcagaacgtttaccagttcatcgacttgcagcgtgttgatccgccgaagaaaccacttaagattcgtaaaatcgaattcgtagaaatctacgaaccattctctgaaggtcaggcaaaagctcaggctgaccgttgcctgagctgtggtaacccgtactgcgagtggaaatgtccggttcacaactacatcccgaactggctgaaactggcgaatgaagggcgtatcttcgaagcggctgaactttctcaccagaccaacacgctgcctgaagtctgtggccgcgtttgcccgcaggatcgcctgtgtgaaggcagctgcaccctgaacgatgagttcggtgcggtaactattggtaatattgagcgttatatcaacgacaaagcatttgaaatgggctggcgtcctgatatgagcggcgttaagcaaactggcaaaaaagtggctatcatcggtgctggcccagcgggtctggcatgcgcagacgtactgacacgcaacggtgtaaaagcggttgtctttgatcgtcacccggaaattggcggcctgctgacctttggtattcctgcgttcaaactggaaaaagaagtgatgactcgccgtcgtgaaatcttcaccggtatgggcattgaatttaagctgaatactgaagttggtcgtgacgttcagctggacgatctgttgtctgattacgacgcagtgttcctcggcgtaggtacttatcagagcatgcgtggcggtctcgaaaacgaagacgccgacggtgtttatgccgcgctgccgttcctgatcgctaacaccaaacaactgatgggtttcggcgaaacccgcgatgaaccgtttgtgtctatggaggggaaacgtgtcgtcgtgctggggggaggcgacaccgcgatggattgcgttcgcacttccgtacgtcagggcgcaaagcatgtcacctgcgcttaccgccgcgacgaagagaacatgccgggctcccgtcgtgaggtgaaaaacgcccgcgaagaaggcgtggagtttaaattcaacgtacaaccgctgggtatcgaagttaacggcaacggtaaagtttccggagttaaaatggttcgtaccgagatgggtgagccggacgctaaaggccggcgtcgcgctgagatcgtcgccggttccgaacacatcgttccggcagatgctgttattatggcgtttggcttccgtccgcataatatggaatggttagcgaaacattcggttgaactggattcacaaggtcgcattattgcgccagaaggttctgacaacgcattccagacgagtaatcccaaaattttcgctggtggtgatatcgtgcgtggtagcgacctggtggtgacggcaatcgccgaaggccgtaaggcagccgatggcatcatgaactggctggaagtataa

SEQ ID NO: 2269 - DNA, 393 bp, Artificial Sequence
  Optimized genes for E. coli.
atggctgaaaatcagtattacggtactggccgtcgtaagtcgtctgcagcgcgcgtattcattaaaccaggcaacggtaaaatcgttatcaaccagcgtagcctcgaacaatacttcggtcgtgaaaccgcacgtatggtggttcgtcagccgctggaactggttgatatggttgaaaaactggatctgtacatcaccgtgaaaggcggcggtatttccggtcaggctggcgctattcgtcacggtatcactcgtgcgctgatggaatatgacgaaagcttgcgctccgagctgcgtaaagcaggctttgtaacgcgtgacgcgcgtcaagtcgagcgcaaaaaagtgggtctgcgcaaggcccgccgccgtccgcagttctctaaacgctaa

SEQ ID NO: 2270 - DNA, 429 bp, Artificial Sequence
  Optimized genes for E. coli.
atgaaaaccttcactgcgaaaccggaaaccgtgaaacgtgactggtacgtcgttgacgcaactggcaagacacttggtcgtctggctaccgagctggcacgccgcctgcgtggtaaacacaaggcggaatacaccccacatgtagacaccggcgattacatcatcgttttgaatgccgataaggtcgcagtaacgggtaacaaacgcactgacaaagtttactatcaccataccggtcacattggcggtatcaaacaagccacgtttgaagaaatgatcgcacgtcgtcctgagcgcgtgattgaaattgctgttaaaggcatgctgccgaaaggtccgctgggccgtgcgatgttccgtaaactgaaagtgtatgcgggcaacgaacacaaccacgctgctcagcagccgcaggttctggatatctaa

SEQ ID NO: 2271 - DNA, 939 bp, Artificial Sequence
  Optimized genes for E. coli.
atgaaagttgccgttctgggcgcggcgggtggcattggccaggcgctggcactgctgttaaagactcagctgccgtccggttcagagctgtccctgtacgacatcgctccggtaacgccaggagtcgccgttgatcttagccatatcccgaccgcggtgaaaatcaaaggcttcagcggcgaagacgctacgccggcacttgaaggtgctgacgtggtgctgatctccgctggcgtggcacgcaagccaggtatggaccgtagcgatctgtttaacgtaaacgccggcatcgttaaaaacctggtacagcaggttgcgaaaacctgcccgaaagcctgcattggtatcatcaccaacccggtgaataccactgtagctatcgccgcagaagtgttgaaaaaagctggtgtttacgataaaaacaaactgttcggtgtcactacactcgatatcattcgttctaacaccttcgttgctgaactgaaaggtaaacagcctggtgaagttgaggtaccggttatcggtggtcacagcggtgtgactattctgcctttactcagtcaagttccgggcgtctccttcaccgagcaggaagttgcagacctgaccaaacgtattcagaacgcaggcaccgaagtcgtagaagctaaagcgggcggcggttctgcaacgctgtctatgggtcaggcagcagcgcgcttcggcctgagcctggttcgcgccctgcagggcgagcaaggggtagtggaatgtgcttacgtcgaaggcgacggtcagtatgcgcgtttcttctctcagccgctgttgcttggcaaaaatggcgttgaagagcgtaagtctatcggtactctgtcggcgtttgaacaaaatgcgctggaagggatgctggataccctgaagaaagatattgctctgggtgaagaatttgttaacaagtaa

SEQ ID NO: 2272 - DNA, 471 bp, Artificial Sequence
  Optimized genes for E. coli.
atggatatccgtaaaatcaagaaactgattgagctggtggaagagtccggtatcagcgaactggaaatctctgaaggcgaagaatcggtacgcattagccgtgcagcaccagccgcttctttcccggtaatgcagcaggcttatgcggcaccgatgatgcaacagcctgcgcaatccaacgctgccgcgccagcgaccgttccgtctatggaagcacctgcagctgctgaaattagtggtcacatcgttcgttctccgatggttggtactttctaccgcactccgagcccggatgccaaggcattcattgaagttggccagaaagtgaatgtcggcgacacgctgtgcatcgtcgaagcgatgaaaatgatgaaccagatcgaagctgacaaatccggcaccgtgaaagcgattctggttgaaagcggtcagccggttgagtttgacgaaccgctggtagtgatcgagtaa

SEQ ID NO: 2273 - DNA, 297 bp, Artificial Sequence
  Optimized genes for E. coli.
atgtttgaacagcgtgtcaattccgacgttctgactgtatctaccgttaacagccaggatcaggttactcagaaaccgttgcgtgattcagtgaaacaagcccttaaaaactacttcgcgcagctgaacggtcaggacgtaaatgacctgtacgaactggtgctcgctgaagttgagcaaccgctgctggatatggtgatgcagtatacccgtggcaaccagacccgcgcagcgctgatgatgggtatcaaccgcggcacgctgcgtaagaaactgaaaaaatacggtatgaactaa

SEQ ID NO: 2274 - DNA, 384 bp, Artificial Sequence
  Optimized genes for E. coli.
atgcgtcaccgcaagtctggccgccagctgaaccgtaacagctctcaccgtcaggcgatgttccgcaacatggctggctcgctggttcgtcatgaaattatcaaaaccactctgccgaaagcgaaagagctgcgtcgtgtggttgaaccgctgatcacgctcgcgaagactgactccgtagcgaaccgccgtctggcatttgctcgtacccgtgacaatgaaatcgttgctaaactgttcaacgaactgggtccacgctttgccagccgtgcaggcggttatacccgcattctgaaatgcggtttccgtgctggtgataatgcaccgatggcgtacatcgaattggtcgatcgctccgaaaaagctgaagcagccgccgagtaa

SEQ ID NO: 2275 - DNA, 990 bp, Artificial Sequence
  Optimized genes for E. coli.
atgcagggctcggtcaccgagttcctgaagccgcgtctggtcgacatcgaacaggtttccagcactcacgcgaaagttaccctggaaccgctggaacgtggcttcggtcacacgctcggcaacgcactgcgccgcattctgctttcttccatgccgggttgtgcggtgaccgaagttgagatcgacggcgtgttgcatgaatactccaccaaagagggggtgcaggaagatatcctcgaaatcctgctgaatctgaaaggcctggcagtgcgcgtacaaggtaaagacgaagtcattcttacgctgaacaaatccggtattggcccggtaactgcggctgatatcacccatgacggtgacgttgaaatcgttaaaccgcagcacgttatctgccatctgaccgatgaaaatgcaagcatttctatgcgtatcaaagtacagcgcggccgtggttatgttccggcatcaactcgtattcactctgaagaagacgagcgtcctatcggtcgtctgttagtcgatgcgtgttattctccagttgaacgcatcgcttacaacgtagaagccgcgcgtgtggagcagcgtacagatctggacaaactggtaattgaaatggaaaccaacggtactattgatccggaagaggctatccgtcgtgctgctaccatcctggcggaacaactggaagcattcgttgatctccgtgacgtacgtcagcctgaggtgaaagaagaaaaaccagaatttgacccgattctgctgcgtccggttgacgatctggaactgaccgttcgcagtgcaaactgcctgaaagctgaagcgatccactacatcggcgacctggttcaacgtactgaagtggagctgttgaagactccgaacctgggcaagaagtcattaacggaaattaaagatgtgcttgcttctcgcggtctgagcctgggtatgcgcttggaaaactggccgcccgccagcatcgccgatgagtaa

SEQ ID NO: 2276 - DNA, 621 bp, Artificial Sequence
  Optimized genes for E. coli.
atggcgcgttatctgggtccgaaactgaagcttagccgccgcgaagggacggatctgttcctgaaatccggtgttcgtgcaattgacaccaaatgcaaaatcgaacaagcgccgggtcagcatggcgcacgtaagcctcgtctttccgactacggcgttcagttgcgcgagaaacagaaagtacgtcgtatttatggcgtgctggagcgccagttccgtaactactacaaagaagcagcgcgcctgaaaggcaacaccggcgaaaatctgctggctttactggaaggccgtctggataacgtagtgtaccgtatgggcttcggtgcgactcgtgctgaagctcgtcagctggtttctcacaaggcaatcatggtcaatggtcgtgttgttaacatcgcttcttatcaggtatcgccgaacgatgtggtcagcattcgtgaaaaagcgaaaaaacaatcacgcgtgaaagctgccctcgagctggccgagcagcgtgaaaagccaacctggctggaagttgatgccggtaaaatggaaggtacttttaaacgtaaaccggaacgttctgacctgagtgcagacatcaacgaacacctgatcgttgaactgtacagcaaataa

SEQ ID NO: 2277 - DNA, 390 bp, Artificial Sequence
  Optimized genes for E. coli.
atggcgaaagcgccgattcgtgcgcgtaagcgtgttcgtaaacaagtcagcgacggtgttgcccatatccacgcttccttcaacaacaccattgtgactatcactgatcgtcagggcaatgccctgggctgggcgaccgctggcggcagcggtttccgtggttctcgcaagtctactccgtttgctgctcaggttgctgcagagcgttgcgcagacgcggtaaaagaatacggtatcaaaaacctggaagtgatggtgaaaggtccggggcctggtcgtgaatccaccatccgcgcactgaatgccgcaggcttccgcattaccaacatcaccgatgtaacgccaatcccgcacaacggctgtcgtccgccgaaaaaacgccgcgtttaa

SEQ ID NO: 2278 - DNA, 117 bp, Artificial Sequence
  Optimized genes for E. coli.
atgaaagttcgtgcgagcgtgaaaaaactgtgccgtaactgcaaaatcgtcaagcgcgatggcgttatccgcgtaatttgttctgctgaaccgaaacacaaacagcgtcagggttaa

SEQ ID NO: 2279 - DNA, 1332 bp, Artificial Sequence
  Optimized genes for E. coli.
atggcgaaacagcctggcctggacttccagtccgcaaaaggtggtctgggcgaactgaaacgtcgtctgctgtttgtaatcggcgcgttaattgtgttccgtattggctcttttatcccgattcctggtatcgacgctgctgttctggctaaactgctggaacagcagcgtggcacaataattgaaatgtttaatatgttctctggcggcgcactgtctcgtgcgagcatcttcgcccttgggattatgccgtacatctctgcttctattatcattcagctgctcaccgttgttcatccgacgctcgcagaaatcaaaaaagaaggcgagtctggtcgtcgtaaaatctcacagtatacccgctacggtaccctggtgctggcaatcttccagtctatcggtattgctactggtttgccgaacatgccaggtatgcagggtctggttatcaaccccggtttcgcgttctatttcactgcggtggtttccctggtaactggaaccatgttcctgatgtggctgggtgaacaaattaccgagcgtggtattggtaacggtatctccatcatcatctttgctggcattgttgcaggcctgccaccggctatcgctcacaccatcgaacaagcgcgtcagggcgacctgcacttcctcgtacttttattggtggcagtactggtctttgcggttaccttctttgtggtatttgttgaacgcggccagcgccgtatcgttgttaactacgcgaagcgccagcaaggtcgccgcgtttacgctgcgcagagcactcacctgccgctgaaagtcaacatggctggtgtcatcccagccatttttgccagttcgatcatcctgttcccggcaactattgcatcctggtttggtggcggtactggctggaactggctgaccactatcagcctctatctgcaaccgggtcagccgctgtatgtgttgttgtatgccagcgcgattattttcttctgtttcttctacaccgcactagtattcaacccgcgtgaaaccgctgacaacctgaagaaatcgggagcattcgtaccgggcatccgtccgggggagcaaaccgccaagtatatcgataaagtgatgacgcgcctgactctggttggtgctctgtacatcacctttatttgcctgatccctgagttcatgcgtgatgcgatgaaagttccgttctacttcggtggcacaagcctgctgattgtcgtcgtggtgatcatggattttatggcacaggttcagacgctgatgatgtccagtcagtacgaaagcgcgctgaaaaaggccaatcttaaaggctacggccgttaa

SEQ ID NO: 2280 - DNA, 435 bp, Artificial Sequence
  Optimized genes for E. coli.
atgcgtctgaacaccttaagcccggcagaaggcagtaagaaagcaggtaagcgccttgggcgcggtatcggttctggcctgggcaagactggcggtcgtggtcacaaaggtcagaaatcccgttccggtggcggcgtacgccgcggcttcgaaggtggccagatgccgctgtaccgtcgcctgccgaaattcggtttcaccagccgtaaagcggcaattactgctgaaatccgtttgtctgacctggcgaaagtggagggaggcgtggttgatctgaatacgctgaaagccgccaacatcatcggcattcaaattgaatttgctaaagttattctggcaggcgaagttaccactccagtaaccgttcgtggtctgcgtgtcaccaaaggcgcgcgtgctgctatcgaagcggccggtggtaaaatcgaagagtaa

SEQ ID NO: 2281 - DNA, 180 bp, Artificial Sequence
  Optimized genes for E. coli.
atggcgaaaaccatcaaaatcactcagacccgtagcgctatcggtcgtctgccgaaacataaggcgacgctgctgggcctgggtctgcgtcgcattggtcacaccgtagaacgtgaagacactccggcaattcgcggcatgatcaacgccgtttctttcatggtgaaagttgaagagtaa

SEQ ID NO: 2282 - DNA, 504 bp, Artificial Sequence
  Optimized genes for E. coli.
atggctcacatcgagaaacaggcgggggagctgcaggaaaaactgattgctgttaaccgtgtcagcaaaaccgttaaaggcggccgcattttctcctttacggcgctgaccgtagtaggcgacggtaacggtcgtgtgggcttcggttacggtaaagcgcgtgaagttcctgctgccattcagaaagcaatggaaaaggcccgtcgcaatatgatcaacgttgctctgaacaacggcacattgcaacacccagtgaaaggtgtacatactggcagtcgcgtattcatgcagccggcatctgaaggtactggtatcatcgctggcggtgcgatgcgtgctgtccttgaggtggcaggcgttcacaacgtgctggcaaaggcctatggttctaccaacccgattaatgtggttcgtgcaaccatcgatggtctggaaaacatgaacagcccggaaatggttgcggcgaaacgcggcaaatccgttgaagaaatcctgggcaagtaa

SEQ ID NO: 2283 - DNA, 354 bp, Artificial Sequence
  Optimized genes for E. coli.
atggataagaagagcgcccgcattcgtcgcgcaacccgtgctcgccgcaaactgcaggaactgggcgcaactcgtctggtggttcaccgtactccgcgtcacatttatgcgcaggttatcgctccgaacggttctgaagtgctggttgcggcgtccaccgtagagaaagcaatcgccgagcagctgaaatacacgggcaacaaagatgctgctgcagcagtcggtaaagcggttgctgaacgtgcgctggaaaaaggtatcaaagacgtatcgtttgaccgttctggcttccagtaccatggtcgtgtgcaagcccttgctgacgcagcgcgtgaagcgggcttgcagttctaa

SEQ ID NO: 2284 - DNA, 534 bp, Artificial Sequence
  Optimized genes for E. coli.
atgagccgcgtagctaaagcgccggtagtggtgccagccggtgttgacgtaaaaattaatggccaggttatcaccatcaaaggtaaaaacggtgaactgacccgtactctcaatgatgcggttgaagtgaaacacgctgataacacccttacgttcggtccgcgcgatggctatgcggacggctgggcgcaggcaggaacagcacgcgctctgctgaactccatggtgattggcgtaactgaaggttttaccaagaaactgcagctggttggcgttggttatcgtgcggccgtcaaaggcaacgtcatcaacctgtctctgggcttctctcacccggttgatcatcaattgccggcaggtattactgctgaatgcccgacgcaaaccgaaatcgttctgaaaggtgctgacaaacaggtgatcggtcaggtagcagcagacctgcgtgcttaccgtcgtcctgagccgtacaaaggcaagggggtccgctacgccgacgaagttgttcgtaccaaagaggcgaaaaaaaagtaa

SEQ ID NO: 2285 - DNA, 393 bp, Artificial Sequence
  Optimized genes for E. coli.
atgtctatgcaggacccgattgccgatatgctgacccgtattcgtaacggtcaggcagctaacaaagcggcagtgaccatgccttccagcaaactgaaggttgctatcgccaatgtgcttaaagaagaaggctttatcgaagacttcaaggtagaaggtgataccaaaccggaactggaactcacgctgaaatatttccagggtaaagcagttgttgagtcgattcagcgcgtatctcgcccagggctgcgtatctacaaacgtaaagatgagctgccgaaagttatggcgggtctgggtatcgctgtagtcagcacttccaaaggcgtgatgactgaccgtgctgcacgccaagcgggcctgggcggcgaaatcatctgctacgttgcgtaa

SEQ ID NO: 2286 - DNA, 306 bp, Artificial Sequence
  Optimized genes for E. coli.
atggcgaaacagtctatgaaagcacgcgaagttaaacgcgttgcgctggcagacaaatactttgctaagcgtgctgagctcaaggccatcatctccgatgtcaatgcttctgacgaagatcgctggaacgccgtacttaaactgcagactctgccgcgtgacagctcaccaagccgtcagcgtaaccgttgccgtcaaaccggtcgtccgcacggcttcctgcgtaaattcggtctgtcgcgcattaaagtgcgtgaagcggcaatgcgtggtgaaatcccgggcctgaaaaaagcgtcctggtaa

SEQ ID NO: 2287 - DNA, 540 bp, Artificial Sequence
  Optimized genes for E. coli.
atggctaagctgcacgattactacaaagatgaagttgttaagaaactgatgaccgagttcaactacaactccgtgatgcaggttccgcgcgtcgaaaaaatcacgctgaacatgggtgtaggcgaagcgattgctgacaaaaaacttctcgataacgccgctgcagacctggcagctatctctggtcagaaaccgctgatcaccaaagcgcgtaagagcgtcgccgggtttaaaattcgccaaggctacccgatcggttgcaaagtgaccctgcgcggtgaacgtatgtgggaattctttgagcgtctgattactattgccgtgccacgtattcgtgatttccgcggcttgagcgcgaagagttttgacggccgtggcaattattccatgggcgttcgtgagcagatcatcttccctgaaatcgactatgataaagttgaccgcgtacgtggtctggatatcaccatcactaccactgcgaaatctgacgaagaaggtcgtgcactgctggcggcattcgacttcccgttccgtaaataa

SEQ ID NO: 2288 - DNA, 315 bp, Artificial Sequence
  Optimized genes for E. coli.
atggcagcgaaaattcgtcgtgatgacgaagtgattgttctgactggcaaagacaaaggcaagcgcgggaaggtgaaaaacgtccttagcagtggtaaagtgatcgtagaaggtatcaacctggttaaaaaacaccaaaaaccggtaccggcgctgaaccagccaggcggcatcgttgaaaaagaggctgcaattcaggtttctaatgtcgctatcttcaacgccgcgaccggtaaagctgaccgcgttggtttccgttttgaagatggtaagaaagttcgtttctttaaatccaactctgaaaccatcaaataa

SEQ ID NO: 2289 - DNA, 372 bp, Artificial Sequence
  Optimized genes for E. coli.
atgatccaggaacagaccatgctgaacgttgctgacaacagcggggcacgccgcgtgatgtgtatcaaggtcctcggcggcagccaccgtcgttacgcgggcgttggcgatatcatcaaaatcaccattaaagaagctatcccgcgtggtaaagtgaaaaaaggcgacgtcctgaaagcggtggttgttcgtaccaagaaaggtgttcgccgtccggatggttccgtaattcgtttcgacggtaacgcctgcgtactgctgaataacaactctgaacaaccgatcggtacgcgcatttttggtcctgtaactcgtgaactgcgttctgagaaattcatgaaaattatttcgcttgcaccagaagttctgtaa

SEQ ID NO: 2290 - DNA, 255 bp, Artificial Sequence
  Optimized genes for E. coli.
atgactgacaaaattcgtactctgcagggccgcgtagtaagtgataaaatggaaaaatccattgtcgtggctattgagcgctttgttaagcacccgatctacggtaaattcatcaaacgtaccaccaaactgcacgttcatgacgaaaacaacgaatgtggtatcggcgatgtggttgaaatccgtgaatgccgtccgctgtctaaaaccaagagctggacgctggttcgtgtggtcgagaaagcggttctgtaa

SEQ ID NO: 2291 - DNA, 192 bp, Artificial Sequence
  Optimized genes for E. coli.
atgaaagcgaaagagctgcgtgaaaaatccgttgaagaactgaatactgaactgctcaaccttttgcgtgagcagttcaacctgcgcatgcaagccgcttctggtcagctgcagcagagccacctgctgaaacaggttcgtcgtgacgtagcacgcgtgaaaaccctgctgaacgaaaaggctggcgcgtaa

SEQ ID NO: 2292 - DNA, 411 bp, Artificial Sequence
  Optimized genes for E. coli.
atgctgcaaccgaaacgtaccaaattccgtaaaatgcacaaggggcgcaaccgcggccttgcgcagggtactgacgtcagctttggttctttcggtctgaaagcggttggtcgcggccgtctgaccgcccgtcagatcgaagcggcgcgtcgtgcaatgactcgtgctgttaaacgccagggcaaaatctggattcgcgtattcccggacaaaccaatcaccgagaaaccgctggcagttcgtatgggtaaaggtaaaggcaacgttgaatactgggtggcgctgattcagcctggcaaggtgttgtatgaaatggatggcgttccggaagagctggctcgtgaagcattcaaactcgccgctgctaaactgccgatcaaaaccacctttgtaacgaagactgtgatgtaa

SEQ ID NO: 2293 - DNA, 702 bp, Artificial Sequence
  Optimized genes for E. coli.
atgggtcagaaagttcacccgaacggtattcgcctgggtatcgttaaaccgtggaactccacctggtttgccaataccaaagaatttgctgacaacctggacagcgacttcaaggttcgtcagtatctgactaaagagctggctaaagcgtctgtaagtcgcattgttatcgagcgtcctgctaagtcaattcgtgtaaccatccatacggcacgtccgggcattgtgatcggtaaaaaaggtgaagatgtcgaaaaacttcgcaaagtggtcgccgatattgcgggagtaccggctcagatcaacatcgccgaagtgcgcaagccggaactggatgcgaaactggttgcagactccatcacctctcagctggaacgtcgtgtgatgttccgtcgcgcaatgaaacgcgccgttcagaatgcgatgcgtctgggcgcaaaaggcatcaaagtagaagtttctggccgcctcggcggtgctgaaatcgcgcgtacagagtggtaccgtgaaggtcgcgttccgctgcacacgctgcgtgctgatatcgactacaacaccagcgaagcgcacactacttacggtgtgattggcgtgaaagtctggatcttcaaaggcgaaattttggggggcatggcagctgttgaacaaccagagaaaccagcagcgcaaccgaagaaacagcagcgtaaaggtcgtaagtaa

SEQ ID NO: 2294 - DNA, 333 bp, Artificial Sequence
  Optimized genes for E. coli.
atggaaaccatcgctaaacaccgtcacgcgcgttcctccgcacagaaagtgcgtctggttgctgacctgatccgtggtaaaaaggtcagccaggcgctggatattctgacttacaccaacaaaaaagcggcagtgctcgtaaagaaagttctggaaagcgccattgccaatgctgagcacaacgatggcgcagacatcgacgatctgaaagtaaccaaaatcttcgttgacgaaggtccgtctatgaaacgcattatgccgcgtgcgaaaggccgcgctgatcgcatccttaagcgcacgtcgcatatcactgtggttgtttctgaccgttaa

SEQ ID NO: 2295 - DNA, 279 bp, Artificial Sequence
  Optimized genes for E. coli.
atgccgcgttctcttaagaaaggcccgttcattgatctgcacctgctgaaaaaagttgaaaaagcagtggagtccggcgacaaaaaaccgctgcgtacctggagccgccgctcgactattttcccgaacatgatcggtctgaccatcgctgttcacaacggtcgtcagcatgtccctgtgttcgtaaccgatgaaatggttggtcacaaactgggcgaatttgcgccaacgcgtacttaccgtggtcatgccgctgacaagaaagcgaaaaaaaagtaa

SEQ ID NO: 2296 - DNA, 822 bp, Artificial Sequence
  Optimized genes for E. coli.
atggcggtagtgaaatgtaagccaactagtcctgggcgtcgccatgtggttaaagttgttaatcctgaactgcacaaggggaagccgtttgcaccgctgctggaaaaaaactccaagagcggtggacgcaataacaacggtcgtattaccacccgtcacattggcggcggtcacaaacaggcttaccgtatcgtcgacttcaaacgcaataaagacggtatcccggcagtggtggagcgtctggaatacgatccgaaccgttctgcaaacatcgcgctggttttatacaaagatggcgaacgtcgttacatcctcgcgcccaaaggcctgaaagcaggcgaccagattcagtctggcgttgacgctgcaatcaaaccgggtaacaccctgccgatgcgcaacattccggtaggctcaaccgttcacaacgttgaaatgaaaccaggtaagggcggtcagctggcgcgttcggctggcacctatgtacaaatcgttgctcgtgatggtgcctatgtcacgcttcgcctgcgttccggcgagatgcgtaaagtggaggccgactgccgtgcgacactgggcgaagttggtaatgctgaacacatgctgcgcgtgttgggcaaagcgggtgctgcccgctggcgtggtgttcgtccgactgtacgcggtacggcaatgaacccggttgatcatccgcacggtggtggtgaaggccgtaacttcggtaaacatccagtcactccgtggggcgtacagaccaaaggtaaaaaaactcgtagcaacaaacgtaccgataaattcatcgtacgccgccgttctaagtaa

SEQ ID NO: 2297 - DNA, 303 bp, Artificial Sequence
  Optimized genes for E. coli.
atgatccgtgaagaacgtctgctgaaagttcttcgcgcaccgcatgtatcggagaaggcctctactgcgatggaaaaaagcaacaccatcgttctcaaggtcgctaaagacgcgaccaaagctgaaatcaaagcggcagtacaaaaactgttcgaagtagaagttgaagtggtgaataccctggttgttaaaggtaaagtgaaacgccacggtcagcgtattggtcgtcgttccgactggaaaaaggcttacgtcacgctgaaagaaggccagaacctggattttgttggcggcgcagagtaa

SEQ ID NO: 2298 - DNA, 606 bp, Artificial Sequence
  Optimized genes for E. coli.
atggaactggtgctgaaggatgcgcagagcgccctgaccgtttctgaaaccacttttggtcgtgacttcaacgaagcactggttcatcaggttgtggttgcttatgccgctggcgcgcgccagggtactcgtgcgcaaaaaacgcgtgctgaagttaccggcagtggtaaaaagccgtggcgccaaaaaggcactggccgcgcacgttccggttctatcaaatcgccaatctggcgttctggcggcgtaacctttgcagcgcgtccgcaggaccacagccagaaggtcaacaaaaaaatgtaccgtggtgctttaaaatccatcctgagcgagttggtccgtcaggatcgtctgatcgtcgttgagaaattctctgttgaagcgcctaaaaccaaactgctggcacaaaagctgaaagatatggcgctggaagacgttctcattattactggggagctggatgaaaacctgttcctggctgctcgcaatctgcacaaagttgacgtacgcgatgcaaccggtatcgatccggtatcccttattgcattcgacaaagtggtgatgacagctgacgccgtgaaacaggtagaagaaatgctggcgtaa

SEQ ID NO: 2299 - DNA, 630 bp, Artificial Sequence
  Optimized genes for E. coli.
atgatcggcctggttggtaagaaagtgggtatgacccgcattttcaccgaagacggtgtcagcatcccggtaactgttatcgaagttgaagcgaatcgcgtaacccaggttaaagacctggctaacgatggctaccgtgcgattcaggtgaccactggcgcaaagaaagcaaaccgtgtcaccaaaccggaagccggtcacttcgcgaaagctggcgttgaggcgggtcgtggtctgtgggaattccgcctggcagaaggcgaagaatttaccgttggacaatctatctccgtagagctgtttgccgacgtcaaaaaagttgacgttaccggtacttccaaaggcaaaggttttgctgggacggtgaaacgctggaacttccgtactcaggacgcaacacatggtaattcgctctctcaccgtgtacctggttctattggccaaaaccagactccgggcaaggtgttcaaaggtaaaaaaatggcaggtcagatgggcaacgaacgtgtgacggttcagagcctggatgtggttcgtgttgatgctgagcgtaacctgcttttggtaaaaggcgctgttccgggtgcgaccggcagtgatctgatcgttaagccagccgtgaaagcgtaa

SEQ ID NO: 2300 - DNA, 312 bp, Artificial Sequence
  Optimized genes for E. coli.
atgcagaaccagcgtattcgcatccgtctgaaagcgtttgatcaccgtctgatcgaccaggcaacggctgaaatcgttgaaaccgccaagcgcaccggtgcgcaagtgcgtggtcctatcccgctgccaactcgtaaagaacgtttcaccgttctgattagcccgcatgtgaacaaagacgcacgcgatcagtacgaaattcgtactcacctgcgcctggtagatatcgtcgagccgactgaaaaaaccgtagacgcgctgatgcgtcttgatctggctgctggcgttgacgttcagatttctctcggctaa

SEQ ID NO: 2301 - DNA, 2115 bp, Artificial Sequence
  Optimized genes for E. coli.
atggctcggactacgccgattgcgcgttaccgtaacatcggtatctccgcacatatcgacgccggtaaaaccacaacaactgaacgtatcctgttctacaccggcgttaatcacaaaatcggtgaagttcacgacggcgctgcaacgatggactggatggaacaggaacaagaacgcggcatcaccatcacttctgcagcaaccactgcattctggtccggcatggcgaagcagtatgagccgcaccgtattaatatcattgatacgccaggtcatgtagacttcaccattgaagtggagcgcagcatgcgtgtgctggacggtgcggtgatggtgtactgcgcagtgggcggcgtacaaccgcaatcggaaacggtgtggcgtcaggcgaataaatacaaagttcctcgcattgcttttgttaacaaaatggatcgtatgggcgccaacttcctcaaagtcgtaaatcagatcaaaactcgcctgggcgcaaacccggtaccgctgcaacttgctattggtgccgaagaacacttcactggtgttgtcgatttggttaagatgaaagcgattaactggaacgatgctgaccagggcgtgacctttgaatatgaagatatccctgccgatatggttgagttagccaatgaatggcaccagaacctgatcgagtctgcggctgaagcaagtgaagaactgatggaaaaatatctgggtggcgaagaactgaccgaagctgaaatcaagggcgcgctgcgtcagcgtgttctgaacaacgaaattattctggttacctgtggtagtgccttcaaaaacaagggggtacaggcaatgctcgatgcggttattgattacctgccgagcccggttgatgttccggcaatcaacggtattcttgatgatggtaaagacactccggctgagcgtcacgcgtctgacgacgaacctttctctgctctggcttttaagatcgccacggatccgttcgtcggcaaccttaccttcttccgcgtttattccggggtggtgaactctggcgataccgttctcaacagcgttaaagcggcacgtgagcgcttcggtcgcatcgttcagatgcacgctaacaaacgtgaagagattaaagaggtacgtgctggcgacatcgctgctgcgatcggcctgaaagatgtaaccaccggtgacaccctgtgcgacccggacgctccgatcatcctggaacgcatggaattcccggaacccgtcatttctattgccgtagaaccgaagactaaagctgatcaggagaaaatgggtctggcactgggccgtttggcgaaagaagacccttctttccgtgtctggaccgatgaagagtccaaccagactattatagctggtatgggcgagctgcacctggatattatcgtcgaccgtatgaagcgtgaattcaacgttgaagcgaacgtgggaaaaccgcaggttgcttaccgcgaaactatccgccagaaagtaactgacgttgaaggcaaacacgccaaacagagcggcggtcgtggccagtacggtcacgttgttatcgatatgtacccgctggagccgggttcaaatccgaaaggctacgaatttatcaacgacatcaaaggtggtgtgatcccaggcgaatacatcccggcggtagacaaaggcattcaggagcaactgaaggcaggtccgctggcgggttatccggtggttgacatgggtatccgtctgcattttggttcttaccatgacgtagactccagcgagctggcgtttaaactggcagcttctatcgcatttaaagaaggttttaagaaagcaaaaccagtactgctggaaccaatcatgaaagtggaagtcgaaaccccagaagaaaacaccggtgatgtgattggcgatctgtcccgtcgtcgcgggatgctgaaaggtcaggaatccgaagttacaggagtgaaaattcatgcagaagtacctttgtcagaaatgttcggctatgcgacccagctgcgctcgttaaccaaaggccgcgccagctataccatggagttcctgaaatacgatgaggcgccaagcaatgttgcgcaagcagtcatcgaagcccgtggtaagtaa

SEQ ID NO: 2302 - DNA, 540 bp, Artificial Sequence
  Optimized genes for E. coli.
atgccgcgtcgccgcgttatcggtcagcgtaaaatcctgccggatccgaaattcggttctgaactgctggcgaagttcgttaatattctgatggttgacggtaaaaaatctactgctgagagcattgtttacagcgcccttgaaaccctggcacaacgttctggtaagagcgagctggaggcctttgaagttgctctggaaaacgtgcgtccgaccgttgaagtgaaatcccgtcgtgtgggcggttccacctatcaggtgccagtagaagtacgtcctgtccgccgtaacgccctcgcaatgcgctggatcgtcgaagcggcacgcaaacgtggcgacaaaagcatggcgctgcgcttagctaacgaactgtctgacgctgcagaaaataaaggcacggcggtaaaaaagcgtgaagatgttcaccgtatggctgaagccaacaaagcattcgcgcactaccgctggctgtcgctgcgtagtttttcacatcaggcgggggcttcttccaaacagccggcattgggctacctgaactaa

SEQ ID NO: 2303 - DNA, 375 bp, Artificial Sequence
  Optimized genes for E. coli.
atggctaccgttaaccagctggttcgcaagccgcgtgctcgtaaggtggcgaaatccaatgtgccggcactggaagcctgcccgcaaaaacgcggcgtctgtactcgcgtttataccaccacgccaaagaaaccgaacagcgctctgcgtaaagtttgccgtgttcgtctgaccaacggcttcgaggtgacaagttacatcggcggtgaaggtcataacctgcaggaacactctgtaattctgatccgtggtggtcgtgtgaaagatttgcctggcgtacgttatcacactgtacgcggggcgctggattgttctggtgtcaaagaccgcaaacaggcacgtagcaaatacggcgttaaacgtccgaaagcgtaa

SEQ ID NO: 2304 - DNA, 633 bp, Artificial Sequence
  Optimized genes for E. coli.
atggtgctgggtaagccgcagaccgatccaacattagagtggttcctgtctcactgccacattcacaagtatccgagcaagagcacgttgattcatcagggggagaaagcggaaactctgtactacatcgttaaaggttctgtagctgttctgatcaaagacgaagagggtaaagaaatgatcttgagctatctcaaccagggcgattttatcggcgaactgggcctgtttgaagaaggtcaggagcgctcggcctgggtgcgtgctaaaactgcctgtgaagttgctgaaatcagttacaaaaaattccgccagctgattcaggttaacccggatatcctgatgcgtctgtccgcacagatggcacgccgcctgcaagtcacctctgaaaaagtgggcaatctggcattcctggacgtaaccggtcgtatcgctcaaacgctgctgaacctggcgaaacaaccggacgcgatgactcaccctgacggtatgcagattaaaatcacccgtcaggaaattggccagatcgtcggttgctcccgtgaaaccgttggccgtattctgaaaatgctggaagatcagaaccttatctccgcgcatggcaaaaccatcgtagtttacggtactcgttaa

SEQ ID NO: 2305 - DNA, 1104 bp, Artificial Sequence
  Optimized genes for E. coli.
atgaaaaacgttggttttatcggttggcgtggtatggtgggcagcgtcttgatgcagcgtatggttgaagagcgcgattttgacgctattcgcccagtcttcttctccacctctcagctgggtcaggctgcaccgtctttcggcggaaccaccggtacgctgcaggacgccttcgacctggaagcgctgaaggcactggacatcatcgttacctgccaggggggcgattacactaacgaaatttatccgaaactgcgtgaaagcggctggcagggctactggattgatgccgcttcctcgctgcgcatgaaggatgacgcgattattatcctcgaccctgttaaccaggatgtcattaccgatggcctcaataacggtatccgtacctttgttggcggtaactgcaccgtatctctgatgctgatgagcctgggcggcctgtttgctaacgatctggttgactgggtgtccgtagccacttatcaggcagcttctggtggtggcgcgcgtcacatgcgtgagctgctgactcagatgggccacctgtacggtcatgtagctgacgaactggctacgccatcatcggccattctggatatcgaacgtaaagtgacgacacttactcgttccggcgaactgccggttgataacttcggtgttccgttagcgggttccctgatcccgtggatcgacaaacaacttgacaacggccaaagccgtgaagaatggaaaggccaagcagaaaccaacaaaatcctgaataccagcagtgtgattccggtagacggtctgtgtgttcgtgtgggggcgctccgctgccatagtcaggcgttcaccatcaaactgaaaaaagacgtatctatcccaaccgttgaggagcttttagccgcgcacaacccctgggcgaaagttgtccctaatgatcgcgaaatcaccatgcgcgagttgacgccggcagcggtgactggtactctgaccactccggtgggtcgtctgcgtaagctgaacatgggtccggaattcctgtctgcattcactgtaggtgatcagctgctgtggggcgcagctgaaccgctgcgtcgtatgttgcgccaactggcataa

SEQ ID NO: 2306 - DNA, 1104 bp, Artificial Sequence
  Optimized genes for E. coli.
atgaacatcaaaggtaaagctcttttggccggctgtatcgcccttgccttcagcaacatggcgctggctgaagacattaaagttgctgttgttggtgcaatgtctgggccggtagcgcagtacggcgaccaggaattcactggcgcagagcaagctgtggctgacatcaacgccaaaggtggtatcaagggtaacaaactgcagatcgttaaatatgatgatgcctgcgacccgaaacaggcagtcgcggtggcgaataaagtagttaacgatggcattaagtatgtgatcggtcacctgtgctcgtccagtacgcaaccggcttctgatatctacgaagatgaaggtattctgatgatcactccggcggcaacggctccggagctgactgcgcgtggctaccagctgatcctgcgtacaaccggtctcgactccgatcagggcccgaccgcagcaaaatacatcctggaaaaagtgaaaccgcagcgtattgctattgtacatgacaaacaacaatatggtgaaggcctcgcacgtgcggttcaggatggtctgaagaaaggcaacgcgaatgtcgtattctttgacggtatcaccgctggcgagaaagacttctctacgctggtggcacgcctgaaaaaagaaaacattgatttcgtttactatggcggttatcacccggaaatgggtcagattctgcgccaggcgcgcgctgctgggttaaaaacccagttcatgggccctgaaggcgttgctaacgtatccctgagcaatattgcaggcgaatcagctgagggactgctggttaccaaaccaaaaaactacgatcaggttcctgccaacaagccaatcgtcgacgccattaaagcgaagaagcaggacccaagcggcgcgtttgtctggaccacttacgcagcgttgcagagcctgcaagccggtctgaaccagtctgacgatccggcagaaatcgctaaatacctgaaagcaaattctgttgataccgtgatgggtccgctgacctgggacgaaaagggcgatctgaaaggctttgaatttggtgtgttcgactggcacgcgaacggtactgcaaccgatgcgaaataa

SEQ ID NO: 2307 - DNA, 435 bp, Artificial Sequence
  Optimized genes for E. coli.
atggcttacaaacacatcctgattgctgtagatctcagcccggaatccaaagtgctggtagaaaaagcggtatctatggcacgtccatacaacgccaaggtctcgcttattcatgtcgatgtgaactacagcgatctgtacaccggtttaatcgacgttaacctgggcgatatgcaaaagcgcatttctgaagaaactcaccacgcgctgaccgaactgtctacgaatgcaggctatccgatcactgaaaccctgtccggttctggcgacctgggtcaggttttggtggacgctatcaaaaaatatgatatggatctggtggtttgcggtcaccatcaggacttctggtcaaaactgatgagctccgcgcgtcagctgatcaacaccgttcacgttgacatgctgatcgttccgctgcgtgacgaagaggagtaa

SEQ ID NO: 2308 - DNA, 333 bp, Artificial Sequence
  Optimized genes for E. coli.
atgaaaaaagttctgggtgtgattctgggcggtctgctgttgcttcctgtcgtctctaatgcagctgacgcgcagaaagcggccgataacaaaaaaccggttaactcctggacctgtgaagacttcctggcagttgacgaaagcttccagccgaccgctgttggttttgctgaagcgctgaacaacaaggataagccggaagatgcggtgctggacgtacagggcattgcaaccgtaacgccagcaatcgttcaggcctgcactcaggacaaacaagctaacttcaaagacaaagtgaaaggcgagtgggataaaatcaagaaagatatgtaa

SEQ ID NO: 2309 - DNA, 252 bp, Artificial Sequence
  Optimized genes for E. coli.
atggctaacgttgaaatctacaccaaagagacctgcccgtactgccatcgcgctaaggcactgctttcgagcaaaggcgtatccttccaggaactgccgatcgacggcaacgccgcgaaacgcgaagaaatgatcaaacgttctggtcgtactacggtgccacaaatttttattgatgcgcagcacatcggtggctgtgacgatctgtatgcgctggacgcacgtggtggtctggatccgctgctgaaataa

SEQ ID NO: 2310 - DNA, 168 bp, Artificial Sequence
  Optimized genes for E. coli.
atggcgaaaggtatccgtgaaaaaatcaaactggtttcttccgcaggcaccggtcacttctacaccacgactaaaaacaaacgcaccaaaccggaaaagctggaactgaaaaaatttgatccggtagtgcgtcagcatgttatttataaagaggctaaaattaagtaa

SEQ ID NO: 2311 - DNA, 237 bp, Artificial Sequence
  Optimized genes for E. coli.
atgtcccgcgtgtgccaggttaccggtaaacgcccagtaactggcaacaaccgttctcacgcgctgaatgccaccaaacgtcgtttcctgccgaacctgcacagccatcgcttctgggttgaaagcgagaagcgttttgtcacgctccgcgtatctgcgaaaggtatgcgtgtgattgataaaaaaggcatcgacaccgttctggctgaactgcgtgcacgtggtgaaaaatactaa

SEQ ID NO: 2312 - DNA, 276 bp, Artificial Sequence
  Optimized genes for E. coli.
atggcgcgcgtaaccgttcaggacgctgtagaaaagattggcaaccgtttcgacctcgttctggtggcggcacgtcgcgcccgtcagatgcaggttggtggtaaagatccgctggtcccggaagaaaatgacaaaaccactgttatcgctctgcgtgaaatcgaagagggcctgatcaacaaccagatcctggatgtgcgcgagcgccaggaacaacaggagcaggaagcagcagaactgcaagcggtgacggccattgctgaaggtcgtcgttaa

SEQ ID NO: 2313 - DNA, 99 bp, Artificial Sequence
  Optimized genes for E. coli.
atgaccaccagcatgctgaacgcgaaactgctgccgactgcaccgtctgctgctgttgtcgttgttcgtgtggtagtagtggttggtaacgccccataa

SEQ ID NO: 2314 - DNA, 141 bp, Artificial Sequence
  Optimized genes for E. coli.
atgaaacgcaccttccagccgagcgtgctgaaacgtaaccgttctcacggttttcgcgcacgtatggcgaccaaaaacggtcgtcaggttctggcgcgtcgtcgcgctaaaggccgcgcccgtctgactgtatccaagtaa

SEQ ID NO: 2315 - DNA, 1371 bp, Artificial Sequence
  Optimized genes for E. coli.
atgcttaataatgcaatgagtgtcgtgattttggcggcgggtaaaggcactcgtatgtactcggacctgccgaaagttctgcacacgctggcaggtaaagcgatggttcagcacgttattgatgccgcaaacgaactcggcgcagcgcatgttcatctggtatatggtcacggcggcgacttgctgaagcaggctctgaaagacgataacctgaactgggtgctgcaggcggaacagttggggacgggtcacgctatgcagcaggcagctccgttcttcgctgacgacgaagatatcctgatgctgtatggcgatgttccgctgatctccgtagaaaccctccaacgccttcgtgacgcgaaaccacagggtggtattggtctgctgaccgttaaactggatgatccgactggctacggccgtatcacccgcgaaaacggcaaagtgacgggcattgtagaacacaaagatgcgaccgatgaacaacgtcagattcaggaaatcaacaccggtatccttatcgctaacggtgctgatatgaaacgctggctggcgaagttaactaacaacaacgcacagggcgaatactacatcactgacatcattgcgctggcctatcaggagggtcgtgaaatcgttgccgttcacccgcagcgtctgtctgaagttgaaggcgtgaataaccgtctgcaactgtcccggcttgagcgcgtttaccagtcagagcaagctgaaaaactgctcttagccggtgtgatgctgcgcgatcctgcacgtttcgatctgcgtggtaccctgactcacggtcgcgacgttgagatcgacaccaacgtaattattgagggcaacgtcactctgggtcatcgcgtgaaaatcggcaccggctgtgtgatcaaaaacagcgtcatcggtgacgactgcgaaatttctccgtacaccgtagtcgaagacgccaatctggctgcagcctgcactatcggtccgtttgcacgcctgcgtccaggagcagaactgctggaaggtgcgcatgtgggtaacttcgttgaaatgaagaaggcgcgtctggggaaaggtagcaaagcaggccacctgacctatctgggcgatgctgagattggcgacaatgttaacatcggcgctggaactattacctgtaactacgatggcgcgaacaaattcaaaaccatcatcggtgatgacgtatttgttggttctgacactcagctggttgcgccggtaacagtcggtaagggtgcaaccattgctgctgggacaacggtaacccgtaacgttggcgagaatgccctagctatcagccgtgtgcctcaaacccagaaagaaggctggcgtcgtccggttaagaaaaaataa

SEQ ID NO: 2316 - DNA, 864 bp, Artificial Sequence
  Optimized genes for E. coli.
atggcgggtgcgaaagaaatccgttccaaaattgcttctgttcagaacacccagaaaatcaccaaagcaatggaaatggtggcagccagcaaaatgcgtaagagtcaggatcgcatggctgcttcccgtccatacgctgaaacgatgcgcaaagttattggtcacctggcacacggcaatcttgaatacaaacacccgtatctggaagaccgcgacgttaaacgcgttggctacctggtggtttccaccgaccgtggtctgtgtggcggcctgaacatcaacctgtttaagaaactgctggctgagatgaaaacctggaccgataaaggcgtacagtgcgacctggcgatgatcggttctaaaggtgtaagtttcttcaacagcgtcggcggtaacgtggtcgcgcaggttacaggtatgggcgataacccgtctctctcagagctgatcggcccggtgaaagtgatgctgcaagcctatgacgaaggtcgtctggataagttgtatattgtctccaacaaattcatcaataccatgagccaggtacctacgatttcgcaactgctgccgctgccagcatctgacgacgatgatctgaaacataaatcctgggattacctgtacgaaccggatccgaaagcgctgctcgacactttgctgcgtcgctacgttgaaagccaagtttatcagggcgtggtagaaaatttagccagcgagcaggcagcgcgtatggttgctatgaaggcagctactgacaacggtggttcacttatcaaagagctgcagctggtttacaacaaggcacgtcaggcgtctatcactcaggaactgactgaaattgtttctggggcggccgctgtataa

SEQ ID NO: 2317 - DNA, 1542 bp, Artificial Sequence
  Optimized genes for E. coli.
atgcaactgaactccactgaaatatccgaacttatcaaacaacgcatcgctcagtttaatgttgtttctgaagctcacaacgaaggcaccattgtatcggtgtctgatggtgtgattcgtattcacggtctggcggattgtatgcagggcgaaatgattagcctgcctggcaaccgttatgctatcgccctcaacctggagcgcgacagtgtcggcgcggtggtgatgggtccgtacgctgacctggcagaaggtatgaaagtgaaatgcacaggtcgtatcctggaagttccggttggtcgcggcctgctgggtcgtgtagtaaatactctgggcgcaccgatcgacggtaaaggtccactggatcatgacggcttttctgcggtagaggcgattgcgccgggtgttattgaacgtcaatcagtagatcagccggtacagactggctataaagcagttgacagcatgatcccgattggccgcggtcagcgtgaactgatcattggtgaccgtcagaccggtaaaaccgcattggctattgatgccattattaatcaacgtgattccggtattaaatgtatctatgtggcgatcggtcagaaagcttctaccatctccaacgtcgttcgtaaactggaagaacacggcgctttggctaacaccatcgttgtggttgcaacggccagcgaaagcgcagcgctgcagtacctggcgccttatgccggttgcgcaatgggcgaatacttccgtgaccgcggtgaagatgcgctgattatctacgacgatctgagcaaacaggcggttgcttaccgccagatctcgctgctgctgcgtcgtccgccggggcgcgaagccttcccgggcgacgtcttctacctgcacagccgtctgcttgagcgggccgcacgcgttaatgctgaatatgttgaagcgtttacaaagggtgaagtcaaaggcaaaacgggatcactgaccgccctaccaatcatcgaaacccaggctggcgatgtgagtgcctttgtacccaccaacgttatctctatcaccgatggccagattttcctggaaactaacttattcaacgcaggcatccgcccagcagtgaacccgggaatcagtgtctcccgtgtgggtggtgcggcgcaaaccaaaatcatgaagaaactgtctggcggtatccgtactgcgcttgcccagtaccgtgagctggcagcattctctcagttcgcgtctgacctcgatgacgcaacccgtaagcagctggaccatgggcaaaaagtaactgagttgctcaaacagaagcaatacgcaccgatgagcgtcgcgcagcagtctctggttctgttcgctgctgagcgtggttatctggctgatgttgagctttccaagatcggttcttttgaagcagctctgttagcctacgttgatcgcgatcacgctccgctgatgcaggaaatcaaccagacgggcggctacaacgacgaaatcgaggggaagctgaaaggcattctggactccttcaaagcgactcagagctggtaa

SEQ ID NO: 2318 - DNA, 534 bp, Artificial Sequence
  Optimized genes for E. coli.
atgagcgaatttatcaccgttgcgcgtccgtacgccaaggctgcctttgacttcgctgttgaacaccagtctgttgagcgctggcaggatatgctggcattcgcggcggaagtgaccaaaaacgaacagatggcagaactgctgagcggcgcattggcaccagaaacgctggctgaatcgttcattgctgtctgtggcgaacaattagacgaaaacggtcagaacctgattcgcgtaatggctgagaacggccgtctgaatgctctgccggatgttctcgagcagttcatccatctgcgtgctgtatctgaagcgactgctgaagttgacgttatctccgcagcagcgctgtctgagcagcagctggcgaagatttcagccgcaatggaaaaacgcctctcccgtaaagtgaaactgaactgcaaaatcgacaaatccgtgatggcgggtgtcatcatccgtgcaggcgacatggttattgatggttctgtacgtggtcgcctggaacgtcttgccgatgtgctgcaaagctaa

SEQ ID NO: 2319 - DNA, 240 bp, Artificial Sequence
  Optimized genes for E. coli.
atggaaaacctgaacatggatctgctgtacatggcagctgctgttatgatgggtctggcagcgattggcgctgcaatcggtattggtatcctgggcggtaaattcctggaaggcgcggcgcgtcagccagacctgattccgctgcttcgcacccagttcttcatcgtgatgggcctggttgacgctatcccgatgatcgccgttggtttggggctctatgtaatgtttgccgtcgcgtaa

SEQ ID NO: 2320 - DNA, 816 bp, Artificial Sequence
  Optimized genes for E. coli.
atggcttctgaaaacatgaccccgcaggattacatcggtcaccatctgaacaacctgcaactggatctgcgtaccttctccttggttgacccgcaaaacccgccggcaactttctggaccatcaacatcgacagcatgttcttctctgtcgtcctgggcctgttgtttctggtgctgttccgttctgttgccaagaaagcgacgagtggagtaccaggtaaattccagactgctatcgaactggttatcggctttgttaacggttccgtgaaagatatgtatcacggcaaatccaaactgattgccccgctggcgctgacaatcttcgtctgggtgttcctgatgaacctgatggatcttctgccgattgacctgttaccttatattgctgaacacgttttggggctgccagcactgcgcgttgttccctcagctgacgtgaatgtgactctgtctatggccctcggcgtatttattcttattctgttctacagcatcaaaatgaaaggcattggcggtttcaccaaagagctgaccctgcagccgttcaaccactgggcattcatcccggtaaatctgattctggaaggcgtttctctgctgagcaagcctgtgtcgctgggtctgcgtctgtttggtaatatgtacgcaggtgaactgatctttatcctgatcgctggtctgctcccgtggtggagccagtggatccttaacgtaccgtgggcgattttccatatcctcattatcaccttgcaggcgtttatttttatggttctgactatcgtttacctgtccatggcgagcgaagagcactaa

SEQ ID NO: 2321 - DNA, 891 bp, Artificial Sequence
  Optimized genes for E. coli.
atgaacatgaaaaaactggctacgctggtaagcgccgttgctttatcggccacagtatctgctaacgcaatggcgaaagataccatcgctttggttgtctccacgctcaacaacccgttcttcgtttctctgaaagacggtgcacagaaagaggcagacaaactgggttataatctggttgtactggattcacagaataatccggcaaaagaactggcgaatgtacaggacctgaccgttcgtggtaccaaaattctgctgatcaacccgaccgacagcgacgcagtgggtaacgcggtgaaaatggccaaccaggcaaacattccggtaatcaccctggaccgtcaggcgactaaaggtgaagtggtcagccatattgcttccgataacgtgttgggtggtaaaatcgcaggcgactacatcgccaagaaagctggcgagggcgcgaaagttatcgaactgcagggcattgccggaacttccgcggcacgcgagcgcggcgaaggcttccagcaggccgtcgccgcgcacaaattcaacgttctggcaagtcaaccagctgactttgatcgtatcaaaggtctgaacgtaatgcagaacctgcttactgctcacccagacgttcaggctgtgtttgcacaaaacgatgaaatggcacttggtgcgctgcgtgctctgcaaaccgcgggtaagtctgatgtgatggttgttggtttcgatggcactccggatggggaaaaagcggtaaatgacggcaagttagctgcgaccattgcgcagctgcctgaccagatcggtgctaagggcgttgaaaccgccgataaagtgctgaaaggcgaaaaggtccaagctaaatacccggttgatctgaagctggtggttaaacagtaa

SEQ ID NO: 2322 - DNA, 99 bp, Artificial Sequence
  Optimized genes for E. coli.
atgaccgccctgctgcgtgtgatttctctggttgttatctccgtagtggtcattatcatcccgccgtgcggtgctgcactcggccgcggtaaagcgtaa

SEQ ID NO: 2323 - DNA, 330 bp, Artificial Sequence
  Optimized genes for E. coli.
atgtctgacaaaatcatccacctgaccgatgacagctttgataccgacgtgctcaaggccgatggtgcaatcctggttgacttctgggcggagtggtgtggtccgtgcaaaatgatcgcgccaattctggatgaaatcgctgacgaataccagggtaaactgactgtagcgaagctgaacatcgatcagaacccgggtacggctccgaaatatggtattcgtggcattccgactttgctgctgttcaaaaacggcgaagttgctgcaaccaaagtcggcgcgctgtccaaaggccaactgaaagaattcctggacgccaatcttgcataa

SEQ ID NO: 2324 - DNA, 2262 bp, Artificial Sequence
  Optimized genes for E. coli.
atgacgatactgaaccatactctgggtttccctcgcgttggcttgcgacgcgaactgaaaaaagcgcaggaaagctactgggcaggcaacagcacgcgtgaagagctgttggctgttggtcgtgagctgcgcgctcgtcactgggaccagcaaaagcaggctgggattgacctgctgccggtaggcgattttgcctggtacgatcacgttctgactacttcgctgttattaggaaatgttcctgcgcgccaccagaacaaagatggcagcgttgatatcgatacgctgttccgcattggtcgcggccgtgcaccgactggcgaaccagcggcggcagctgaaatgaccaaatggtttaacaccaactatcactacatggttccggaatttgttaaggggcaacagttcaaactgacctggactcagctgctcgatgaagttgacgaagcgctagcgctcggtcacaaagttaaaccagtgctgctgggcccggtgacctggctgtggctgggtaaagtgaaaggtgaacagtttgaccgtctctcccttctgaacgatattctgcctgtctatcagcaggttcttgcagaactggcgaaacgcggtatcgaatgggtacagatcgacgaaccggcactggtactggaacttccacaagcgtggctggatgcttacaaacctgcttatgatgcgttgcagggtcaggtgaagctgttacttacgacttactttgaaggcgtgacgccaaacctggatactatcaccgcactgccagttcagggcctgcatgtcgatctggttcacggtaaagatgacgttgcggagttgcataaacgtctgccgtcagactggcttctgtccgctggcctgatcaacggccgcaacgtgtggcgtgccgatctgactgaaaaatatgctcagattaaagacatcgtcggcaaacgcgatctctgggttgcttcttcatgttctctgctgcacagccccatcgacctgtctgtagaaacgcggctcgacgcggaagttaaatcctggttcgcgtttgctttacagaaatgtcatgaactggcattgctgcgtgatgcgctgaattccggtgacaccgctgctctggctgagtggtctgcgccgatccaggcacgtcgccactctacccgcgtacacaacccggcggtagagaaacgtctggcagcaatcactgcacaggacagtcagcgcgcaaacgtttacgaagtgcgcgccgaggcccagcgtgcgcgttttaaactcccagcatggccgaccacaaccatcggttctttcccgcagactaccgaaattcgcaccctgcgcctggacttcaagaaaggcaatctggacgccaacaactaccgtaccggtattgccgaacatatcaaacaggctatcgttgagcaggagcgcctggggctggatgtgttggtacatggcgaagccgaacgtaacgatatggtggaatacttcggtgaacacctggacggcttcgttttcacccagaatggttgggtgcagagctatggttcccgttgcgtgaagccgccgatcgtgattggcgacattagccgtccggctccgattaccgttgaatgggcgaaatacgcacaatcgttaaccgacaaaccggtaaaaggtatgctgaccggccccgtaaccatcctgtgctggagcttcccgcgtgaagatgtttctcgtgaaaccattgctaaacaaatcgctctggccctgcgtgacgaagtcgctgatctggaagctgcgggtatcggcatcatccaaattgatgagccggcccttcgcgaaggtctgccgctgcgtcgttccgactgggatgcctatctgcagtggggcgttgaagcattccgtattaatgccgctgtggcaaaagacgatacccaaatccacactcacatgtgctactgcgagttcaacgacatcatggattctatcgccgcacttgacgctgacgtaattacaatcgaaacaagtcgttctgacatggaactgctggagtccttcgaagaattcgattacccgaacgaaatcggtccgggtgtttatgacattcatagcccgaacgtaccgtctgtcgagtggattgaagcgctgctgaagaaggcagcgaagcgtatcccggcagagcgtctgtgggtcaatccggattgtggtctgaaaacccgtggctggcctgaaactcgtgctgcactggctaacatggtccaggcggcgcaaaacctgcgtcgtggttaa

SEQ ID NO: 2325 - DNA, 213 bp, Artificial Sequence
  Optimized genes for E. coli.
atgaagaaagatatccacccgaaatacgaagaaatcactgcttcctgctcgtgtggcaatgtgatgaaaattcgttctaccgttggtcacgacctgaacctggacgtctgttctaaatgccatccgttcttcaccggtaaacagcgtgacgtagcgacgggcggtcgcgttgatcgctttaacaaacgtttcaacatcccaggcagcaagtaa

SEQ ID NO: 2326 - DNA, 429 bp, Artificial Sequence
  Optimized genes for E. coli.
atggcgaagaaagtgcaagcttacgtcaagctccaggttgctgccggtatggcaaacccgtcgccacctgtcggcccggcattgggtcagcagggcgtaaacatcatggaattttgcaaagcgttcaatgcgaaaactgactccatcgagaaaggcctgccgatcccggtagtgattaccgtttatgccgatcgcagcttcaccttcgtaactaagacgccgccagcagcggtgctgctgaaaaaagctgctggtatcaaatctgggtctggcaaaccgaacaaagacaaagttggtaaaattagccgtgctcagctgcaggaaatcgcccaaaccaaagcagctgatatgactggcgcagacatcgaagcgatgacccgttccattgaaggtaccgcgcgttctatgggtctggttgttgaagattaa

SEQ ID NO: 2327 - DNA, 705 bp, Artificial Sequence
  Optimized genes for E. coli.
atggcgaagctgaccaaacgtatgcgcgttatccgtgaaaaagtggatgcaactaaacagtatgatatcaacgaagcaattgcgctgctgaaagagctggcaacagcaaaattcgttgagtctgtagacgttgcggtcaatcttggcattgatgcgcgtaaatctgaccagaacgtacgcggcgcaaccgttctgccgcacggtactggtcgtagcgttcgcgtagcagtgttcacccagggcgctaatgccgaagctgctaaagcggcgggtgcagagttggtcggtatggaagatctggctgatcagatcaagaaaggcgaaatgaacttcgacgtagtgattgctagtccggacgcaatgcgtgtggtgggccagctggggcaagtgctgggcccgcgtggtctgatgccgaacccgaaagttggtacggtcacgccaaacgttgctgaagccgtgaaaaacgcgaaagctggtcaggttcgttaccgcaacgacaaaaatggtatcatccataccactatcggtaaagtcgattttgacgccgataaactgaaagaaaacctggaagcgttactggttgccctcaagaaggccaagcctactcaggcgaaaggtgtttacatcaaaaaagtaagcatttccaccaccatgggcgcgggcgtagctgttgaccaagcaggcctgtcggcttccgttaactaa

SEQ ID NO: 2328 - DNA, 498 bp, Artificial Sequence
  Optimized genes for E. coli.
atggcactgaacctgcaagacaaacaggcgattgttgctgaagtgtctgaagtcgccaaaggcgcgctgtctgcagtggtggccgatagccgcggcgtaaccgttgataaaatgaccgagctgcgtaaagcgggtcgtgaagctggtgtttacatgcgtgtagtgcgtaatacgctgctgcgccgtgctgttgaaggtactccgtttgaatgcctgaaagacgcattcgttggtccaacattaattgcttacagcatggaacaccctggcgctgctgcgcgtctgttcaaagaatttgctaaggctaacgcgaaattcgaggtcaaggccgccgccttcgaaggcgaactgatcccggcaagtcagatcgaccgtcttgcaaccttgccgacctatgaagaagcaatcgctcgcctgatggcgaccatgaaagaggcatccgcaggtaaactggttcgtactctcgcagcggtacgcgatgcgaaggaggcggcgtaa

SEQ ID NO: 2329 - DNA, 366 bp, Artificial Sequence
  Optimized genes for E. coli.
atgagcattaccaaagaccagatcatcgaagccgtcgcggcgatgtccgtgatggatgtggtagaactgatctccgcaatggaagagaaattcggtgtttctgctgctgcagcagttgcggttgctgccggtccggttgaggccgctgaagaaaaaaccgaatttgacgttattctcaaggccgcaggcgctaacaaagtggctgttatcaaagcggtacgtggtgcgactggtctgggcctgaaagaggcgaaagatctggtagagtctgcaccggcagctcttaaagaaggcgtcagcaaagatgacgcggaagcgctgaagaaagcactggaagaagctggcgcagaagttgaagtgaagtaa

SEQ ID NO: 2330 - DNA, 4029 bp, Artificial Sequence
  Optimized genes for E. coli.
atggtttatagctatacggaaaaaaaacgtatccgcaaagacttcggtaaacgcccgcaggttctggatgttccttacctgctgagtattcagctggacagcttccagaaatttatcgaacaggatccggaaggtcagtatggcttagaagctgcattccgttcagtgttcccgattcagagctactccggcaactccgagctgcaatatgtctcctaccgcctcggtgaaccggtattcgatgtccaggaatgtcagattcgcggtgttacttactcggctccgctgcgcgttaagctgcgtctggtcatctacgaacgtgaagcaccggaaggtactgttaaagacattaaagaacaagaggtgtacatgggcgagattcctctgatgacggataacggcaccttcgtaattaacggtaccgagcgtgtaatcgtctctcagctgcaccgttctccgggagtcttcttcgactccgataaaggcaaaacccacagctccgggaaagtgctgtacaacgctcgtatcattccgtatcgcggttcctggctggactttgaatttgacccgaaggataacctgttcgttcgtatcgaccgtcgccgtaaactgccggcaaccatcatcctgcgggcactgaactacaccactgaacaaattctggatttgttcttcgaaaaagtcattttcgaaattcgtgacaacaaactgcagatggaactggtaccggaaagactgcgtggcgaaacagcttcttttgatattgaggccaacggcaaggtctatgttgaaaaaggccgtcgtattaccgcacgtcacatccgtcagcttgagaaagacgacgttaaactcatcgaagtgcccgtggaatatatcgccggtaaagttgtcgcgaaggattacattgatgaatccaccggcgaactcatttgcgcagctaacatggaattgtcactggatctgctggctaaacttagccagtctggtcataagcggatcgagacgctctttaccaacgacctggatcacggtccgtacatcagcgaaactctgcgtgtcgatccgaccaacgatcgcctctctgctcttgtagaaatctatcgtatgatgcgtcctggcgagccgccgactcgtgaggcagcggagtctctgtttgagaacctgtttttctctgaagatcgttacgatctgtccgcggttggtcgcatgaaattcaaccgttccttgctgcgcgaggagatcgagggcagtggtatcttaagcaaagatgacattatcgatgtaatgaagaagctgattgatatccgtaacggtaagggcgaagttgacgatatcgaccacctgggaaatcgtcgcatacgttcggtgggtgaaatggctgaaaatcagttccgcgtaggtttagtacgtgttgaacgcgctgtgaaagagcgcctgtccctgggcgatcttgacaccttaatgcctcaggacatgatcaacgccaaaccgattagtgccgcggtcaaagagttctttggcagctcacaactgtcgcagtttatggatcagaataacccgctgagcgaaatcactcataaacgtcgtatttctgcgctgggtccgggtggcctgacccgtgaacgtgcgggctttgaagttcgtgacgttcaccctacgcactacggtcgtgtgtgcccgatcgaaacccctgaaggcccgaacattggcctgatcaactcgctgagcgtttacgcacagactaacgaatacggtttcctggaaaccccgtaccgtaaagtaaccgatggcgtggtgactgacgagatccactatttgtctgcaatcgaagaaggtaactatgtgatcgcgcaggcaaacagcaatctcgacgaagagggtcacttcgtcgaagacttggtcacctgccgttccaagggtgaatcttccttattcagccgcgaccaggtagactacatggacgtatcgacgcagcaagtggtttctgttggcgcgagcctgatcccgttcctggaacacgatgatgcgaatcgtgctctgatgggtgctaatatgcaacgccaggcggtaccaacgctgcgtgctgacaaaccactggttggcacaggtatggagcgcgcagtagccgttgactctggcgtcactgctgttgcgaaacgcggcggcgtagtacagtacgttgatgcatcacgcatcgttatcaaagtgaatgaagatgaaatgtacccgggcgaagccgggattgacatttataacctgaccaaatacactcgaagcaaccaaaacacctgtatcaatcaaatgccgtgcgtgagcctgggggaaccggttgagcgtggtgacgtactggccgatggcccgtctaccgacctgggggagcttgcgctgggtcagaacatgcgtgtagcgttcatgccgtggaacggctacaacttcgaagattccatcctggtatctgaacgtgttgttcaggaagaccgcttcactaccattcatatccaggaactggcgtgtgttagtcgcgataccaaattgggccctgaagaaatcaccgctgatatcccaaacgttggtgaagccgccctgtctaaactggacgaatcgggtattgtttacatcggtgccgaagtaactggtggagatattctggtgggcaaagttactccgaaaggtgaaacccaattaacgccagaagagaaactgctgcgtgctatcttcggtgagaaagcgtctgatgtgaaagattcatcacttcgcgtgccgaatggcgttagcggtaccgttattgatgtgcaggttttcacccgcgacggtgtggagaaggacaagcgtgcactggaaattgaagagatgcagctgaaacaagctaagaaagacctttccgaagaacttcagatcctagaggctggtctgttctcccgcattcgtgccgtactggttgctggcggtgttgaagcggaaaaactagacaaactgccgcgtgatcgctggctggaactgggtctgactgatgaagaaaagcagaaccagctggagcagctggcagaacagtacgacgaactgaaacatgaatttgaaaaaaaactggaagcgaaacgtcgtaagattactcagggcgatgatctggcaccaggcgttctgaagatcgtgaaagtttatctggcggtgaagcgccgcatccaaccgggtgataaaatggcaggccgccatggcaataaaggcgtgatttccaaaattaatccaatcgaagatatgccatacgacgaaaacggaacaccagtagacattgtgctgaatccgctgggcgttccgagccgtatgaacatcggccagatcctcgaaacgcatctggggatggcggcgaaaggtatcggtgataaaatcaacgcaatgctgaaacagcagcaggaagttgccaaattacgcgaattcatccagcgtgcgtatgatctgggtgcagacgtgcgtcaaaaagttgacctgtctacttttagtgatgaggaagtgatgcgcctggctgaaaaccttcgcaaaggtatgccgatcgctacacccgtgtttgacggcgcaaaagaagcagaaatcaaagagttgctgaaactgggcgacctgccaacctctggtcagattcgtctgtatgacggtcgtactggcgagcagttcgagcgtccggtgaccgtaggttatatgtacatgttgaagctcaaccacctggtggatgacaaaatgcacgcgcgtagcaccggttcttacagcctggttactcaacagccgctgggcggtaaagctcagtttggtggtcaacgtttcggcgaaatggaagtctgggcgcttgaagcttacggcgctgcctataccctgcaagaaatgctgacggttaaatctgacgacgttaacgggcgtaccaagatgtataaaaacatcgttgatggtaaccatcagatggaacccggcatgccagaaagttttaacgtcctgttgaaagaaatccgttctctcggcatcaatattgaactggaagacgagtaa

SEQ ID NO: 2331 - DNA, 273 bp, Artificial Sequence
  Optimized genes for E. coli.
atgaacaaaactcagctgatcgacgttatcgctgaaaaagcggaactgtctaaaacccaggcgaaagctgcgctggaatccacgcttgcagctatcaccgaatctctgaaagaaggcgatgcggtacaactggttggcttcggtaccttcaaagtgaatcaccgtgcagagcgcactggtcgtaacccgcagaccggtaaagagattaagattgccgccgctaacgttccggcgtttgtcagcggcaaagcattgaaagacgcagtgaagtaa

SEQ ID NO: 2332 - DNA, 1602 bp, Artificial Sequence
  Optimized genes for E. coli.
atgaccgaacaggcgacaacgaccgatgaactggcattcacccgtccatacggcgagcaggaaaaacagattctgacggcggaagctgtagaatttctgaccgagctggttactcacttcactccgcagcgtaacaaactgctggctgctcgcattcagcagcaacaggatatcgataacggtacgctgccggatttcatctctgaaactgcgtcgattcgtgacgccgactggaaaatccgtggtatcccggcggatctggaagatcgtcgtgttgaaatcactggtcctgtcgagcgtaaaatggttattaacgccttgaatgccaacgttaaagtcttcatggctgactttgaagatagcctggctccagactggaacaaagttatcgacggccaaatcaacctgcgcgacgctgttaacggcacaattagttataccaacgaagccggtaaaatttatcagctgaagccgaacccggcagtactgatctgccgtgtacgcggcctgcatctgcccgagaagcacgtaacctggcgtggtgaagcgattccgggatcgctgtttgattttgctctgtatttcttccataactaccaggctttgctggcgaaaggttctggcccgtacttctacctgccgaaaactcagtcctggcaagaagccgcctggtggagcgaagttttctcctatgccgaagaccgttttaatttaccgcgcggtaccatcaaagctacgctccttattgaaacccttcctgcggtcttccagatggacgagatcctgcacgcgctgcgtgatcacatcgttggtctgaactgcggtcgctgggattacatcttctcttatatcaagacgctgaaaaactatccggaccgggtgctgcctgaccgccaggcagtgaccatggataaaccgttcctgaacgcttactcccgcctgctgattaaaacctgccacaaacgtggcgcgtttgcaatgggcggcatggcagcatttatcccatcaaaagatgaggaacacaacaaccaggttctgaataaagtgaaagcagacaaatccctggaagctaacaatggtcacgacggtacttggatcgctcatccgggcctcgccgataccgcgatggcggtgttcaacgacatcctcggcagccgtaagaatcaacttgaggtgatgcgcgaacaagatgcgccgattactgctgatcaactgctggcaccgtgtgatggcgaacgtactgaagaaggtatgcgtgcgaacatccgcgtggcagttcagtacatcgaagcatggattagcggcaacggctgtgttccgatctacggtctgatggaagacgcagcaaccgctgaaatttctcgcaccagcatctggcagtggattcatcaccagaaaaccctgtctaatgggaagccagtaactaaggcactgttccgtcagatgctgggtgaagaaatgaaagtaattgcctccgagttaggggaagagcgtttcagccagggccgctttgacgatgctgcgcgtctgatggagcagatcaccacctctgacgaactgatcgacttcctgactcttccgggttaccgtctgttggcgtaa

SEQ ID NO: 2333 - DNA, 1305 bp, Artificial Sequence
  Optimized genes for E. coli.
atgaaaacccgtactcagcagattgaagagctgcagaaagagtggacccagccgcgctgggaaggtattacccgcccatacagcgcggaagatgtggtcaagctgcgtggcagcgttaacccggaatgtactcttgcacagctgggtgcggctaaaatgtggcgtctgctgcacggtgaatccaagaaaggctacatcaattctctgggcgcgctgaccggtggtcaggctctgcaacaggcgaaagcgggcattgaggctgtttatctgagcggctggcaggttgcggcggatgctaacctggctgcttccatgtacccggatcagagcctgtaccccgccaattccgtacctgcggttgttgaacgtatcaacaacaccttccgccgcgccgatcaaattcagtggtcagcagggatcgaaccgggtgacccgcgttacgttgattacttcctgccgatcgttgctgacgctgaagctggcttcggtggcgtactgaacgcgtttgaactgatgaaggcgatgatcgaagcaggtgcagccgccgttcacttcgaagaccagcttgcttctgtgaaaaaatgcggtcatatgggcggtaaagtgctggtaccaacgcaagaagcgattcaaaaactggtggcagcacgcctggcagcggacgtgactggcgttccgactctcctagtcgcccgtaccgatgccgacgcagctgatctgatcacctctgactgcgatccgtacgactccgaatttattacgggggagcgcaccagtgagggtttcttccgtacacatgcaggcatcgagcaggcaatctcccgtggtctggcttacgctccgtatgcagacttagtctggtgtgaaacctccaccccggacctggaactcgcgcgtcgtttcgctcaggccattcatgcgaagtatccgggcaaattgctggcatacaactgctcgccatcgtttaactggcaaaagaatctggatgacaaaactattgccagcttccagcaacaactgtctgatatgggttacaaattccagtttatcactctggctggtatccactctatgtggttcaacatgttcgacttggcgaacgcctatgcgcagggcgaaggcatgaaacactacgtagaaaaagttcagcagcctgagtttgctgctgcaaaagacggttatacctttgtttctcaccagcaggaagtgggcacaggatattttgataaagtcaccaccatcatccagggtggtacttctagtgtaacggcactgacgggctcaactgaagaaagccagttctaa

SEQ ID NO: 2334 - DNA, 294 bp, Artificial Sequence
  Optimized genes for E. coli.
atgaacatccgtccgctgcacgatcgcgtaattgtgaaacgtaaagaggtcgaaaccaaatccgcaggtggtatcgttctgaccggttccgcagctgccaagagcactcgtggtgaagtgctggctgttggtaatgggcgcattctggaaaacggcgaagttaagccgctcgacgttaaagtgggcgatatcgtcattttcaacgatggctacggcgtaaaatctgaaaaaatcgacaacgaagaagtactgatcatgagcgagtctgacatcctggcgattgttgaagcgtaa

SEQ ID NO: 2335 - DNA, 951 bp, Artificial Sequence
  Optimized genes for E. coli.
atgtctgacatcagcaaagcgtcgctgccgaaagcaattttcctgatgggtccgactgcttctggcaagacagcattagctatcgagctgcgcaaaattctgcctgtggaactgatttccgttgactcggccctgatctacaaaggtatggatattggtactgcgaaaccaaacgcggaagaattgctggcggcgccgcatcgtctgcttgatatccgtgatccgtcccaggcttacagcgccgcagacttccgtcgtgacgcgctcgcggagatggctgacatcaccgctgctggccgcatcccgctgctggttggcggtaccatgctgtacttcaaagctctcttagagggcctgtcccccctcccaagtgccgatcctgaagtccgcgcccgtatcgagcagcaggcggccgagcagggctgggaaagcctgcaccgtcaactgcaggaagtcgatccggtagctgcagcgcgtattcacccgaacgacccgcagcgccttagccgtgctctggaagtgttcttcatctccggtaaaacgctgaccgagctgactcagaccagcggcgacgcacttccatatcaggttcatcagtttgcaatcgctccggcatcccgtgaactgctgcaccagcgtatcgaacaacgtttccaccaaatgttggcctcagggtttgaagctgaagttcgtgcgctgtttgctcgtggtgacctgcataccgatctgccgtctattcgctgtgtgggttatcgccagatgtggtcttatctggaaggtgaaatctcttacgacgaaatggtttaccgcggcgtatgcgcaactcgtcagctggcaaagcgtcagattacctggctgcgtggctgggaaggcgttcactggctggattctgaaaaaccggaacaggcacgcgatgaagtactgcaagtggttggtgcgatcgccggttaa

SEQ ID NO: 2336 - DNA, 309 bp, Artificial Sequence
  Optimized genes for E. coli.
atggcgaaaggtcagtctcttcaggatccgttcctgaatgctctgcgtcgtgaacgcgtgccggtatctatctacctggttaacggtatcaaactgcaaggccagatcgaaagctttgaccagttcgtgattctgctgaaaaacaccgtatcgcagatggtttataagcatgccatttccaccgttgtcccaagccgtccggtttctcaccactctaacaacgcgggtggtggcacgagctccaactaccatcacggcagctcagcacaaaatactagtgctcagcaggactccgaagaaaccgagtaa

SEQ ID NO: 2337 - DNA, 396 bp, Artificial Sequence
  Optimized genes for E. coli.
atgcgtcactacgaaatcgtcttcatggtacatccagatcaaagtgagcaggttcctggtatgatcgaacgttacaccgcagcgattactggcgcagaaggtaaaattcaccgtctggaagactggggccgccgtcagcttgcttatccgatcaacaaactgcacaaggcacattatgtgctgatgaacgttgaagcgccgcaggaagttatcgacgaactggagacgaccttccgtttcaacgacgcggtgattcgttccatggtgatgcgcaccaaacacgctgtaactgaagcttctccgatggttaaagcgaaagatgagcgtcgtgaacgccgcgatgattttgccaatgaaaccgccgatgacgctgaagcaggcgacagcgaagagtaa

SEQ ID NO: 2338 - DNA, 315 bp, Artificial Sequence
  Optimized genes for E. coli.
atgaccaaccgtctggttctttctggcacggtttgccgtgctccgctgcgtaaagtgtcgccaagtggtatcccgcactgtcaatttgtactggaacaccgttctgtacaggaagaagccggtttccatcgccaggcatggtgtcagatgccggttattgtcagcggccatgaaaaccaggctattactcactctatcaccgtgggttcacgcattaccgttcagggcttcatctcctgccacaaggcgaaaaatggtctgagcaaaatggtgctgcacgcggagcaaatcgaactgatcgactccggcgattaa

SEQ ID NO: 2339 - DNA, 228 bp, Artificial Sequence
  Optimized genes for E. coli.
atggcacgctacttccgtcgtcgcaagttttgccgtttcactgctgaaggcgtgcaggaaatcgactacaaagatatcgcaacgctgaaaaactacatcaccgagtctggtaaaattgttccgtcccgcattaccggtactcgtgcgaaatatcagcgtcagctggcgcgtgctatcaaacgcgcccgttatctcagcctgctgccgtacaccgaccgtcaccaataa

SEQ ID NO: 2340 - DNA, 387 bp, Artificial Sequence
  Optimized genes for E. coli.
atgagcaaaaccatcgccactgaaaacgcgcctgcagctatcggtccgtatgttcagggcgttgatctgggcaacatgatcatcaccagtggtcagattccggtaaacccgaagactggtgaagtgccagctgacgttgctgcccaagctcgtcagtctctggataacgttaaagcgattgttgaagcggcaggtctgaaagtgggcgatatcgttaagacaacggtctttgtcaaagacctgaacgactttgcgaccgttaatgcgacttacgaagcattcttcaccgagcacaatgcaaccttcccggcacgttcctgcgtggaggtagcgcgtctgccgaaagatgtgaaaattgaaatcgaagccattgctgtacgccgctaa

SEQ ID NO: 2341 - DNA, 936 bp, Artificial Sequence
  Optimized genes for E. coli.
atggcgaacccgctgtatcagaaacacatcatcagcatcaacgacctgtcgcgcgatgatttgaatctggtgttagccaccgctgctaaactgaaagctaatccccaaccggaactgctgaagcacaaagttattgcgtcctgcttctttgaagcatcaacgcgcacccggttgagcttcgaaacctctatgcaccgcctgggcgcaagtgtagttggcttttcggactccgctaacaccagcctcggtaaaaaaggcgaaacgctggctgacaccatttctgtgatttccacttatgtcgacgctatcgttatgcgtcacccgcaggaaggcgccgctcgtctggcgaccgagttctccggtaacgttccggttctgaatgcaggcgacggttccaaccagcacccaacgcaaacactcttagatctgttcactattcaggagacccagggccgtctggataacctgcacgttgcgatggttggtgatcttaagtatggtcgtactgtacattctctgactcaggcacttgcgaaattcgacggcaatcgtttctactttattgctccggatgcgctggcaatgccacagtacatccttgatatgctggacgaaaaaggtatcgcctggagcctgcactcttctatcgaagaagtgatggctgaagttgatatcctgtacatgacccgcgtacaaaaagagcgcctcgatccgtctgaatacgcaaacgtgaaagcgcagttcgtactgcgtgcgagcgacttgcataacgcgaaggccaacatgaaagtgctgcatcctctgccgcgtgtcgatgaaatcgcaaccgacgttgacaaaactccgcatgcatggtacttccagcaggcggggaacggtatttttgcccgtcaggctctgctggcactggtactgaaccgtgacctggtcctgtaa

SEQ ID NO: 2342 - DNA, 417 bp, Artificial Sequence
  Optimized genes for E. coli.
atggctaacccggaacagctggaggagcagcgtgaagaaacgcgcctgatcatcgaagagctgctggaagacggtagcgacccggatgcactgtacaccatcgagcatcacctctccgcagatgacctggaaacccttgagaaggctgccgtagaagcgttcaaactgggttacgaagtgactgacccagaagaactggaagttgaagatggcgatatcgtcatttgctgcgacattctgtctgaatgtgcgctgaatgccgatctgattgatgcgcaggttgagcaactgatgactctggctgaaaaattcgacgtggaatacgacggctggggcacctattttgaagatccgaacggtgaagatggtgatgatgaagacttcgttgacgaagacgacgatggcgtacgtcactaa

SEQ ID NO: 2343 - DNA, 954 bp, Artificial Sequence
  Optimized genes for E. coli.
atgaccgacaagttaacctcactccgtcagtacacaactgtagttgcagatactggtgatattgcagcgatgaaattgtaccaaccgcaggacgcgacaacaaacccatctctgattctgaatgccgctcagattccagaatatcggaaactcatagatgatgcagtggcatgggcgaaacagcagtctaacgatagagcgcagcaaatcgtggatgcgactgataagcttgccgttaacattggtctagagatccttaagcttgttccaggccgcatatccacagaggtggacgctaggctttcatacgatacagaagccagcatcgccaaggcaaaacggctaataaaactttataatgatgccggcattagtaacgataggatactcatcaaactcgcgagtacctggcaaggtattagagcagccgaacaactcgagaaagaaggaatcaactgcaacttgacattgctcttctcatttgcacaggcccgcgcttgtgcggaagcgggcgttttcttaatttccccctttgttggtcgcatacttgattggtacaaagccaatacagacaaaaaggagtatgcgccagctgaggatccaggggtagtcagtgtctcggaaatataccaatactataaagaacatgggtatgagacagttgtgatgggcgcgtcctttcgaaatatcggggaaatactagagctagcaggatgcgatcggctgacaatagctccggccttacttaaggagctagcggaatcggagggggcgattgagcgcaagttgtcatatacgggagaggttaaagcgaggccagcgcgaatcaccgagtcggagtttctatggcagcataatcaagacccaatggcagtcgataaacttgccgagggtatcagaaagtttgcaatcgaccaagagaagcttgaaaaaatgattggggacctactttag

SEQ ID NO: 2344 - DNA, 1917 bp, Artificial Sequence
  Optimized genes for E. coli.
atggggaagataattggcatagatttggggaccacaaacagctgtgtggcgatcatggacggcacgacaccaagggttctagaaaacgcagaaggtgaccgcactacgccaagtataatagcgtatactcaagatggtgaaacactggtcggccagcccgctaaaaggcaagcagtcacaaaccctcaaaacacgctctttgctattaaacgtttaattggtcgtaggttccaagacgaagaagtacagcgggatgtgtccattatgccgtttaaaattattgctgcagacaacggcgacgcatgggtggaagttaaaggacagaaaatggctcctccacagatcagtgcagaggttctcaaaaaaatgaaaaagactgctgaggattatctgggggaacccgtgaccgaggccgtgattaccgtccctgcatacttcaatgacgcccagagacaggcgactaaagacgccgggaggattgccggcttggaagtaaagcgtattattaatgaacccaccgctgcagcattagcgtatgggttagacaaaggcactggaaatcgaacaatcgctgtttacgacttgggaggaggtacgtttgatattagtatcatagagatagacgaggtcgatggcgaaaaaacatttgaggtacttgctaccaacggtgacacgcatctgggaggcgaggacttcgattcccgtttaattaattaccttgtcgaggagtttaagaaggatcaaggaatcgaccttcgcaatgatcctttggcgatgcaacggttaaaggaggcggcggaaaaggctaaaattgagctctcctcggctcagcaaacggatgttaacctgccctatattacggcggacgcaacgggccccaaacacatgaacattaaggtaactcgtgccaagttagagagcctcgtggaggatttagtcaaccgttcgattgagccgctgaaggtcgccttgcaagatgcgggactgtcagtttctgacatcgatgatgtgatattggtaggtggccagacgcgtatgcccatggtccaaaaaaaggtggctgaatttttcggcaaggaaccgcggaaggacgtgaaccctgatgaagcggtcgctataggagctgccgttcaagggggagtactgaccggcgatgtaaaagatgtgctgctactcgacgtcactcctctaagtctaggtattgagacaatgggaggcgtaatgacgactttaatagctaagaacacaaccattccgacgaaacattcacaagttttctcgaccgcagaggataatcaatctgccgtaacaatccacgtcttgcaaggggaacggaaacgggccgcggacaacaagtcgttgggtcaattcaatttggacggtatcaaccccgctccaagaggaatgcctcagattgaagttactttcgacatcgatgcagatggtatattacatgtatctgctaaggacaaaaactctgggaaggaacagaaaataacgatcaaagcttcatccggcttaaatgaggatgaaatacagaaaatggtccgagacgctgaagctaacgctgaggccgatcggaaattcgaggagctcgtccagacgcgtaatcagggcgaccatctgttgcactcaactcgaaaacaggtagaggaggcgggggacaagttaccagcggatgataagacagcgatagagagtgctctaaccgccctggagacggcgttgaagggggaagacaaggcggcaattgaagcaaagatgcaagagctagcccaggtgagtcagaaactaatggaaatcgctcaacaacaacatgcccaacagcaaaccgcgggagctgatgcaagcgctaacaacgctaaagatgacgatgtcgtagatgccgagttcgaggaggtgaaggataagaaatga

SEQ ID NO: 2345 - DNA, 1152 bp, Artificial Sequence
  Optimized genes for E. coli.
atgtttgaaccgatggagctaacgaacgacgctgttatcaaagtgattggagtaggaggtggagggggaaatgcagtagagcatatggtacgggagagaatagagggggttgagttttttgctgttaatacggatgcacaagctttgcgcaagactgcagttgggcaaacgatccaaataggaagtggcatcactaaagggctaggcgccggtgcaaaccccgaagtggggcgaaatgcagcagatgaggaccgagacgcccttcgagcagccctggaaggagccgatatggtattcattgccgcgggcatgggagggggaaccgggaccggtgcggccccggtcgttgccgaagtggctaaagacttaggtatcctaactgttgcggtagttactaaacctttcaatttcgaaggcaaaaaacgaatggccttcgctgagcaggggatcacagagttatcaaagcacgtagattccctaataactatccctaacgacaaattactaaaggtcctcggcaggggaattagcttacttgacgcgtttggtgctgccaatgatgtactgaagggagcagtccaggggattgctgaattaattacgaggcccggattaatgaatgtagatttcgctgatgtccgtacggtaatgtccgaaatgggatatgctatgatgggtagtggcgtagcatcaggggaggatcgtgcggaagaagctgccgagatggcaatttcgtcaccattactggaggacattgatcttagcggcgccaggggggttctagtaaacatcacagcggggttcgatctgcgcctcgatgaattcgaaacggtcggaaatactatccgtgctttcgccagtgataatgctactgttgttatcggcacgagtctagacccagatatgaacgatgagttgcgagtcactgttgtcgcgaccgggataggcatggacaagcgccccgagataacgttggttacgaataaacaagttcaacagccagtgatggatcgatatcagcaacatggcatggctcccctcactcaggaacaaaagccagtagctaaggtcgtgaacgataacgctccgcaaaccgctaaagaacctgattatctagatatcccagcattcctccgcaagcaggccgactga

SEQ ID NO: 2346 - DNA, 2664 bp, Artificial Sequence
  Optimized genes for E. coli.
atgtcagaacggttccccaacgatgtcgacccgatcgaaacccgggattggctacaagcaattgaatcagttattagggaggagggcgtcgagcgcgcgcaataccttattgaccagcttctagcagaagcccgtaaaggcggggttaacgtagccgctgggaccggcatttcaaactatataaatacgattcccgtggaagaacaacctgagtatccgggcaatctcgagctcgagcgtcgaatccggtccgccatcagatggaacgcgatcatgacggtacttcgggcgtcaaagaaggatttagaactgggtggccacatggcgtccttccaaagttcggctacaatttatgatgtgtgttttaaccatttcttcagggcccgtaatgaacaggatggaggggatctcgtttatttccaggggcacataagtccaggagtgtacgccagagcatttttggaagggcggcttactcaagagcaattagacaatttccggcaggaagtacatgggaacgggctttcatcttatccacacccaaaattgatgcctgagttctggcaatttccgactgtctcaatgggccttggcccaattggtgctatttatcaagcaaagtttcttaaatatctcgaacaccgcggcctaaaggacacctccaagcagacggtgtacgcattcttgggagacggggagatggatgaaccagaatcgaagggagccatcacgattgcaacacgagagaagctagacaatctagtgttcgtcatcaactgcaatctgcagagactggacggccctgtgaccggtaacggcaagataatcaacgaactggaagggatttttgagggagctggatggaacgtcattaaggttatgtggggtagccggtgggacgagctcttgaggaaagacactagtgggaagcttattcaacttatgaatgagaccgtcgacggagattaccagacgtttaagtcaaaggacggagcatatgtacgcgaacacttctttggcaaatacccagagaccgcggcgctcgttgctgactggacagatgagcagatctgggcgctgaaccgagggggacatgatcctaaaaagatctacgccgcctttaagaaagcacaggaaacaaagggaaaagcgacggtaattctcgctcataccataaaagggtatggtatgggggatgcggccgagggtaaaaatatcgcgcatcaggtaaagaagatgaatatggatggagtccggcacatacgtgaccgcttcaatgtcccagtatctgatgcagatatcgaaaaattaccctatattactttcccagaaggctcggaggagcatacttacctgcatgcacagaggcaaaagttacatgggtacttgccctctcgccagccaaacttcactgagaagctagaacttccgtcactacaagacttcggggcgttattagaggaacagtcaaaggaaattagcactactatagccttcgtgcgggccttgaacgtcatgttaaaaaataaatccattaaggaccgcctggtgccgatcattgctgacgaagctcgcacctttggtatggagggactgtttcgccaaattgggatatattcgccaaacgggcagcaatatacgccccaagaccgcgagcaggtcgcttattataaagaagacgagaaaggtcagattcttcaggaggggatcaacgagcttggcgcggggtgcagttggttagcggcggccacctcctattccactaacaatctaccgatgattccgttctatatctactacagcatgttcggtttccagcggataggagacctctgctgggcggccggcgaccaacaagctcgcgggttcctcattggcggcacgtcggggcgaacgactctgaatggagaaggcctccagcacgaggatggccactcacatatacagagtctaacaatacctaactgtattagctacgacccagcgtatgcttacgaagtagctgtaatcatgcacgacggtttggagaggatgtacggggaaaagcaagaaaacgtgtattattacattaccaccttgaacgagaattaccacatgccggctatgcccgaaggtgcggaggaaggaatacggaaaggtatatacaaactcgaaaccattgagggaagcaagggaaaggtacaactcttaggatcagggagtatactccgtcacgtgcgagaggcggctgaaattcttgcaaaggactacggcgtcggttcggacgtatattcagttacaagttttacagagctcgctagggatggccaggattgtgaacgttggaacatgttacacccattagaaacacctcgtgtcccgtatatcgcccaagtcatgaacgacgcacctgcggttgcttccaccgactacatgaagctcttcgcagagcaagtaagaacatacgtcccagctgatgactacagggttctggggaccgatggattcggcaggtccgattctagagagaatctccggcaccattttgaagttgacgcctcatatgtggtagtcgcagcgttaggtgagttagcgaaacgtggggaaatagacaagaaggtggtggcagacgcaatagcaaagttcaacatcgacgctgacaaagtgaatcccagattggcctag

SEQ ID NO: 2347 - DNA, 1893 bp, Artificial Sequence
  Optimized genes for E. coli.
atggccatcgaaatcaaggtcccggatatcggggcagacgaggtcgagataacggaaattcttgtaaaagttggggataaagttgaagccgaacagtctcttatcacagtggaaggagacaaagcttctatggaggtccctagccctcaagctggtatcgtcaaagaaataaaagtatcagttggggacaaaacacagacaggcgctctcattatgattttcgacagtgcggacggagctgccgatgcggcaccagcccaggcagaagaaaaaaaagaagcagcccctgcagcagcgccagccgctgcggctgccaaagatgtaaatgtccccgatataggttctgatgaggtcgaggttaccgaaatcctggtcaaagtcggcgataaagttgaggcagaacagagcctgattaccgtagagggtgacaaagcctctatggaagtaccggcgccgtttgccggcacagtgaaggaaatcaaggtgaacgtgggggataaagtatctaccggctccctgattatggttttcgaggttgcgggggaggccggggcggctgccccagcggccaagcaggaagccgctccagccgctgcccctgcaccagcagccggcgtaaaagaggtgaacgttcctgacataggcggcgatgaggtggaggtcacggaagttatggttaaagtcggcgataaagtagcggcggaacagtccttgattacggtcgagggggataaggcgtctatggaagtgccggctcccttcgcgggtgttgtcaaagaacttaaagtcaatgtaggggataaggttaaaaccggaagtctcatcatgatttttgaagtggaaggggccgcaccggccgcggcgcctgctaagcaggaggccgccgctcctgcgcctgctgcaaaagcggaagcgcctgcggcagctcctgcagcaaaggcggagggaaagagcgaattcgcagagaacgacgcctatgttcacgccactcccctcatccgccgattggcacgggagttcggggtcaatctcgctaaagtcaaagggacgggccgtaagggccggatcttaagggaggatgtccaggcttacgtcaaggaagctattaaaagagcggaagctgctccagctgccacggggggggggataccaggcatgctgccttggcccaaggttgacttttcaaagttcggcgagatcgaggaggtagagctgggtagaattcaaaaaatatcgggtgctaacttatctcgtaattgggtaatgattccgcatgtaacgcactttgacaagacagatatcacagagctagaagcgtttcgtaagcaacagaatgaagaagcagcgaaaaggaagctagatgtaaagataacgcccgttgtcttcataatgaaggctgttgcagcagccctagaacaaatgcctaggtttaactcttccctcagtgaggatggccaaagactgacccttaaaaagtacattaatatcggggttgcagtagatacacccaacgggcttgttgttccagtgttcaaagacgtgaataagaagggaataattgagctttcccgagagctcatgactatttctaagaaagctagggacgggaaacttaccgcgggagaaatgcaaggaggctgttttacgataagttcaataggtggcctgggaacaacgcatttcgcgcccatagtgaacgcgccagaggtggcgatactaggtgtgtccaaatccgcaatggaaccagtgtggaacggaaaagagtttgtgccacgactaatgttgcccatcagcctcagtttcgaccatcgtgtcatcgatggtgcggacggagcacggttcataacgattatcaataatacattgtccgacataaggagattagtgatgtga

SEQ ID NO: 2348 - DNA, 1425 bp, Artificial Sequence
  Optimized genes for E. coli.
atgagtaccgagatcaagactcaagtagtggtactaggagccggacccgcaggctatagcgccgcctttaggtgcgccgacttggggttggagacggtgatcgtagaaaggtacaatacattgggaggggtgtgcctaaatgtaggctgcatcccttccaaggctctactacatgtggccaaggtgatagaggaagcaaaggcccttgcggagcatgggatcgttttcggggagccaaagactgacatagataaaatacgaacatggaaggagaaagtcataaatcagctaactggtggattagctggaatggcgaaaggccgaaaggtaaaagtagtcaacgggcttggtaagtttaccggcgctaacacgttagaggtggaaggggaaaatggtaaaacagtaataaattttgacaatgcgattattgcggctggctcacgtcctattcagttaccatttattccacatgaagatccccgtatttgggactctaccgacgctctagaactgaaagaggtccctgaaagactgctagtaatggggggagggataatcggtcttgagatgggcaccgtatatcatgcactcgggagccagattgatgtagtagagatgtttgaccaggtaatccccgccgctgataaggacatagtgaaagtgttcacaaaacgcatatcgaaaaagttcaatctgatgcttgaaacaaaagttactgcagtcgaggcgaaggaagacggtatttacgtcacgatggagggtaaaaaagctcccgcagaaccgcagaggtatgatgccgttttagttgcaattggtcgggtgccaaacgggaaaaacctcgacgccggaaaggccggagtagaagtcgatgaccgtgggtttatccgcgtagacaaacaattacgcactaacgtgccccatatatttgcgatcggcgacatagtaggacagcccatgttggcgcacaagggcgtccatgagggtcacgtggccgcagaggtcatcgccggcaaaaagcactacttcgatcccaaggttattccgtcaatagcgtacactgagcccgaggtcgcatgggtgggactcactgaaaaggaggctaaggaaaagggcatcagctacgaaactgctacatttccctgggcagcatccggtcgagctatcgcgtcagattgtgcggacggaatgacgaaattaatttttgacaaggaaagtcatagggtaatcggaggagcgattgttggcactaacggaggcgagttacttggcgagattggtctagccatcgagatgggatgtgatgctgaagatattgctctgaccatccacgcacatccaactctccatgagagtgtaggtttggccgctgaggtctttgagggttcgattaccgatttacctaacccgaaagcgaagaaaaagtga

SEQ ID NO: 2349 - DNA, 663 bp, Artificial Sequence
  Optimized genes for E. coli.
atgaaggatattgatacactgatttcaaataacgcactctggagcaagatgttagttgaagaggacccggggttttttgaaaaattagcgcaggctcagaagccacggtttttgtggataggttgttcagactctcgggtgcccgcagaacgactcaccgggttggagccgggcgaacttttcgtgcacagaaacgtggcaaaccttgtgatccacaccgacctcaactgtctttcagttgtacaatatgcagtagatgtcttagaagtagagcacataattatatgtggacactatggatgtgggggggtccaggccgcagttgagaatcccgagttggggttaatcaacaactggcttctccatattagggatatctggttcaagcacagctctttactcggagaaatgccccaagaaagacgtttggacacgttatgcgaattgaatgtgatggaacaagtatataatctgggtcacagcacaatcatgcaatctgcttggaagcggggtcagaaagttactatccatggatgggcctatggaatccatgatggactattacgtgacctcgacgttacagcgacgaatcgcgagacattggaacagcgttatcgacatggtatctcgaacttaaagttaaagcatgccaatcacaagtag

SEQ ID NO: 2350 - DNA, 726 bp, Artificial Sequence
  Optimized genes for E. coli.
atggccacggtcagtatgcgcgacatgttgaaggccggtgttcacttcggtcatcagacgagatattggaacccgaagatgaagccgtttatattcggtgcccgaaacaaggtacacatcattaacttagaaaagacggtccccatgtttaatgaggcgctagcagaattgaataaaatagctagtcgcaaaggcaagatacttttcgtaggcaccaaaagagccgcgtcagaggctgttaaagatgccgccctttcctgcgatcagtttttcgtgaatcataggtggttgggcggaatgcttacgaactggaaaactgttaggcagtcgatcaaacggttgaaagacctagaaactcaatcacaagacggtacttttgataaactgactaagaaagaagccctgatgcggactcgagagctggagaaactcgagaacagccttggggggataaaggacatgggaggactccctgatgcacttttcgtgatagatgccgatcacgagcacatcgcaattaaagaggcgaataatttgggcatacccgtgttcgctattgtcgacactaattctgacccagatggggtagactttgtgatccccggtaacgatgacgccatacgggcggtaacactttacttaggagcagtcgcggcaacggtacgcgaaggtcgaagccaggacctagcatcacaagcggaagagagtttcgttgaggccgaataa

SEQ ID NO: 2351 - DNA, 852 bp, Artificial Sequence
  Optimized genes for E. coli.
atggctgagatcacagcgtcactggttaaggaactacgggagcgcacaggggctggcatgatggactgcaaaaaagcgcttactgaagcgaatggggatatcgagctagccatagagaacatgcgtaagtctggtgcaattaaggcagctaaaaaggctgggaatgtagcagcggacggggtaatcaagacgaagattgacgggaattacggaatcatactagaagttaactgtcagaccgacttcgttgctaaggatgctgggttccaggcattcgcagacaaagtgttggacgctgcagtggctgggaaaattacagacgtcgaagtactaaaggcgcagttcgaagaggaacgtgtcgctcttgttgccaaaataggcgaaaacataaatattagacgagtcgcagctctagagggcgacgtacttgggtcctaccagcatggagcccggattggggtgttagttgccgccaaaggtgcggatgaggaactagtcaaacacatcgcgatgcacgtagctgcatctaaacccgaattcatcaaacccgaagacgtcagcgcggaggtcgtcgagaaggaataccaggttcaactggatatcgccatgcagagcgggaagcccaaggaaatcgcagaaaagatggttgagggtcgaatgaaaaaattcactggcgaagtctcactaacaggccagccatttgtcatggagccgagtaaaactgttgggcaattgttaaaagaacataacgcggaggtcactggatttatccgatttgaggtcggggaggggatagagaaagtcgaaactgactttgctgcagaagttgcagcaatgagtaaacagagttga

SEQ ID NO: 2352 - DNA, 1026 bp, Artificial Sequence
  Optimized genes for E. coli.
atgccatcaattaggctggccgacctagcacaacaactagatgcagaactccacggtgacggcgatatagtcataacaggggtagctagcatgcagagcgcacagaccggacatattactttcatggtcaacccaaaataccgggagcatttaggtctttgccaggcttcggcggtcgtaatgacacaagacgatctcccctttgcgaaatccgccgcactagtcgtaaagaatccttacctgacatacgcacggatggctcaaatcctggacacgactccacaaccggctcagaatattgcaccttcggccgtgatagacgctactgcaaagttgggtaataatgtatcgatcggcgccaacgcggtgatcgaatccggagtagaactcggggataatgtaataattggcgctgggtgctttgttggcaagaactctaagataggcgctggttcccgactttgggctaacgtaacaatataccatgaaatccagattggacaaaactgcctaatccagtctggtaccgtggtaggcgctgacggttttggttatgccaatgaccgaggtaattgggtgaagataccacagatcggcagggtaattattggtgatagagtagagataggcgcatgcactactatcgatcggggcgcgctggatgatactataatcggtaacggcgtgattatagataaccagtgccagattgctcacaacgtagtgataggggataacacagctgtggcgggcggagtgataatggctgggtccctcaagatcggtcgttactgtatgatcggtggagcctctgttattaatgggcacatggagatctgcgataaagtgaccgttactgggatgggaatggtgatgaggcctatcaccgaacctggcgtgtattcgtccggtatacctttacaacctaacaaagtctggcgtaagacagccgcattagtgatgaacatagacgatatgagcaaacgacttaaatccttggaacgaaaagttaatcaacaggactag

SEQ ID NO: 2353 - DNA, 816 bp, Artificial Sequence
  Optimized genes for E. coli.
atggctttcaaatttaagacttttgcagccgttggggcgttgatcggatcccttgccctagtagggtgcggacaggacgagaaggaccccaaccatattaaagtgggggtaatcgtaggggcggagcagcaggtagccgaggtcgcccaaaaagtcgccaaagacaagtacgggctcgacgtggaactagtgacgtttaatgactatgtcctgccgaatgaagcgttgtctaaaggggacatcgacgctaatgcctttcagcataaaccctacttggatcagcaactaaaggaccgtggctataagttagttgcggtcgggaacaccttcgtgtatcccattgcagggtattccaaaaagataaagtcgctcgacgaacttcaggatgggagtcaggttgcggttcccaacgacccgacaaacctcggacgctcccttcttctgctgcaaaaagtgggactgatcaagttaaaggatggcgtcgggcttttacccactgttctagacgttgttgaaaacccgaagaacctcaagatcgtggagctagaagctccgcaactgccccgctctttagatgacgcacaaatagcactggccgtgatcaataccacgtatgcgtctcagatcggtctcacacccgccaaagatggtattttcgtagaggacaaggagagtccgtatgtcaacttaatcgtaacgcgggaggacaataaagacgcagaaaacgttaaaaaattcgttcaggcctaccaaagcgacgaggtgtatgaagcggctaacaaagtgtttaacggaggggcagtcaaaggatggtag

SEQ ID NO: 2354 - DNA, 474 bp, Artificial Sequence
  Optimized genes for E. coli.
atgggccgcataagctccggaggcatgatgtttaaggccataacgacagttgcggcgctcgtcatcgcaacgtccgcgatggcccaggacgatctcaccataagcagtctagcgaagggggagaccacaaaagcagcatttaaccagatggttcagggacataagctgcccgcgtgggtcatgaaaggcggtacgtatacgccggcccagacagtcacccttggagacgaaacttatcaggtcatgtctgcctgtaaaccacatgattgcgggagccaaaggattgcggtgatgtggagtgaaaagtcgaatcaaatgacaggcttattcagcacaatagatgaaaaaaccagccaggaaaagttaacctggctcaacgtcaacgatgcgttgtcaatcgatggcaagaccgtactctttgccgcactaaccggatctcttgaaaaccatcctgatggtttcaactttaaatag

SEQ ID NO: 2355 - DNA, 333 bp, Artificial Sequence
  Optimized genes for E. coli.
atgtcgttcttcatatcagatgcagttgctgcaaccggcgctccagcacaagggtcgccaatgtctctcatactcatgctggtggtttttggcctgattttctacttcatgattctacgtccccaacaaaagcggaccaaggagcataagaaattaatggacagcatcgctaagggcgatgaggtcttaacaaatgggggactagtgggtcgcgttaccaaagtggcggagaatggctacattgctattgcgttgaatgatacaacagaagttgttatcaagagagatttcgtggcagcggttcttccgaagggtacaatgaaagcactgtag

SEQ ID NO: 2356 - DNA, 645 bp, Artificial Sequence
  Optimized genes for E. coli.
atgcggattatcctattaggtgcgccaggtgccggcaaggggacccaagcacaattcattatggaaaaatatggtatcccgcaaatatcaacaggagacatgttgcgggcagcagtaaagtcgggttccgagttgggaaaacaagcaaaggacatcatggatgcaggaaagttggtgacagatgaattggtgatagcactggtcaaggaacggatcgctcaggaagactgtcgaaacggtttcctcctggatggatttcctagaaccataccgcaggcagatgcgatgaaggaggcaggcatcaacgttgattacgtccttgaattcgacgtgcctgacgagctgatagttgaccggatagtagggagaagggtacatgctccgtctggacgcgtgtaccatgttaagtttaaccctcccaaagttgagggaaaggatgatgttaccggggaagaacttactacacggaaggatgaccaggaagagacggtgaggaagaggcttgtggagtatcatcaaatgacagcgccattaatcgggtattattctaaggaggcagaagctggtaacactaagtacgcaaaggttgacgggacaaaacctgtcgccgaggtccgcgcggacctagagaagatcctgggttaa

SEQ ID NO: 2357 - DNA, 495 bp, Artificial Sequence
  Optimized genes for E. coli.
atggtaacctttcatacgaaccacggtgacatcgttataaagaccttcgacgataaagcacccgagactgttaagaacttccttgactactgtcgagaagggttttacaataatacgatattccatagagtgattaatgggttcatgatacaagggggtggatttgagcctggaatgaaacaaaaagctacgaaggaaccgatcaagaacgaggctaacaatgggctaaagaacacccggggcactttggctatggctcggacccaggctccccattcggcgactgctcagttctttatcaacgttgttgataatgacttcttaaacttcagcggcgaaagtttacaaggatggggatactgcgtattcgccgaggtagtggatggaatggacgtggtagataagatcaaaggagttgccactggacgcagcggcatgcaccaggatgtgccaaaagaagatgtgataatcgaaagcgttacggtttcagaatag

SEQ ID NO: 2358 - DNA, 954 bp, Artificial Sequence
  Optimized genes for E. coli.
atgcgcgcaaaactactcggaatagtgttaaccaccccgatcgctatcagctcatttgcgagtaccgagaccttgagtttcacccccgacaacatcaacgctgacataagtctcggtaccctgagtggcaagactaaggaacgtgtgtacctggctgaagagggaggccgaaaggtttcccaattggactggaagtttaacaatgcggcgatcattaagggagccatcaattgggatcttatgccgcagattagtatcggtgcggcaggatggacaaccctcggttcacgtggggggaacatggttgaccaggattggatggatagttctaatccagggacttggacagatgaaagtcgacatccggatactcaattaaactatgcgaacgagtttgatctaaatataaagggatggctgctcaatgaacccaattatagactaggtttaatggctggatatcaagagtccagatattcattcactgccaggggagggagttacatatactcttcagaagagggttttcgagatgacatcggttctttccctaatggcgaacgggccatcggctataaacaacgatttaagatgccgtacattggcttgacgggctcctacagatacgaagacttcgagctgggcggtacatttaagtacagcggatgggttgaaagttccgataacgacgagcactacgatccagggaaacgaataacctaccgctcgaaagtgaaggaccaaaattactactcagttgccgtaaacgcgggttactatgttactccgaacgcaaaagtgtatgtggagggcgcatggaatcgagtaaccaataaaaaaggtaacacgtctttgtacgaccataataacaatacgtcagactactcgaaaaacggggcaggaatcgagaattacaactttatcacaaccgccggtctcaagtacaccttttga

SEQ ID NO: 2359 - DNA, 564 bp, Artificial Sequence
  Optimized genes for E. coli.
atgtctcttattaataccaaaatcaagccttttaaaaaccaagcctttaaaaacggagagtttatcgagataactgaaaaagatactgaaggtcgttggtctgtgtttttcttttaccctgctgattttacatttgtctgccccacggaacttggcgatgttgctgaccattatgaggagttgcaaaaactcggagtcgacgtatatgccgtgtcgacagatacacatttcacccacaaggcgtggcactcgagttcagaaacaatcgcgaagattaaatatgcaatgattggtgacccgacgggtgcccttaccagaaacttcgataacatgagggaagacgaaggtctcgcggaccgcgccacgtttgtggtcgacccacaagggattatccaagcgatcgaggttaccgctgaaggcatcggtcgcgacgcttcagatttacttcgtaaaattaaggcagcccagtatgtcgcttcacacccgggtgaggtttgtcccgcgaaatggaaagaaggcgaagcgacattagccccctctctggacctggtaggaaagatctaa

SEQ ID NO: 2360 - DNA, 210 bp, Artificial Sequence
  Optimized genes for E. coli.
atgtcaaagataaaaggcaatgtaaaatggttcaatgaaagcaaaggctttgggttcataactcctgaggacggcagtaaagatgttttcgtacacttttcagctatacagactaacgggttcaaaaccctagccgaaggacaacgggtcgaatttgagattactaatggagccaagggaccatcagccgccaatgtgatcgcgctgtaa

SEQ ID NO: 2361 - DNA, 1218 bp, Artificial Sequence
  Optimized genes for E. coli.
atgtcgtcagtcgatatcctagtccctgatttacctgaatctgtagcggacgctaccgtggccacgtggcataaaaagccgggcgatgcggtcgtacgggatgaagttcttgttgagatagagacggacaaggtggtactggaagtgcctgcttcagctgacggtatattggacgccgtcttggaagacgaaggcaccacagtgacatcacgacagatccttggccggttgagagagggaaattcagcgggtaaagagacgtcggcgaaaagtgaagaaaaagcgtccacgcctgcgcaacgacagcaagcttccctggaagaacaaaataacgatgccctcagtcctgctatccgccggctcctagcggagcacaatctagacgcctcggcaattaagggaacaggggtgggaggtagattgacacgggaagatgttgaaaagcatttggccaaggccccagcgaaagaaagcgctcccgccgctgcggctcctgctgcacaaccggccttggccgctcggtccgagaagagagtgcccatgactcgtctacgcaagcgagttgcagagcgcttgctggaggcgaaaaattcgactgccatgctcaccacttttaacgaggtaaatatgaaaccgattatggacttaagaaagcagtatggcgaagcatttgagaagcgacacggcatacgattaggcttcatgtcattttacgtcaaggcagtcgtagaggcccttaaacggtaccccgaagtgaatgcgagcattgatggggatgacgttgtataccacaattattttgatgtgagtatggcggtcagtactcctcgtggcttagttactcccgtcctacgggacgtagacactctaggaatggcagatattgaaaaaaagataaaagaattggcggttaaggggcgggacggcaaactcacagttgaagaccttaccggtggcaactttaccattactaacggcggagtttttggaagtttgatgtccacgccaataattaatcctccccagagcgctattttaggcatgcacgctatcaaagatagaccaatggctgtcaatggacaggttgagatcctaccgatgatgtatctagcgctatcctacgaccatcggttgatcgacggccgagagtcggtagggtttctagtgaccattaaagagctcctggaggaccctacccgacttcttctcgatgtctga

SEQ ID NO: 2362 - DNA, 1167 bp, Artificial Sequence
  Optimized genes for E. coli.
atgaacttacatgaataccaagccaagcaacttttcgcccgttatggcctcccagcgccggtcggctatgcgtgtactactccaagggaggcggaggaagcagcgtcgaagataggcgccggcccttgggttgtaaagtgccaggtacacgctggcggacgaggtaaagctggaggtgtgaaggtcgttaattcaaaagaggatatacgagcgtttgctgagaactggctggggaagaggctggtgacttaccaaactgacgcgaacggacagcccgtcaatcagattttggtcgaggccgcaacagatattgcgaaggagttgtatttaggtgcagtggtagatcgttcgagccggcgggtcgtttttatggcttcgacggaaggtggcgtcgaaatagagaaagttgcagaagaaacacctcacctgattcataaggttgcgctggatcctctgacggggcctatgccgtaccagggcagagagctagctttcaaactaggtctcgaaggcaaactagtgcagcagttcactaaaatatttatgggtctagcaactattttcctggaacgcgatttagcactgattgaaattaatcctttagtaattacgaaacaaggtgacttgatctgccttgatgggaagcttggggcagacggcaacgctttatttcgacagcctgaccttagggagatgcgcgaccaatcacaagaagacccgcgggaggcccaagcagcacaatgggaactcaactatgttgcactggatgggaacattgggtgtatggtcaatggcgcaggtctcgcgatgggtacgatggacatcgtcaaattacacgggggagagcccgcgaacttcttagatgttgggggtggcgcgaccaaagagcgggtaacagaagcttttaaaataattctttcagacgacaaagtcaaagccgtactggtcaacatcttcggagggatcgtacgatgtgatttgatagccgacggcatcattggggccgtggctgaagtcggagtaaacgtgcctgttgttgtgaggttagaggggaacaacgcggagctaggagccaaaaaattagctgacagtggtttgaatataatagccgcgaaaggcttaaccgatgctgcgcaacaagtcgtcgcggcggtcgagggtaaatag

SEQ ID NO: 2363 - DNA, 522 bp, Artificial Sequence
  Optimized genes for E. coli.
atgcaattaaacaaagtattaaagggcttgatgattgccttacctgtaatggccatagcagcttgctcaagcaataagaatgcttcgaacgacgggagcgaaggtatgttaggggcaggcacaggaatggatgcaaatggggggaacggtaatatgtcttctgaggaacaggcccgactccagatgcagcaattgcagcaaaataatatcgtgtactttgatctcgataaatacgacattcgctcagatttcgcccagatgctggacgctcacgcaaattttctacggtccaacccctcttataaagtaacggtcgagggccacgccgatgagcgcggcacgcccgagtataatatatccctaggcgagaggcgggcgaacgcagttaagatgtatctgcagggcaagggtgtatcagcggaccagatcagtatagttagctatggaaaggaaaagccagccgtattggggcacgatgaagcggcttacagcaaaaatcgcagagccgtcttagtatactga

SEQ ID NO: 2364 - DNA, 792 bp, Artificial Sequence
  Optimized genes for E. coli.
atgtcaagtaacttcagacatcaacttttgtcgctctctttgcttgtcggaattgccgcgccgtgggctgcattcgcacaggcacctataagttcggtgggatccgggagcgtagaggatagagtgacacagttagagcggatttccaacgcgcactcgcagcttcttacgcaactacagcagcaactatctgataaccaatcggacatagattctctacgcggccaaatacaagaaaaccagtatcaactaaaccaagtcgttgagcgccagaaacaaatccttctacagatagacagcctaagcagtggtggggcggccgcccaatccacaagcggcgaccagagtggtgccgctgcctcgactactccgaccgctgacgctggcactgccaacgcgggagcccccgtgaagagtgggaacgcgaacaccgattataatgcggctatcgccctggtccaagacaagtctcggcaggatgacgctatggttgcttttcaaaacttcattaaaaactatcctgattcgacatacctacctaatgctaattattggttagggcaattaaattataataagggcaaaaaggatgatgccgcctactattttgctagtgttgtaaaaaattaccctaaatctccaaaggctgcggacgctatgttcaaggttggggtcataatgcaggataaaggtgacaccgcgaaagcgaaggccgtttaccagcaagttatatccaaatatcccggcactgacggagctaaacaagcacagaaacggttgaatgcgatgtaa

SEQ ID NO: 2365 - DNA, 753 bp, Artificial Sequence
  Optimized genes for E. coli.
atggcggtcactaaactcgttttggttcgacacggtgaaagccagtggaacaaagaaaacagatttacaggctggtatgatgtggatctatcggagaaaggtgtgtcggaagcaaaagctgctggcaaactactaaaggaggaaggctactctttcgacttcgcgtatacgtcggtattgaagcgcgccattcatacgctctggaacgtcttggatgaactagaccaagcgtggctgccagtcgaaaaatcttggaagttaaatgaaaggcactatggggcactacaggggttgaacaaggctgagactgccgaaaagtacggagatgagcaggtaaagcagtggaggcgcggtttcgcggttaccccccctgagttaacaaaagacgacgagcgttatcctggacacgatcctaggtacgctaagctatccgaaaaagaacttccgctgaccgaaagtttggcactaacgatcgacagggtgattccatactggaacgagactatattaccaagaatgaaatccggcgagcgggtgattatcgcggcacatgggaatagccttcgtgcccttgtcaagtacctcgataacatgtcagaggaagaaatactagagttaaatatacctaccggcgtccctctcgtatatgagtttgacgagaatttcaagccccttaaaagatattacctgggaaatgctgacgaaatagcggcgaaagctgcggcggtagccaaccaggggaaagcaaaatag

SEQ ID NO: 2366 - DNA, 747 bp, Artificial Sequence
  Optimized genes for E. coli.
atgaagtctgttctaaaggtctctctggccgcgttgacattagctttcgcagtttcctcccatgctgcagacaaaaagttagttgtggctacagacacggctttcgtgccgttcgagttcaagcagggtgataagtacgtcgggtttgatgtcgacctgtgggctgcgattgcaaaggaattgaaacttgattatgagcttaaaccaatggacttttcgggtattatacccgcccttcagacgaagaatgtggacttagcgcttgccgggataacgatcaccgatgagaggaagaaagccattgacttcagtgacggttattataaaagcggtttactggtcatggtgaaagcgaataataacgacgtaaaatcagtgaaagatcttgatggaaaggtcgttgctgttaagtccggtacgggttcagtggattatgcaaaggctaatatcaagaccaaagacctccgacaatttcctaatattgacaatgcgtacatggagcttggaactaatcgagcagatgccgttctacacgatactcccaatatcctgtatttcattaagacagcaggaaatggacagttcaaggccgtaggtgacagtctcgaagcgcagcagtatggcattgcattccctaaaggttccgacgaactacgtgataaagttaatggagcccttaaaaccctccgtgagaacggcacttacaacgaaatttacaaaaagtggttcggaacagaaccaaagtag

SEQ ID NO: 2367 - DNA, 504 bp, Artificial Sequence
  Optimized genes for E. coli.
atgtctacagccaagcttgtaaagagcaaagctaccaacctattatacactcggaacgatgtttctgactcggaaaaaaaagccactgttgagcttttgaatcggcaagtaatccaattcatagacctaagtttgatcaccaaacaagcacactggaatatgagaggcgccaacttcatcgcagtccatgaaatgttagatggatttcgcacagccctaatcgatcatctagatacgatggccgaacgtgcggtgcaactggggggggttgccctaggaacaacacaggtcataaactccaagacacctctaaagtcttacccgctcgatatccataatgttcaagaccacctcaaagagctggccgatcggtacgcgatcgtggcaaatgacgtgcgtaaggcaattggcgaagcaaaagacgacgacactgccgacattctaactgcagcttcacgggatcttgacaagtttctatggttcattgagtccaacatcgagtga

SEQ ID NO: 2368 - DNA, 516 bp, Artificial Sequence
  Optimized genes for E. coli.
atgaagaagattgcctgtctatctgcactggcagcagttctggcatttacggctgggacgtccgtggcagcaacaagcactgttaccggtggatatgctcagagcgatgcccaaggacaaatgaataagatgggggggttcaatctaaaatatcgatatgaggaagacaatagtccgctaggagttatcgggtcgttcacttacacggagaagagtagaaccgcgagctccggggattacaataaaaaccagtattacggcataacggctggcccagcctaccgcattaacgactgggccagtatttatggagtggtaggagtcggatatgggaagtttcaaaccacagaataccctacttataaacacgatacgtctgattacgggtttagctatggagcggggctgcagttcaatcccatggaaaatgtagcacttgatttctcgtacgagcagtctcgcatcaggtccgtcgacgtggggacctggatcgcgggggtcggctatcgcttttga

SEQ ID NO: 2369 - DNA, 225 bp, Artificial Sequence
  Optimized genes for E. coli.
atggaaaaaggcactgttaagtggtttaataatgccaaaggttttggttttatatgtcctgaaggaggaggggaagatattttcgcccactattctacgatacaaatggatggctacaggaccctgaaggctggacagagtgttcagtttgatgtgcaccaggggccaaagggaaaccatgcatcagttatagtcccggttgaggtagaagctgcggttgcctaa

SEQ ID NO: 2370 - DNA, 219 bp, Artificial Sequence
  Optimized genes for E. coli.
atggcgaaagaagataatatagagatgcaaggcacagtgctcgagacattgccgaacactatgttccgagttgagctcgagaatggccacgtcgttacggcgcacatctcgggtaaaatgagaaaaaactatatcagaatattgacgggggataaggtgacagttgaattaaccccgtatgacctctcaaaagggcgtatcgtgtttaggtctagatag

SEQ ID NO: 2371 - DNA, 495 bp, Artificial Sequence
  Optimized genes for E. coli.
atggttgactcaaaaaagcgtccgggtaaggatcttgatcgcatagacaggaatatcttgaatgaactgcaaaaagacgggcgcatttctaatgtcgaactttctaagcgtgtgggactatcgccgaccccttgcttagagagagtacggcggcttgagagacagggatttatacaaggttatactgcgctgttgaatccacactatttagacgcttctttattggtgtttgtggagatcacactcaacaggggagcacccgatgtttttgagcagtttaacacggcagtgcagaaactagaagagatccaagaatgccacctcgtgagcggcgattttgattacttgctgaagacgagagtaccagacatgagtgcttacaggaaacttttaggagaaacgttattacgcctacctggggtcaatgatacacggacttacgtagttatggaggaagttaagcagtcaaatagattggtcataaaaaccagataa

SEQ ID NO: 2372 - DNA, 2283 bp, Artificial Sequence
  Optimized genes for E. coli.
atgtcagagctaaacgaaaaacttgccacagcctgggagggatttacgaagggtgattggcaaaacgaggttaacgttcgagacttcattcagaaaaactacacgccgtatgaaggtgatgaatcctttctggcaggggctactgaagcgaccacgaccctctgggataaggtaatggagggggtaaaattggaaaaccgtacgcacgcccctgtagatttcgacacagccgttgcaagcacgatcacatcccacgatgcaggttatattaataaacagctggaaaaaatcgtgggcctccaaacagaagcccctttaaaacgagcattaattccatttggtgggatcaagatgatagagggcagctgcaaagcctacaaccgcgaactggacccaatgatcaagaaaatattcacggaataccgcaagacccacaatcaaggtgtcttcgatgtctacacaccggatatcctacgctgcaggaagagcggtgtactgacagggctccctgacgcatacggcaggggtcggattattggtgattacagacgtgtggcgttgtatggtatagattatctgatgaaagacaaactagctcagttcacctctcttcaggcagacctcgagaacggagtaaacttagagcaaaccattcgactgcgtgaagagatcgccgaacaacacagagcattagggcaaatgaaggaaatggcagcgaagtacgggtatgatatatccgggcccgccacgaatgcacaagaagctatacaatggacctattttggatatttggcagcagtgaagagtcagaatggggcggctatgtcattcggtcgcacatccacgttcttggatgtgtacattgagcgcgacctaaaagctggcaagataacagaacaagaggcacaggagatggtggatcatcttgttatgaagctgcgaatggttaggttccttcgaacgcctgagtacgatgaacttttttctggcgaccctatctgggcgactgagtccataggcgggatgggcctagatggtcgaacgctagtcactaagaactctttcaggttcctgaataccctgtacacgatgggtcccagtccggaaccaaacatgaccatcctttggtcagagaaactaccgctcaacttcaaaaagtttgcggcgaaagtttccattgacacaagtagcctgcagtatgagaacgacgatcttatgcgtcccgactttaacaacgatgattatgccatagcttgttgcgtttcacccatgatcgtcggcaaacaaatgcaattcttcggcgcgcgcgcgaatcttgctaaaactatgctctacgctataaatgggggtgttgacgaaaaactaaaaatgcaagttggtcctaaaagcgaacccataaagggcgatgttttgaattacgatgaagtaatggaaaggatggatcactttatggactggctagctaaacaatacatcaccgctctcaacatcattcactacatgcacgataagtactcctatgaggcaagtttaatggcactccatgatagggacgttatcaggaccatggcatgtggcatagccggactctcagtcgctgccgattccttatccgctattaagtacgccaaggtgaaaccaattcgcgacgaggacggtctcgccattgattttgaaatcgagggggaatatccgcagtttggaaacaatgatccgagagtcgacgacctggctgtcgatcttgtggaaaggtttatgaaaaaaattcaaaaattgcatacatatcgtgacgctattcccactcaatcggttctaaccatcacctctaatgtcgtgtacggcaagaaaaccggaaatacaccagacggtcgtcgcgcgggtgccccctttggtcctggagcgaacccaatgcacggtagggaccagaagggcgcagtcgcgtcgctcacatctgttgcaaaattgcccttcgcgtatgcgaaagacggaatcagctatacattctccatcgtccccaatgcccttggtaaggatgatgaggtacgtaagacgaatcttgctggcttaatggacgggtactttcatcatgaggcgtcgattgaagggggccaacatttgaacgtcaatgtgatgaatcgagagatgttgctagacgcgatggagaatcctgaaaaatacccacaattgaccattagagtgtcaggttacgctgttaggtttaactccttgactaaggaacagcagcaagatgtcatcacacgcactttcactcaatccatgtag

SEQ ID NO: 2373 - DNA, 1674 bp, Artificial Sequence
  Optimized genes for E. coli.
atgactgaatccttcgcacagctgtttgaggagtctttaaaggagattgaaactcgtccggggtcaatagtgagaggagtagttgtggcgattgataaggacgttgtgttagtggacgcggggcttaagtctgaatcagccataccagccgagcagtttaaaaacgcccagggtgaactagaaattcaagtaggcgatgaggtagacgttgccctagacgccgttgaggatggctttggcgaaactctgctgagcagagagaaggccaagagacacgaagcttggatcacgttggaaaaggcgtacgaagacgcggagacggtcacaggcgtgatcaacgggaaagtgaaaggtggatttacggtggagctaaacggtattcgagcctttctcccgggttccttggtagatgttcggccggtgagggacaccttgcatcttgaaggcaaggaactagagtttaaagtgataaaattggatcagaaacgtaataacgtcgtggtctccaggcgggcggttattgaatcggagaatagtgcggaaagggaccaattactcgaaaacctccaagaaggtatggaagtaaaaggaatcgtgaagaacttaacggattatggggcgttcgttgatttgggtggtgtagacggactgctgcacatcacggatatggcgtggaagagggtcaaacacccgtcggagatagtgaacgtcggggatgagataaccgtcaaagtactaaagttcgaccgcgagagaacccgcgtctcactaggactaaaacagctgggcgaggatccctgggtcgcgattgcgaagaggtacccagaaggaaccaaattgacgggtcgcgtgacgaatttgacggattacgggtgtttcgtcgaaatcgaagagggtgttgagggccttgtacatgttagcgaaatggattggactaataaaaacatccacccgtcgaaggtcgttaacgttggcgatgtggtcgaagtcatggtattagatattgacgaggaaaggcgccgcatcagtcttgggctgaagcagtgcaaggcgaatccgtggcagcaatttgctgaaacgcacaataaaggtgatagagtcgaaggtaagataaagagcataacggatttcggcatattcatcgggctggatgggggcattgatgggctggtgcatttatctgatataagctggaatgttgcaggcgaggaagcggtgcgggagtacaagaaaggagatgagattgctgcagtagttttgcaggttgacgcagaacgggaaagaatcagcctaggagtgaagcagttggctgaagatccgttcaacaattgggtcgctctaaataagaaaggtgcgatcgtcacgggcaaagtgacggccgttgacgccaaaggggcaacagttgagcttgccgacggcgtagaggggtacctccgggcgtcggaagcctcaagggatcgtgtggaagacgctactctcgtgctttccgttggtgatgaggtggaagcaaagtttactggcgttgaccgcaagaatcgggcgattagtctgagcgtacgtgcaaaagacgaggcagacgaaaaagacgcgattgcgacggttaacaagcaggaagatgccaatttctcgaacaatgcgatggcagaagcgtttaaggcagctaaaggagaataa

SEQ ID NO: 2374 - DNA, 285 bp, Artificial Sequence
  Optimized genes for E. coli.
atgacaaagtcggagttaattgagcgtctcgccacgcagcaaagccacatacctgcgaaaactgtcgaagacgcagtcaaggagatgctagaacacatggctagcactttagctcagggtgaacggattgagatacgtggattcgggtcgttttcattgcactatcgcgctccccgaacgggaaggaaccctaaaaccggtgataaagtcgaacttgagggtaaatacgtgccacatttcaaacctgggaaagagctaagggatagagctaacatatacggttaa

SEQ ID NO: 2375 - DNA, 1191 bp, Artificial Sequence
  Optimized genes for E. coli.
atgtttgaaaacattacagctgcgcccgccgacccaattttagggctcgcagacctgtttcgtgcggacgaaagacccggtaagattaatcttggaattggtgtctataaagacgaaacgggcaagacacctgttttgacatccgtcaaaaaggccgaacaatatcttctcgagaatgagacgacaaagaattatctgggtattgatggtatccccgaattcggacgctgcacgcaggaactattgttcggtaagggctctgctcttataaatgacaagcgagctcggaccgcacagacgcccgggggaaccggggccctgcgtgttgccgcagacttcctcgccaagaacacttccgtcaagagagtgtgggtgagtaacccgtcctggcccaaccataaatccgttttcaacagtgcgggcttagaggttagagaatatgcatactatgacgccgaaaaccatacgctggacttcgacgctcttatcaacagtttaaacgaggcccaagccggagacgtagtgctgtttcacggctgctgtcataatccgactggaatcgatcccactctggaacagtggcagacattagcgcagctgagtgtggaaaaggggtggctcccacttttcgactttgcctaccaaggtttcgcaaggggccttgaagaagacgctgaagggttgcgggcatttgcagcgatgcacaaagagctaatagtggcaagctcgtactccaaaaatttcgggctatataacgaaagggttggagcctgtaccttggttgcagccgacagcgaaacggtagatcgtgcgttctcgcagatgaaagccgctatacgggccaattattcgaatccaccggctcatggtgccagcgttgtggccacaatattgtctaatgatgcccttcgcgcgatttgggaacaggaattgaccgatatgcgacagcgtatacaacgcatgcgacagttgtttgttaacacgctccaggaaaaaggggctaaccgggatttctcatttatcataaaacagaacggtatgttttcatttagtggtctcacaaaggaacaggtacttcgtttacgcgaagaattcggggtttacgctgttgctagtggtagggttaatgtggccggtatgacgccggataacatggcaccattgtgtgaagcgatcgtggccgtactctga

SEQ ID NO: 2376 - DNA, 1089 bp, Artificial Sequence
  Optimized genes for E. coli.
atgatgaagaggaacattttggctgttatcgtacctgcgctactggttgcagggacagctaatgcggcagaaatatacaataaggatggaaacaaagtggacctgtatgggaaagccgttggacttcattacttctccaaggggaatggagaaaactcgtatggagggaatggggatatgacttatgcccgactagggtttaaaggagaaacacagatcaactccgacctcactggttacggtcagtgggaatataactttcaagggaacaacagtgaaggcgccgatgcccaaacaggtaataagacacgactggcatttgctggactcaaatacgcggacgttggctctttcgattatggaagaaactatggtgttgtttatgatgctttgggctacactgacatgctacctgaatttggtggcgacacagcctacagcgacgacttttttgtgggcagagtaggaggcgttgcaacatatcgaaattcgaatttctttgggctcgtagatgggctgaactttgccgtgcagtacttgggcaagaacgagcgggatactgctagacgaagcaacggtgatggtgtaggaggcagcatatcttacgagtatgaggggtttggtattgtcggcgcatacggtgcggcggatagaacgaatctccaggaagcccaaccattgggaaatggtaaaaaagctgagcagtgggcaactggtttaaaatatgatgctaacaatatctacttggctgctaactacggcgaaacccgcaatgcgaccccaattaccaataaattcacaaacacatcgggcttcgctaacaaaactcaagatgtgctcttagtagcacaataccaatttgactttgggttacgacccagtatagcctacaccaagtcgaaggcaaaagatgttgaggggatcggagacgtggacctggttaactactttgaagtaggagctacctactacttcaacaaaaatatgagtacatatgtagattacattataaaccagatcgattctgataataaattgggcgtaggctccgacgacactgtcgcggttggtattgtctaccagttttag

SEQ ID NO: 2377 - DNA, 168 bp, Artificial Sequence
  Optimized genes for E. coli.
atgaagcggcagaagcgggatcgccttgaacgagcccaccagcgaggataccaggcaggcattgctggaaggtcaaaagaaatgtgtccgtatcaaacgctgaaccagcgaagtcaatggctaggggggtggcgcgaggcaatggctgaccgtgtagtgatggcttag

SEQ ID NO: 2378 - DNA, 1041 bp, Artificial Sequence
  Optimized genes for E. coli.
atgaaaaagactgctatcgctatagcagtggcattagccggttttgcgactgtcgcccaggctgcgcctaaggataacacttggtatactggtgctaagctgggctggtctcagtaccatgacaccggttttataaacaacaatggtccaactcatgaaaaccagctcggtgccggggccttcggaggctatcaggtcaacccgtacgtgggtttcgagatgggatacgattggcttggtcgcatgccctacaaggggtcagtagagaacggcgcgtataaggcccaaggggtgcaattaacagccaaactcggctatcctattaccgacgacttggatatctacacgaggctaggtggcatggtctggcgcgcagatactaagtctaacgtgtatggcaaaaaccatgacacgggcgtgagtcccgtattcgcgggcggagtcgaatacgcgataactcctgagatagcgacgcgcctggagtatcagtggactaataacattggtgatgctcacactattggtacgcgcccggataacggaatgttatctttaggcgtgtcgtaccgtttcggccagggggaagcagcaccggtagttgcacccgcccccgctccagcgccagaggtgcagacaaagcacttcactttaaaatctgatgtgttatttaacttcaacaaagccaccctgaaaccagaagggcaggccgccctagatcaactgtacagtcagctgtctaacttagaccccaaggacggtagcgtggtcgtcctaggatataccgatcggataggttccgatgcgtataatcaggggctcagcgaaaggcgggcgcagtcagtcgtggactacctgatatctaagggaatccccgcagacaaaattagcgcgcgcggtatgggtgagagcaaccccgtaaccggcaatacctgcgacaatgtgaagcaaagggccgcactaatagactgtctcgcaccggatcgcagggtcgaaattgaggtgaaaggaataaaagatgtggtcacccagcctcaagcgtga

SEQ ID NO: 2379 - DNA, 375 bp, Artificial Sequence
  Optimized genes for E. coli.
atgactatgtatgcgactttagaagaggccatcgatgcggcaagggaggaattcctggcagataatccgggtatagacgctgaggacgcaaatgtgcaacagtttaatgctcagaaatatgtcctccaggacggagacatcatgtggcaggtagaatttttcgcagacgagggagaagagggagaatgcttgccgatgctgtcgggggaagccgcacaaagcgttttcgatggtgattacgacgagattgagattcgacaagaatggcaagaagaaaatacgctccacgaatgggatgaaggtgagtttcaattggagcccccgctcgacacggaggagggccgagcagccgctgacgaatgggacgagcgataa

SEQ ID NO: 2380 - DNA, 522 bp, Artificial Sequence
  Optimized genes for E. coli.
atgcaaaaagtgaagcttccactgactctggaccctgtcagaacagcacagaaacgcctagattatcaggggatatacactccggaccaagtcgagcgggtcgcggaatcagttgtaagtgttgacagcgatgtagagtgttccatgtcctttgctatcgataaccaaagactggcagtgctgaacggcgatgcaaaggtaactgtgacgctggaatgccaacgatgtggaaagccgttcactcaccaggtatacacaacttactgtttttccccggtgaggtctgacgaacaagctgaagcattgccggaagcttatgagccgattgaagtcaatgagtttggcgaaatagatctcctagcaatggttgaggacgaaataatcttggcccttccagtggtccctgttcatgatagcgagcactgcgaagttagcgaggccgacatggtgtttggggagctccctgaagaagcgcagaagccgaatccgtttgctgtgttagcttctttaaagcggaaataa

SEQ ID NO: 2381 - DNA, 174 bp, Artificial Sequence
  Optimized genes for E. coli.
atggccgtccaacagaataaacctacccgctcgaaaaggggaatgaggagaagtcacgacgcacttacagccgtcacaagtttgtcggtcgataaaacttccggagagaaacacctacggcaccacataactgccgacgggtattaccgtggtcgcaaagttatagcaaagtga

SEQ ID NO: 2382 - DNA, 954 bp, Artificial Sequence
  Optimized genes for E. coli.
atgtacacaaagataatcggcacgggaagctatttgcctgaacaagtgcgaacaaatgccgatttagagaagatggttgacacttctgacgagtggatcgtgactcggactggtataagagaacgccacatagctgcccctaatgagactgtctctaccatgggatttgaagctgcgactcgggctattgaaatggcaggtattgagaaggatcaaatcgggcttattgtggttgccactacttcagcaacacacgcgttcccctcagctgcttgccagattcagtcaatgcttggaataaaaggttgcccagctttcgatgtcgcggccgcttgcgcaggctttacctatgcactcagcgtggccgaccagtatgttaagtcaggggccgtgaaatacgctttagttgttggcagcgatgtcctcgcgcgaacctgtgaccctactgatcgcgggaccataattatcttcggtgatggtgctggggctgcagtattggcagcgtccgaagaaccaggtatcatctctacccaccttcacgctgacgggagctacggggaacttctaacactacccaacgcagaccgagttaaccccgagaactctatacatttaacgatggcgggcaatgaagtctttaaagtcgcagtcacagaattggcccacatcgtcgacgagaccctagcagcaaataaccttgatcgttctcagttggattggttggtcccccaccaagccaacctacgcatcatatccgccacggcaaagaaattagggatgagcatggacaatgttgttgtcacgttggacaggcatgggaatacatccgccgcctcagtcccttgtgcactcgatgaagctgtcagagacggtcgcatcaaacctggccaattagtacttctcgaagccttcggaggaggattcacctggggatctgccttggttcggttctag

SEQ ID NO: 2383 - DNA, 930 bp, Artificial Sequence
  Optimized genes for E. coli.
atgacgcagtttgcgttcgtgttcccgggacaagggtcgcagactgtgggtatgctcgcggacatggcagcctcgtatcccatagtagaggaaacctttgccgaggcgtcggcagcgctggggtacgatttatgggcgctgacgcagcagggaccggcagaggagctaaacaaaacctggcagacacaacctgctctcctgacagccagtgtagctttatatagagtttggcaacagcagggtggaaaggcccccgcaatgatggcaggacatagcctaggtgaatacagtgcattggtatgtgcgggcgtaattgactttgcagacgcagtgcgtctcgtagagatgcgcggcaagtttatgcaggaggctgtccccgagggaactggggcaatggcagcgatcattgggttggacgacgccagtattgctaaggcctgcgaggaggccgctgaaggacaggtcgtgtcgcccgtaaatttcaatagccctggtcaggttgtcattgcaggacacaaagaagcagttgaacgcgcgggagcagcgtgtaaagcggctggcgctaagagagcattacccctccccgtatcggtaccatcccactgcgcgttaatgaagccagcagcagataaattagcggtcgagctagcgaagattacatttaacgcaccaacggtcccagtcgtaaataatgtggatgttaaatgtgaaactaatggcgatgctatccgagacgccttggttcgtcaactctataaccccgtgcagtggacaaagtcggtagaatacatggcagcgcaaggagtcgagcacctgtacgaagtcggaccaggaaaagtacttacaggactcacgaagaggatcgtggacacgttaacagcatcagcccttaatgaaccctcggctatggcagctgccctagagctctaa

SEQ ID NO: 2384 - DNA, 735 bp, Artificial Sequence
  Optimized genes for E. coli.
atgaactttgagggcaagatagccctagttacgggcgcttctcgcggcataggacgagcaatagccgagacgttggccgcacgcggtgctaaagttatcggcactgcgacaagtgagaacggagcacaggcaatttcagattacttgggagcgaacggcaaggggttaatgctaaatgtaactgatccggcttcgatcgaatccgtcctggaaaagatacgtgcggagtttggggaggtagacattttagtgaacaacgcgggcatcacccgagataatctgctgatgcgcatgaaagacgaagagtggaacgatataatagagactaatctgagtagcgtattcaggttgagtaaggcggtgatgcgtgcaatgatgaagaaaagacatggccgcattattacaattggctccgtcgttggaacaatggggaacggcgggcaagcgaattatgcagcggccaaggcgggcttgatcggttttagcaaatcgctcgcgcgtgaagtagcctcccgagggattacagttaatgtagtcgcgcctggatttatcgagaccgacatgaccagagctctcagcgatgaccagagggctgggatattggcccaggtaccagcaggccgtctgggtggggctcaggaaattgccaacgctgtagcatttctagctagtgatgaagccgcgtacatcaccggtgagacgctgcacgttaacgggggtatgtacatggtttaa

SEQ ID NO: 2385 - DNA, 237 bp, Artificial Sequence
  Optimized genes for E. coli.
atgtcaactattgaggaacgggttaaaaagatcattggcgaacaacttggggtgaaacaagaggaagtaacaaataatgcgtctttcgtagaggatttaggcgccgattcccttgacacagtggaactcgtcatggcattagaggaggagtttgacactgagattcccgacgaggaggctgagaagatcacgactgttcaggcggcaatcgactacataaatggtcaccaagcgtaa

SEQ ID NO: 2386 - DNA, 1434 bp, Artificial Sequence
  Optimized genes for E. coli.
atgtttaaaaacgcgttcgcgaaccttcagaaggttggaaaatcacttatgcttcccgtcagtgtactccctatcgcagggatccttttaggcgtcgggtcagcgaatttttcctggttacccgcagtggtcagccacgtcatggccgaagccggcgggtcagtctttgcaaacatgccccttatctttgcaataggcgttgctttaggtttcactaacaatgatggcgtatctgctctagcagctgtggtggcgtacggaatcatggttaagacgatggcggttgtagcgccactcgtgttgcacctaccagccgaggagattgcgtccaagcatttggcggatactggcgttcttggcggaataattagcggggcgatagccgcatatatgtttaataggttttatcggattaagcttccggagtacctcggtttctttgccggtaaacgcttcgtcccgatcatttcaggacttgcggccatctttactggtgtcgtcctcagcttcatatggcccccgatcggttccgcaatacaaacctttagtcagtgggccgcttaccaaaatcctgtagttgccttcggtatatatggatttatcgagcggtgcctcgtgccttttggcctccaccatatctggaatgtaccattccagatgcaaattggtgagtatacaaacgctgcgggtcaagtctttcatggagacatcccccgttacatggcgggtgacccaactgcgggcaaactttctgggggctttcttttcaagatgtacggactacccgccgccgcgattgctatctggcatagcgcaaaaccagagaatagagcgaaagttggaggtatcatgatctcagcggcacttacctctttccttaccggtataacggaaccgatcgaatttagtttcatgttcgtggcccctatcctgtatattatacacgcaatcttggcaggtcttgcctttcccatctgtatccttctgggtatgcgggacggaacgagtttcagtcacggtttgatagactttattgtattgagcggaaacagttccaagctctggctctttccgattgtcggaataggttacgcaatagtgtactatacgatcttccgggtactgattaaagcgctagatctgaaaacaccgggtcgtgaggacgcaacagaagacgccaaagcaaccggtacctctgaaatggctcccgctctagtcgccgctttcggtgggaaggagaacataaccaatctagatgcatgcatcacgcgattgcgcgtctctgttgcagatgtgagcaaggtcgatcaggctggtttgaaaaagctaggagcagccggggtcgtcgtggctggtagcggggttcaggccatttttggtacgaaaagtgataatttaaagacggagatggacgaatatatccgaaatcactag

SEQ ID NO: 2387 - DNA, 1251 bp, Artificial Sequence
  Optimized genes for E. coli.
atggagagtaaggtagtcgttcccgcccagggcaaaaagattactttacaaaacggtaaacttaatgttccagaaaacccaatcatcccctatattgaaggagatggcattggagtagatgttacgccagctatgcttaaagtagtggacgctgcagttgagaaggcttacaaaggggagcgcaagatctcctggatggagatatacaccggggaaaagtccactcaggtttatggtcaagatgtatggcttcctgccgagacgttagacctaattcgtgagtatagggttgcaataaagggaccattgactacaccagtaggtggtggaattcgctcattaaatgttgcactccgtcaggagttggatctctatatctgccttcggcctgtgcgttattaccaagggactccctcgccggttaaacacccagaactaacggatatggtaatctttcgggaaaactctgaggacatatacgcgggcatcgaatggaaagccgacagtgccgatgcagagaaggttattaagtttttgagggaagagatgggagtaaagaagataagatttcctgaacattgtggaataggcattaagccttgcagcgaggaaggaacaaaaagattagtccgggccgccattgaatatgcaatagccaacgatagagatagtgtgactctcgtacataagggaaacattatgaagtttacagagggcgcgtttaaggattggggttatcaactcgccagggaggagttcggcggcgaattaatcgacggggggccgtggctgaaagtcaagaatccaaatacgggtaaggagatagtaattaaggatgtgatagcagatgcttttctgcaacaaatcttgttgagacctgcggaatatgatgtgattgcatgtatgaacctcaatggtgactacattagcgatgctctcgccgcgcaagttggtggaattggaatcgccccgggagcaaatattggtgatgaatgcgcactgtttgaagctactcatggaactgcgccgaagtatgcgggccaagataaggtgaaccctggtagcatcattttgtcggcggaaatgatgctgaggcacatgggctggactgaggctgcagaccttatcgtaaaaggcatggagggcgctatcaacgcaaaaactgtaacttacgatttcgagcgactgatggatggggcaaaactacttaagtgctcagagttcggagatgccataattgaaaacatgtaa

SEQ ID NO: 2388 - DNA, 414 bp, Artificial Sequence
  Optimized genes for E. coli.
atgagtgaggctctcaagatactgaataacattcgtactttaagggcacaggcgcgggaatgcactctcgagacattagaagaaatgttggagaaactggaggttgtcgtgaatgagcgacgtgaggaggaatctgccgcagcagcggaagttgaagagcgtacgaggaagctacagcagtaccgtgaaatgcttatagcggatgggatagaccctaacgaactgttgaatagtttggctgctgtaaaaagtggtacgaaagctaagcgagctcagaggccggcaaaatacagctacgtggatgaaaatggggaaaccaagacctggacagggcaaggtcgtacaccggcggtgatcaagaaggccatggacgaacaaggaaagtctttagacgacttcctcatcaaacagtga

SEQ ID NO: 2389 - DNA, 1632 bp, Artificial Sequence
  Optimized genes for E. coli.
atgactaacatcacgaaaaggtcactcgtagccgctggagtacttgcagctctgatggcagggaatgtagcacttgcggcggacgtgccggccggagttaccttggctgagaagcaaacgctagtcagaaacaacggttcagaagttcagtccttagacccccacaaaatagagggggtaccggagagtaatataagtcgtgaccttttcgaaggtctattggtatctgacttagacgggcatccggcacccggtgtggctgagtcatgggacaataaagacgcaaaagtttggacgtttcatttacgtaaagacgctaaatggtccgatggaacgcctgttacggcgcaagatttcgtttactcatggcagcgcagtgtggatccgaataccgcgtctccatacgcttcttatcttcagtatggacatatagccggcatcgatgagatccttgaagggaaaaaacctataactgatttaggagtaaaagccatcgatgatcacactttagaggttacactcagcgaacctgtgccttatttctataaattgctcgttcacccgtccacgtccccggtaccgaaggcagctatcgagaaatttggtgaaaaatggactcaaccagggaatattgtgacaaacggcgcgtatactctcaaggactgggttgtcaacgaacgcatcgtactggagcgatcgccaacttactggaacaatgcgaagacggtaataaatcaggtgacctatcttcctatcgcatcagaagtcacggatgtcaatagatatcggtccggggagatcgatatgaccaacaacagtatgcctatcgagttatttcaaaaactgaagaaggaaattcctgacgaggtccacgtagatccgtacctctgcacttactactatgagatcaacaaccaaaaaccgccattcaacgatgtccgcgttcgcaccgcactgaaacttgggatggacagagatataatcgttaataaagtcaaggcacaaggcaacatgcccgcttatggttataccccgccgtataccgacggcgcgaagctcacccaaccagaatggttcggatggtcccaggaaaaacgaaacgaagaggcgaagaaattgttggcggaagcgggctataccgcagacaaaccgttaaccataaatctgttgtacaatacttctgatttgcataagaagttagcgatagccgcttcctccttatggaagaagaatattggggtgaacgtgaaactggtcaaccaggagtggaaaacttttcttgacactcgccaccagggaacctttgatgtggcaagagcgggatggtgtgccgactacaacgagcctacgtcctttcttaataccatgttgagcaactcgtcgatgaatacggcccactataagagccccgcatttgattcaattatggccgagactttgaaggttactgacgaggcacagcgcaccgcactttacactaaagcagagcaacaattggacaaggactcagcgatagtccccgtctattattatgtcaacgcgcgtttggtcaagccttgggtgggtggttatacgggaaaagatcctctagataatacctacacgcgcaatatgtatatcgtgaaacactga

SEQ ID NO: 2390 - DNA, 507 bp, Artificial Sequence
  Optimized genes for E. coli.
atgagtcagacagtgcatttccagggcaatccggtaacggtcgcgaatagtattccccaagctggtagcaaagcacagacattcacattggtcgcgaaggatctttccgacgtaacgttgggccaattcgctggaaaaagaaaggttttgaatatctttccgtcaattgacacaggggtttgcgcagcgtcagttcgcaagttcaaccagctcgccacagaaatagacaacacagtagtcctctgtatttcggctgatcttccgttcgctcaatcgaggttttgtggagctgaaggcttgaacaacgtaataaccctgtccacatttcgaaacgcggagttcctccaggcatacggtgtagcgatagctgacggaccgttaaagggactagcagcgagagcagtggttgtaattgatgagaatgataatgttattttctcacagttagtagatgaaatcactactgagcctgactatgaggccgcgctggcggttttgaaagcgtaa

SEQ ID NO: 2391 - DNA, 138 bp, Artificial Sequence
  Optimized genes for E. coli.
atgaagtctaatcgtcaggcacggcacattctcggtctggaccataaaattagtaatcagcggaagatcgtgaccgagggtgacaaaagttcggtagttaacaatcctaccggacgcaagcggcctgcggagaagtaa

SEQ ID NO: 2392 - DNA, 342 bp, Artificial Sequence
  Optimized genes for E. coli.
atgaagattaccttaagcaaaaggatcggcctgttggccatactcctcccgtgcgctttggcgctatcgacaactgtgcacgccgaaaccaacaaactagtgatagaatccggcgatagcgcgcaatcgcgacagcacgccgccatggagaaggagcaatggaacgatactcgcaacctcagacagaaggtaaataagaggacagagaaggagtgggacaaggcggatgcagctttcgataaccgtgacaaatgcgagcagtcggctaacatcaacgcctattgggagccaaatactctccgttgccttgatcgccgtaccggaagagttatcactccgtaa

SEQ ID NO: 2393 - DNA, 1533 bp, Artificial Sequence
  Optimized genes for E. coli.
atgcgcattgggatcccaagagaacgccttacgaacgaaacgcgggtcgctgcaactccaaagaccgtggagcaactattgaagctaggatttacagtagcggtcgaatctggggctgggcagctcgcgagttttgacgataaagcctttgtccaggcgggagcggaaatcgtagaagggaattctgtatggcagagtgaaataatcttaaaggttaatgctccgcttgacgacgagatagcactactaaatccgggaaccacgctagtaagtttcatctggcccgcacaaaacccagaactaatgcaaaaactagcggagcgaaatgtgactgtcatggcaatggacagcgtaccgcgcattagtagagcccaatcgctagacgctctgtccagtatggccaatattgcggggtaccgtgcgattgtagaagctgcccacgaatttggaaggttttttacgggccaaattacagctgctggaaaagttccaccagccaaggtaatggtaatcggggctggagtcgcggggctcgcagcgataggggccgctaattcattaggggcaatcgttcgagcgttcgatactcgtcctgaagtcaaggagcaggtccaaagtatgggcgcagagttcctcgagcttgacttcaaggaggaggccgggagcggtgatgggtacgccaaagtcatgtctgatgcttttataaaggcagaaatggagttattcgccgcgcaggcaaaggaagtggacatcatagtcacaacggcattaatcccggggaagccagcccctaaattaattacgcgggaaatggttgacagtatgaaagcagggtcagtgatcgtggatctggccgctcagaatggtggaaactgcgagtatacagtgccgggtgagattttcacgaccgaaaatggagtaaaggtcatcggctatacagaccttccgggcagactaccaacccaatcatcacaactttatggaactaaccttgtgaacctactgaaactattatgtaaggagaaagatggtaatataacagttgacttcgatgatgtcgttatccggggagtgaccgttatccgcgccggagagataacatggcccgcaccccccatccaggtttctgcacagccgcaagcggctcaaaaagctgccccggaagttaagaccgaggaaaagtgtacttgtagtccgtggcgtaagtatgctctgatggctctagcaattatattattcggttggatggcctcagttgctccgaaagaatttcttggccattttaccgtgttcgcactggcttgcgtagtcggctattatgtggtttggaacgtatcacatgcccttcatacaccgttgatgagtgtaacgaatgcaataagcggaatcattgtcgtaggcgcgctactacaaattggtcaaggcggttgggtcagctttttaagtttcatcgccgtcttgatcgcgtcaataaatatatttggcgggtttactgttacgcagcgaatgctgaaaatgttcagaaagaattga

SEQ ID NO: 2394 - DNA, 468 bp, Artificial Sequence
  Optimized genes for E. coli.
atgataaaaagagtactggtggtgtcaatggtagggctttcgctagtcggctgtgttaacaacgacacactcagtggagatgtctatacagcctcagaggccaaacaggtacagaacgtgtcgtatggcaccatagtgaatgtgcggccggtacaaatccaaggcggcgatgatagcaacgtaattggtgctataggcggggcggtcctaggtggctttttgggaaatacggttggcggtgggacggggcggtcattagcgaccgcggcgggagccgtggcaggtggggttgccggacaaggtgtacaaagcgcaatgaataaaactcagggagtcgagttggagattcgcaaagatgacggaaatacgatcatggtcgttcagaaacagggcaacacgcgcttttcccccggccaacgggttgtcctcgcttccaacggatcacaggtgactgttagtcctcggtga

SEQ ID NO: 2395 - DNA, 582 bp, Artificial Sequence
  Optimized genes for E. coli.
atgagctttgaactacccgcccttccttatgcaaaggatgcacttgcaccccatatctcggccgaaacaatagagtaccactatggtaagcaccaccaaacatacgtaaccaaccttaataatctgataaagggaactgcttttgaaggtaagagtctggaagagattatacgaagtagtgaaggtggcgtcttcaataatgcagcccaggtttggaatcacaccttctattggaattgtttagcacctaatgcagggggagaaccaactgggaaagtagccgaagcgattgctgcgtcgttcgggtccttcgccgatttcaaagcccaatttacggatgccgctatcaaaaatttcgggtccggctggacgtggttagtcaagaactcagatggaaagttagcgatcgttagcactagcaacgccggaacgccactgactacagacgccaccccattgttaaccgttgatgtatgggagcacgcgtactatatagactacagaaatgcaaggccgggatatctggaacatttctgggcgctcgttaactgggaattcgtagctaagaacctagcggcataa

SEQ ID NO: 2396 - DNA, 237 bp, Artificial Sequence
  Optimized genes for E. coli.
atgaaggccaccaagttggtgttaggtgctgtcatattggggtcgactttgcttgccgggtgttcctcgaacgccaagattgatcaattatctagtgacgtgcagacgctaaacgcaaaggtggatcaactgtcgaatgatgtaaatgcaatgagatccgacgtacaggcagctaaggacgatgccgcgcgtgctaatcagcggcttgacaatatggcgacaaaatacaggaagtaa

SEQ ID NO: 2397 - DNA, 300 bp, Artificial Sequence
  Optimized genes for E. coli.
atggcattaactaaagcggaaatgtccgagtacctttttgacaagctcggcctcagtaagcgggatgctaaggaactagtggagctgttctttgaagagatccgaagagccttagaaaatggagagcaggtgaagctctccggtttcggaaatttcgatctaagggataaaaaccagcgcccaggacgtaatccgaaaaccggggaggacatcccgattacggcgcgccgggtagtcacgtttcgacctggacagaagttgaagagccgggtcgaaaacgcatctcctaaggatgagtaa

SEQ ID NO: 2398 - DNA, 2388 bp, Artificial Sequence
  Optimized genes for E. coli.
atgaagttcagtgaactctggttgagagagtgggtgaatcctgcgattgacagtgatgccctcgctaaccaaatcacaatggcaggattagaggttgatggggtcgaacccgtggccggttctttccacggggtcgtggtcggagaggtcgtcgagtgtgcacaacatcccaatgccgacaaattaagggtcacgaaagttaacgtgggcggtgaccgcttactggatattgtgtgtggggcgccgaactgccggcaagggctgcgtgtcgcagtggctactatcggggccgtcctaccaggcgattttaaaatcaaggcagcaaagctaaggggtgagccaagtgaagggatgttatgttctttttcggaactgggaatctcagacgatcactctggaattatcgagctacctgcagacgcccccatcgggactgatataagagaatatctcaaactcgacgataatacgatcgagatcagcgtaacaccgaatagagctgactgcttaggtattattggagtggctcgcgatgtcgcagttttaaatcagttaccacttgttcagcccgagatcgttccagtgggggcaactatcgacgataccttgcccattactgtggaagcaccagaagcgtgtccacggtatctgggacgtgttgtgaagggtataaacgtaaaagcgcccacaccactttggatgaaggagaagttgcgccgatgtggaattcgttccatagatgctgtcgtcgatgtaacaaattacgtactgcttgaattggggcagcctatgcatgctttcgacaaggaccgcattgagggcgggattgtggtacggatggctaaagagggtgagacactcgtgttactggatggtacagaagccaaattaaacgctgatactttagtgatcgcagaccacaacaaagccctggcaatggggggtatcttcgggggcgaacacagcggcgtaaatgatgagactcaaaatgtgttactagagtgtgcctttttcagccctttaagtatcaccggacgcgcccgccgtcatggactgcatacagacgcaagtcataggtatgagcggggggttgatcctgcgttgcagcataaggcaatggaacgcgctactcgcttgctcatcgacatatgcgggggtgaagcaggcccggtcatagacatcacaaatgaagctactcttcctaaacgggcgacgataacccttcgacgtagtaagcttgatagattaataggccatcacattgcggacgaacaggtcaccgacattcttcgtagattgggatgcgaggttacggaaggtaaagacgaatggcaggccgtagctccatcatggcgctttgatatggaaatcgaggaagacctagtcgaagaagttgcacgggtttatgggtataacaatatcccagacgagccagtgcaggccagcctaattatggggacccaccgggaggccgatctcagtctcaaacgggttaagacactccttaatgataagggctaccaagaagtgattacctactcattcgtagatcctaaggtacagcaaatgatccatccaggcgtagaggcgttactattgccgtcccctatatctgtggaaatgtcggcaatgcgcctaagcttgtggacaggactgctcgcaacggtcgtttataaccaaaaccgtcagcagaatagggtaagaatatttgagagtggtctacgtttcgtccccgacacacaagcaccgctcggcatccgacaagaccttatgttagcgggggttatctgcggaaatcgctatgaggaacactggaacttggctaaagagaccgtagacttttatgatctgaagggcgaccttgaatcagtactcgaccttactggaaagcttaacgaagtggaatttcgagccgaggcaaatcccgcgttgcatcccggccagagtgcagcaatctatttgaagggtgaacgtattgggttcgtcggagtcgtgcaccctgagttagagaggaagctggatttaaacggccgcactcttgtctttgagctcgagtggaacaaattagccgaccgggttgttccccaggcacgagagatttctcgcttcccagcgaataggcgagatatcgccgtagttgtagcggagaatgtgcctgctgccgacatcttgtcagaatgtaaaaaagtgggtgtaaaccaagtcgtgggtgttaatctattcgacgtttataggggcaagggtgtcgcagaaggttataaatctctcgctatcagcttaatcttgcaggacactagccggacacttgaggaggaagagattgcagcaacagtagccaaatgcgttgaagcgctcaaagagcgattccaggcttcccttcgagattaa

SEQ ID NO: 2399 - DNA, 357 bp, Artificial Sequence
  Optimized genes for E. coli.
atggcgagagttaagaggggcgttattgctcgcgcaaggcacaagaaaatactgaagcaggctaaagggtattacggggctcgctcacgcgtgtacagggttgccttccaggccgtcataaaagcgggacagtatgcctatagggaccgtcggcagcgcaagaggcaatttcgacagctgtggatcgcaaggataaacgcagccgcccgtcaaaatggcatctcatatagcaaatttataaatgggttgaagaaggcgtcggttgaaattgacagaaaaatccttgccgacatcgctgtattcgataaagtcgcttttacggccctggtcgagaaagctaaagccgcattggcataa

SEQ ID NO: 2400 - DNA, 198 bp, Artificial Sequence
  Optimized genes for E. coli.
atgccgaagattaaaacagtgcgcggggccgctaaacggtttaaaaaaacaggtaaaggcggctttaaacataagcatgccaacctgcgccatattctcacgaaaaaggcgactaagcgtaagagacacctccgcccaaaggctatggtttccaaaggcgatcttggtttggtaattgcgtgtctaccctatgcatag

SEQ ID NO: 2401 - DNA, 1929 bp, Artificial Sequence
  Optimized genes for E. coli.
atgcccgtaatcacgttacctgacggatcccagagacactacgatcacgccgtttctcctatggatgtagctttagatatcggaccggggttagcgaaggcctgtattgccggaagggttaatggggaactagtagatgcttgtgacttaattgagaatgatgcccaattatccataatcactgcgaaggacgaagaaggtctggagatcataagacattcttgcgctcatttgttagggcatgctattaaacaactttggccccacacgaagatggcgatcgggccagtaattgacaacgggttctattacgatgtagatcttgatcgcacgcttactcaagaagatgtcgaggctctagaaaagcgtatgcatgaattggcggagaagaactatgacgtaattaaaaagaaagtcagttggcatgaagctagagaaacgtttgcgaacagaggggaatcatacaaagtctctattttggatgaaaatattgctcatgatgacaaacctggactgtatttccacgaagagtacgtggatatgtgccgcggccctcacgtgccaaacatgcgtttttgtcatcactttaaattaatgaagactgcaggcgcttactggaggggagactccaataataagatgttacaaagaatctatggtactgcatgggctgataagaaagcgctaaatgcatatctccagcgcttagaggaagcggcaaaacgggaccacaggaagattggtaaacagttggacctgtatcacatgcaagaggaagcccccggaatggtcttctggcacaatgatgggtggaccatttttcgggagcttgaagtatttgtccgatcgaaactaaaggagtaccagtaccaagaggtaaaaggcccgtttatgatggatagggtcttatgggaaaaaacaggtcattgggataactacaaggacgccatgtttacaacatccagtgagaatcgtgagtactgtataaaaccgatgaactgccctggacacgttcaaatctttaatcagggactcaaatcttacagggacttgcctctcagaatggcggaatttgggagttgtcatcgcaacgagccctcaggttcacttcatggcctcatgcgagttaggggattcacacaggacgatgcccacattttctgcacagaagaacaaattcgagatgaagtcaacgggtgcatcagacttgtctatgacatgtactccacgttcggctttgagaagattgtggtcaaactttcgacaagaccagaaaagcgcattgggtcggatgagatgtgggacagggcagaagctgatcttgcagtggcgttggaggaaaacaatattcctttcgagtaccagctgggtgagggcgctttttatggaccgaagatcgagttcactttgtacgactgcttggatcgcgcctggcaatgtggaaccgtgcagcttgatttctctctaccgtcccgcctatcagcttcatatgttggggaagataatgaaagaaaggttcctgtaatgatccatcgcgcgatacttggctcgatggaacggttcattggcatcctgacggaagagttcgccgggttttttccaacgtggttggcaccagttcaggtagtcataatgaacatcacggattcacaatcggaatatgtcaatgaactgactcagaaattgtcgaacgccggcattagggtcaaggccgacttacgaaatgagaaaataggatttaaaataagggagcataccttgcgacgcgtcccgtacatgcttgtatgtggagataaggaagttgagtcggggaaagtggcagtgcggacacgccgaggtaaggatttaggtagcatggatgtcaatgaggttatcgaaaaattacaacaggaaattagatcaagatcccttaaacagttagaggaatga

SEQ ID NO: 2402 - DNA, 1344 bp, Artificial Sequence
  Optimized genes for E. coli.
atggaccaaacgtatagtctcgagtcctttttgaatcatgtacagaaacgggacccgaatcagacggaattcgcccaggctgttcgggaagtgatgactactctttggccgttcttggaacagaaccccaagtatcgtcaaatgagtctcttggagcgtctggtcgaaccagagcgcgtcatacagtttcgagtagtgtgggttgatgatcggaaccaaattcaagtcaaccgtgcatggcgggtgcaattttcgtccgcgataggcccctacaaaggcggcatgagatttcatccttcagtgaatttgtcgatactcaagttccttggctttgaacaaacgtttaaaaatgccctaacgaccttacccatgggtggcgggaagggtggatcagattttgaccccaagggcaagtcggaaggagaagtcatgcggttttgccaggcccttatgaccgagctttataggcacttgggcgcagacacggacgttcccgcgggggatataggtgttggcgggcgtgaggtcggttttatggcgggtatgatgaagaaactctcgaataacaccgcgtgcgtattcaccgggaaaggactctcatttggaggctcgttaatacgacctgaggcaactgggtacggattggtttattttaccgaggccatgttgaaacggcacggtatgggctttgaaggcatgcgggtatccgtaagtggtagtggtaacgtggcgcaatacgccattgaaaaggccatggagttcggagcgcgcgttatcacagctagtgatagctccggaaccgtagtcgacgagtccgggtttaccaaagagaaactcgcacgcctcatagaaatcaaggcgtcgagagatggaagagtagccgactacgcgaaagaattcggcttagtttatcttgagggacagcaaccgtggtcgttaccagtagatatagctttaccatgtgctacccagaatgaacttgatgtggacgcagctcaccaactcattgccaacggggtgaaagctgtcgcggaaggggcaaatatgcctaccaccatagaggccacggagctatttcagcaagcaggtgtacttttcgcgcccggtaaggcggcgaatgccggtggggtcgcaacatctggtcttgaaatggcccagaatgctgcacggctcggatggaaagcagagaaagtggacgctcgcttgcaccacattatgctggatattcaccatgcgtgtgtcgagcacggaggcgaaggcgagcagaccaattatgtgcaaggggcaaacatagcaggttttgtcaaggtggctgatgcaatgcttgctcaaggcgttatttaa

SEQ ID NO: 2403 - DNA, 996 bp, Artificial Sequence
  Optimized genes for E. coli.
atgaccattaaagtcggaattaacggtttcggtagaattggccgcatagtcttccgtgcagctcaaaagaggagcgacatagaaatcgtggcaatcaatgacttgctagacgcggattatatggcatatatgctgaagtatgattctacacacggtcgattcgacgggacggtggaagtcaaagatggacatctcatagtaaatggtaagaaaattagagtaacagctgaaagggacccggcaaacttgaaatgggacgaggtcggggtggatgtagttgccgaagctaccgggctatttttaaccgatgaaactgcgcgcaaacacattacagcgggtgctaaaaaagttgtgatgaccggaccatccaaggacaacacgcctatgttcgtaaaaggagctaacttcgacaagtacgcgggccaagatattgtatctaacgcatcgtgcacaaccaattgtctcgccccattggccaaagtaatcaacgataactttggaatcatcgagggattaatgacgaccgtacatgctacaacggcaacccaaaaaacggtggacggtccctcacataaagactggcgggggggacgtggtgcttcccagaatataatcccatcatcaaccggtgctgcaaaagcggttggtaaagtacttcccgaactaaacggcaaactgacaggcatggctttcagggtgcccacgccgaatgttagcgtagtcgatctcaccgtacggctagagaaagccgctacttatgaacaaattaaggcggcggttaaagcagcggctgagggagaaatgaagggtgttctaggctatacagaagacgacgttgtctctacagacttcaatggtgaggtctgcaccagtgtttttgatgcgaaggcgggtattgcactgaacgacaactttgttaaactcgtatcttggtacgataatgaaactggttatagtaacaaggtgctagacttgattgcgcatatctcgaagtaa

SEQ ID NO: 2404 - DNA, 801 bp, Artificial Sequence
  Optimized genes for E. coli.
atggagattacgactcttcagatagtactcgtattcatcgtcgcttgcattgctgggatgggctccatactggacgaattccagtttcatcggcctctcatcgcatgtacactcgttgggattgtcttaggagacatgaagaccgggatcattatcgggggcactcttgagatgatcgctctgggctggatgaatataggtgccgccgttgctccagacgccgcacttgcgagcataatcagtactattctagtgatcgctggccaccaaagtatcggcgctggtatagcattggctataccgttggcggccgccgggcaggtgcttacgatcatcgttcggactataacagtggcgttccagcacgcagctgacaaagcggccgataatggcaatctgaccgcaatcagctggattcatgtatcgtcgttattcctgcaggcgatgagggtggcgattccggctgtaattgtcgcgctaagcgtgggaacttccgaagttcaaaatatgctaaacgctattcctgaggtcgttacgaatgggctaaatattgcaggcggtatgattgttgtcgtaggttatgcaatggtaatcaacatgatgcgcgcaggctacttgatgccatttttttatttaggttttgtgacggcggcatttactaacttcaatttagtagctttgggagttatagggacggtaatggctgtgctttacatacagctgtcccccaagtacaatcgcgttgcgggagcccctgcccaggctgcagggaataatgacctggacaatgaattggattaa

SEQ ID NO: 2405 - DNA, 210 bp, Artificial Sequence
  Optimized genes for E. coli.
atggcaaagattaaagggcaagttaaatggtttaacgagagtaaaggtttcggtttcattactcctgcggacgggtctaaagacgtgttcgttcacttttcggctatccaagggaatggattcaaaactttggccgagggtcaaaatgtcgaatttgaaatccaagatggccagaaaggcccagcggcagtcaatgtaacagcaatttag

SEQ ID NO: 2406 - DNA, 144 bp, Artificial Sequence
  Optimized genes for E. coli.
atgtgtggcattttctcaaaggaagtgctttccaaacatgttgatgtcgaatatcggttcagcgcagaaccgtatattggggcatcatgctccaatgtctccgtcttatctatgctttgcttaagagccaagaaaaccatctga

SEQ ID NO: 2407 - DNA, 801 bp, Artificial Sequence
  Optimized genes for E. coli.
atgaagttggcacatttgggacggcaggcgcttatgggggtcatggcagtggccctggttgccgggatgtcagttaaatcgttcgcagatgagggattacttaataaagttaaagagcgcggtaccctattagtaggacttgagggcacgtacccccctttctctttccaaggggacgacgggaaattgacaggttttgaggtggaattcgcacagcaattagcaaagcatttaggagttgaggctagcttaaaacctacaaagtgggatggtatgttagcatcgttggactccaaacgcatcgacgttgttatcaatcaagttacgatttcagatgagcgaaagaaaaagtatgacttttctactccatacaccatttctggaatacaagcacttgttaagaagggaaacgaaggtactatcaagactgccgacgacctcaaggggaagaaggtcggggtcgggttggggacgaattatgaagaatggctgagacagaatgttcaaggtgtagacgttaggacttatgatgatgacccaaccaaataccaagacctccgcgtaggccgtatagacgccatcttggtagaccgactagccgcactggacttagtcaaaaaaacaaatgacacactagctgttacgggcgaagcatttagtcgacaggaatcaggtgtggccctccgtaagggcaacgaggatttattgaaggccgtgaacgatgccattgccgagatgcagaaagatggtaccctgcaggcacttagcgagaagtggttcggcgcggatgtaaccaaatag

SEQ ID NO: 2408 - DNA, 330 bp, Artificial Sequence
  Optimized genes for E. coli.
atggaaactacgaagccatccttccaagacgtcctagagtttgtacgattatttcgtcgtaagaataaactccagcgagagatccaagacgtcgaaaagaaaatacgggacaatcaaaagagggttctcctcctcgacaacctatccgattatattaaacccggaatgtcagtagaagcaatccaaggaattatcgcatctatgaaaggagactacgaagacagggtagacgactatataataaaaaacgcagaactatcgaaagagagacgcgatatatcaaaaaagctgaaagcgatgggagagatgaagaacggagaagctaaataa

SEQ ID NO: 2409 - DNA, 1407 bp, Artificial Sequence
  Optimized genes for E. coli.
atgagcaagcaacagatcggggttgttggtatggcggtaatgggacgtaacttagctcttaatatagagtcgcgaggttacacggtatcgatctttaatcgctcaagagaaaagacggaggaggtcattgcagaaaacccaggcaaaaaactggtcccttactatacagtaaaggaattcgtcgaatctttggagactccccggagaattctacttatggtgaaggccggagcaggaacagacgcggctatagacagtcttaagccatacctagacaagggcgatataatcatagacggggggaacacgtttttccaggacaccataaggcgcaaccgggaactttctgccgaaggatttaatttcataggcaccggcgtgtctggtggagaggaaggagcgctcaaaggaccttctataatgcccgggggtcaaaaggaggcgtacgagttggtagctcctattctcacgaagatcgcagccgttgcagaagatggggaaccctgcgttacatatataggggctgacggtgctggccattacgttaagatggtgcacaacggcattgaatatggagacatgcaacttatagctgaagcatacagcttgctaaagggcggactcaatctcaccaacgaagagttagcgcagaccttcacagaatggaataacggtgaactttcctcatatctaattgacatcacgaaagacatatttacgaagaaggatgaagacggcaattacttagtcgacgttattctcgacgaggcggcgaacaaaggcactggtaaatggacatctcagtcggcgttagaccttggagaaccactatcactgatcacagaatccgtcttcgctcgttatatctcgtcgctcaaagatcagcgcgtagcggcctccaaagtattatcaggtccccaagctcaacccgcgggtgataaggcagagttcatagagaaggtccgccgcgctctgtacctcggtaagatagtgtcttacgcgcagggattttctcagctccgcgcggcatcagaggagtataactgggatctgaattacggagaaatcgctaaaatcttcagggcgggctgtattattagggcgcagtttctccagaaaattaccgacgcgtatgcggaaaatcctcagatagcaaatttactgcttgcgccgtattttaagcaaatagctgacgactaccaacaggctctacgcgatgtcgttgcctatgcggtacaaaacgggatacccgtgccgacgttctccgccgccgtagcgtactacgacagctaccgggctgcagtgttgcccgctaatctaatacaggcccagagggattatttcggagcccatacttataagagaatagacaaggagggtgttttccatacagaatggcttgattga

SEQ ID NO: 2410 - DNA, 285 bp, Artificial Sequence
  Optimized genes for E. coli.
atgaagagaaaaattatagttgcttgtggcggcgcagtagcaacctctacaatggccgcagaagaaatcaaagagctttgtcaaaaccacaacattcccgttgaacttatccaatgccgggtaaacgagatcgaaacctacatggatggcgtgcacctgatttgtactacggccaaagtagacaggtcattcggggacatcccgttggtgcatggcatgcccttcataagcgggataggtatcgaagccctacaaaataaaattctcacgattctgcaaggataa

SEQ ID NO: 2411 - DNA, 453 bp, Artificial Sequence
  Optimized genes for E. coli.
atgactaacctattcgtccgcagtggtatatcgttcgtagaccgttcagaggtgcttactcacattgggaacgaaatgctagcaaagggagtagtacacgacacatggcctcaagccctcattgcacgtgaggcggagttcccaactggtataatgctagagcaacatgctatagcgatccctcactgcgaagccatacacgctaaatcctccgcgatctaccttctacggcccacaaataaagttcacttccaacaagctgacgacgacaacgatgttgcagtgtccctagtaatcgccctaatcgttgagaatcctcagcagcaattaaaactgctacgttgccttttcggtaaactgcaacagccggatatcgtcgaaacactgataacacttccagagacccagttaaaggagtatttcactaagtatgttttggactcagatgagtaa

SEQ ID NO: 2412 - DNA, 1263 bp, Artificial Sequence
  Optimized genes for E. coli.
atgaaaactctcatcgccagacataaagcgggtgagcatataggtatatgctctgtctgctctgcacatcccttagtaatagaagcggctctggcctttgatcgcaacagcacacgcaaagtgctcatcgaggctacttctaatcaagtcaatcaattcgggggttataccggtatgacaccggcagactttcgggagtttgtcttcacaattgcagataaagttgggtttgcaagagaacgaattatattaggtggtgaccatctggggcctaattgttggcagcaggagaacgcggatgcagctatggagaaatctgtcgaattagtaaaggagtatgttagagcagggttttccaagattcacttggacgccagcatgtcctgcgctggggatccaataccgcttgctccagaaaccgtagctgagagagcggcagtattgtgctttgcggcagaatcagttgctacagattgccaaagggagcaactgtcctacgtcatcggaaccgaggtgcccgtgcctggtggtgaggcctctgcaatccaaagcgttcacatcacacatgtagaagacgcggcgaacactttgagaactcaccagaaggcatttatagccagaggacttacggaggccctaaccagggtcattgcgatagtggtccaaccgggggtggaattcgaccactcaaatataatacactatcaaccgcaggaggcgcaaccattagcacaatggatcgagaacacccgcatggtttacgaagcccattcgaccgactatcagactcggactgcctattgggagctagtacgggatcatttcgccattttgaaagtggggcctgcacttacgttcgcattgcgagaagcaatcttcgcactcgcacagatcgagcaggaactgattgcaccggaaaaccgttccgggtgtctagctgtcattgaagaggtgatgctagatgaaccgcagtattggaagaagtactatcggactggctttaacgattcgctattagatattaggtactcgttgagcgaccgtatacgttattactggccgcattccagaataaagaactcggtggaaaccatgatggtcaacctggaaggcgtagacatacccttagggatgatatctcagtatttaccgaagcaatttgaacgcatccagtcgggcgaactatcagctattccgcaccaacttattatggataagatctatgatgttcttcgtgcatataggtatggctgtgccgaatag

SEQ ID NO: 2413 - DNA, 855 bp, Artificial Sequence
  Optimized genes for E. coli.
atgtatgtggtctctactaaacaaatgttaaataacgcgcagcgtgggggttacgcagttccggctttcaacatacataaccttgaaacgatgcaagtcgtcgtcgaaaccgccgctaatttacatgccccggtaatcattgccggtacgcctggaaccttcacgcatgcaggtaccgaaaatttgctggcattggtgtcggcgatggccaaacagtaccatcacccactcgctatccatcttgatcaccatacgaaatttgatgatatagcgcaaaaggttcgatctggagtgcgatctgtgatgatagatgctagtcacctcccctttgcacaaaatattagtagagtgaaggaggtcgtggatttttgtcatcgctttgatgtatctgttgaagcggaactcggtcagctgggagggcaggaggacgacgtgcaagtgaacgaggcagatgcgctttacacgaaccctgcacaagctcgagagtttgctgaggccacggggatagatagcctcgcggtcgcgattggaaccgctcacggcatgtatgcgtcggctcctgcgctcgatttctcgaggctggagaacattagacagtgggtcaacctccccctcgttctccacggggcctctggcctgtccaccaaagacatccagcaaacaatcaaactaggtatatgcaaaattaatgttgccacggaacttaaaaacgcattttctcaagcactgaaaaattacctaactgagcaccccgaagcaacagacccccgggattacttacaatcggcgaagtcggcaatgcgcgatgtcgtatctaaggtcattgccgattgtggctgcgagggacgggcctaa

SEQ ID NO: 2414 - DNA, 567 bp, Artificial Sequence
  Optimized genes for E. coli.
atggtgaaaagccaacccattctccggtacattttgcgcggcatacctgccattgccgttgcggtccttcttagtgcttgctctgccaacaatacagcaaaaaacatgcatcccgagacgcgagctgtaggatcagagacatcctcactgcaagctagtcaagatgaattcgaaaacttagtgaggaatgtagacgtgaaatctcggataatggaccagtacgccgattggaaaggtgtacggtaccgccttgggggatcgacgaaaaaggggatcgactgctccggcttcgttcagcgtaccttcagagagcaattcggactggagttaccgcgcagcacgtacgaacaacaggagatgggaaagagtgtatcccggagtaaccttcggacaggcgatcttgtactcttccgggctggatccacaggcagacatgttggtatctatatagggaacaatcagttcgttcacgcatccacgagctcgggcgttatcattagcagcatgaatgagccctattggaagaaaaggtataacgaagcccggcgcgttttgagtcgttcttaa

SEQ ID NO: 2415 - DNA, 285 bp, Artificial Sequence
  Optimized genes for E. coli.
atgtttacgattaacgcggaggttcgaaaagagcaaggtaaaggcgcgtctagacgattacgcgcggcaaacaagtttccagcaataatttatggaggcaaagaggcacctctggcgatcgaattagaccatgacaaggtgatgaacatgcaggctaaggcggagttttattcagaagtcttgacgatagtcgtggacggaaaagaaataaaagtgaaagcacaagatgtacagcgccacccttataaaccgaaattgcagcacattgacttcgtgagggcttaa

SEQ ID NO: 2416 - DNA, 1104 bp, Artificial Sequence
  Optimized genes for E. coli.
atgaaggtaaaagtcctgtcgctacttgtccctgccttgctcgtagctggcgccgcgaatgccgcagaagtgtacaataaagatgggaacaaactcgacctatatgggaaagtcgatggcctacattatttcagcgataataaagacgtcgatggagaccaaacgtacatgagactcgggttcaagggcgagacacaagttacggatcaactgacagggtacggtcagtgggagtaccagattcagggtaatagtgctgaaaacgagaacaattcctggacccgagtagccttcgctggacttaagtttcaagacgtgggctcattcgattacggacgcaactacggtgtcgtctatgatgtgacatcatggacagacgtactgccagagttcggtggcgacacttacgggtccgataactttatgcaacagcgtggtaacggttttgctacgtaccggaacactgacttcttcggtttagttgatggcttgaactttgcggtacaatatcaaggtaagaacgggaacccctcaggtgaaggctttacctcgggcgtaactaacaacggacgtgacgccttaagacaaaacggagacggcgtgggcggctcaatcacctatgattatgagggcttcggtatcggaggtgccatcagctcttctaagcgtactgatgcgcagaatactgctgcatacatcggcaatggggatagggccgaaacgtataccggagggttaaaatatgacgcaaataatatatatcttgctgcacagtatactcagacgtacaacgccacgcgcgtaggaagccttgggtgggcaaacaaggctcagaacttcgaagcggtagcgcaataccagtttgatttcggattgagacccagtttagcttacctgcaatcgaaaggcaaaaatttggggcgcggctacgatgatgaagatattctgaaatatgtggatgtgggcgcaacttattacttcaacaagaatatgagtacatacgttgattacaagataaatctactggatgacaaccaatttacccgggacgcaggtataaacacggataatattgttgccctaggtcttgtttaccaattttag

SEQ ID NO: 2417 - DNA, 501 bp, Artificial Sequence
  Optimized genes for E. coli.
atgcacgaaaaccaacagcctcaaactgaggcctttgagttaagcgcagcagagcgagaagctatcgagcatgagatgcaccattacgaagaccccagggcggccagcatagaggctctgaaaatagtccaaaagcaacgtggctgggtgccggatggggcgatccacgctatcgcggatgtcttaggcattccggcttcagatgtagaaggggtagctaccttttattcgcaaattttccggcaacccgtgggaagacatgtcattagatattgcgactcggttgtctgccacataaatggttatcaggggatacaggccgccttagagaagaaacttaatataaaaccggggcagacgacatttgatggacgctttacgttactccccacatgctgtctcggcaactgcgataaaggacctaatatgatgatagacgaggacactcatgcgcatttaacaccagaagcgataccggagttactcgagcgttataagtag

SEQ ID NO: 2418 - DNA, 1203 bp, Artificial Sequence
  Optimized genes for E. coli.
atgtcatcgaaattagtgttggtgctaaactgcggatcctcgtcccttaagttcgcaatcatagatgcagttaacggggaggagtacctttcaggacttgccgaatgttttcacttaccagaagctcggattaagtggaagatggatgggaacaaacaggaggcagcgcttggagcgggtgcagcacattccgaagcgctgaactttatcgtaaatactatactggctcagaagcctgaattatcggcgcagctgaccgccattggtcatcggatcgtgcacggaggcgagaaatacaccagcagtgtcgtaatcgatgagtctgttatacaagggataaaagacgcggcatcctttgcgccgctgcacaacccagcacatttaattggtatagaggaggcactcaagtccttcccacaattgaaggataagaatgtcgcagtgtttgacacggcatttcatcagacgatgccagaagagtcatacttatacgccttgccctataacctttataaggaacatggcataaggcggtatggtgcgcatgggaccagtcacttttacgtcacacaggaggcggcgaaaatgctcaacaaacccgtggaggaattgaatatcataacttgccatctagggaacgggggcagtgtcagcgctataaggaacgggaagtgcgtagacacaagcatgggactaactccgttggaagggctcgttatgggtacaaggtctggcgatattgatccggccatcatatttcatcttcatgatacactcggaatgagtgtggacgctataaacaaattgctaacaaaggagtccgggctcctggggctgaccgaggttacgtctgactgccgatacgttgaggataactatgcaacaaaagaagacgcgaaacgcgcgatggatgtgtactgccataggttagcgaagtacattggcgcttacacggctctcatggacggcaggctggacgccgttgtgtttaccggggggattggtgagaatgcggctatggtacgtgaactgagtttaggtaagttaggtgtgctagggttcgaggtcgaccatgaacgcaacttagcggcccgatttgggaagtcgggcttcataaataaagaaggaacccgaccagcagtggtcattccgacgaacgaggagttagttatcgcacaggacgccagtagacttaccgcgtag

SEQ ID NO: 2419 - DNA, 1221 bp, Artificial Sequence
  Optimized genes for E. coli.
atgaagcgggccgtcatcacaggactaggcatcgtaagctccatcggcaataatcagcaagaagtcctggcgtctctccgcgaagggcgttcgggtattactttttcccaggagctcaaagactccggtatgcggtcgcatgtctgggggaatgttaaattggataccactggcctaatagatcgtaaggttgtccgctttatgtctgatgcgtccatttacgcgttcctctccatggaacaagccatcgccgacgcggggctgagcccagaagcatatcagaataaccctcgcgtgggtttgatagctgggtctgggggtgggtccccgcgttttcaggtttttggcgcagatgcaatgcgtggcccgagggggctgaaggcagtgggaccatacgtagtgacgaaggcaatggcttcgggtgtgtcagcttgcctcgcgacgccgtttaagattcatggtgttaactactccattagctccgcatgcgccacatctgcccattgcatagggaatgcggttgaacaaattcagctaggcaagcaagacatcgtatttgcaggcggcggtgaggagctttgctgggaaatggcctgtgagttcgacgcgatgggggccctctccactaagtacaacgacaccccggaaaaagcttcccggacgtatgacgcccatagggacgggtttgtaatagccggtgggggaggtatggtggtagtggaagagttggaacacgccttagccaggggagcccacatttatgctgagatcgtcggctacggagctacatctgacggggccgatatggtcgcaccaagcggggaaggggccgtcaggtgcatgaagatggcgatgcacggagttgatactccaattgattacctcaacagccatggaacgtcgacgccggtgggggatgtaaaggagttagctgccatccgagaagtttttggcgataagtcaccggctatcagcgcaactaaagctatgacaggccattccttaggagcagctggtgttcaggaggccatctattcattactaatgttggaacatgggttcattgcaccatcaataaatattgaggaactggatgaacaggctgcagggttgaacattgtgaccgaaacgacggatagagaactgactacagtaatgtccaactcgtttgggttcgggggaacaaatgcaactctggtgatgcgaaagcttaaggattag

SEQ ID NO: 2420 - DNA, 972 bp, Artificial Sequence
  Optimized genes for E. coli.
atgtcgaaaatcttcgaggacaacagtcttacaatcggtcataccccgctggtcagactgaaccgtattgggaacgggcgaatactagccaaggtcgaatcacgcaacccttcattctccgtcaagtgtcggatcggtgcaaacatgatttgggatgccgaaaagcggggtgttctcaaaccgggagtggagttagtggagccgacatctggcaatactggtatcgccctagcgtacgttgcggctgcacgaggttataaactgacactcacaatgccagagacaatgagtatcgaaaggcgcaaactgttaaaggccctaggggcgaacctcgtattaaccgaaggggcaaagggcatgaagggggcaatccaaaaagcagaagagattgtagcaagcaatcccgaaaaatatcttcttctccagcaattttcaaacccggccaatccagagattcatgagaagacaactggcccagaaatctgggaggataccgacggacaggtggatgtattcattgcaggggttggcaccggtggaacacttacgggggtctcacgctatataaagggaactaaaggcaagacggatctaataagcgtggcagtggagccaaccgactcaccggtcatagctcaggcgctggctggagaggaaattaagccgggtcctcacaaaatacaagggattggcgcaggtttcatccctgctaatcttgacttaaagcttgtagataaggtaatagggataacaaacgaagaagctatcagcactgcacgacgcttaatggaggaagagggtattcttgccggtataagttccggcgccgcggttgcggcagcactaaagctacaagaagatgagtcttttacgaacaaaaatatcgttgttattctaccatcctccggtgagcggtatttgtcaacagcactgtttgctgacctcttcaccgaaaaggaacttcaacagtag

SEQ ID NO: 2421 - DNA, 258 bp, Artificial Sequence
  Optimized genes for E. coli.
atgtttcaacaagaggtgactatcaccgctccaaacggtctccatacgcgacccgccgcacagtttgtcaaggaagcaaagggcttcacgtcggagataactgtgacaagcaatgggaaaagtgcatcggccaagtcgctttttaaacttcaaaccctaggcctgacccaagggacagtggttacaataagcgcagaaggtgaggatgaacagaaagccgtagagcatctagtgaagttaatggccgagcttgaataa

SEQ ID NO: 2422 - DNA, 1728 bp, Artificial Sequence
  Optimized genes for E. coli.
atgatctccggcatccttgcatctcccgggatagccttcggaaaggctcttcttcttaaagaggacgaaatagtaatcgaccgaaaaaagatatctgcggaccaggtagatcaagaggtcgaacggtttctgtcagggcgtgcaaaagcgtcggcccaattggagacgatcaagaccaaagcaggggagacgttcggcgaagaaaaggaggccatctttgaagggcatattatgctcctcgaggatgaagaattggaacaggaaattatagcgttgattaaagacaagcacatgactgcagatgcggcggctcacgaggtgatcgaaggccaggcttccgctttggaggaattggatgatgagtatcttaaagaacgagctgctgacgtacgagacataggcaagcgtctcctacggaatatccttgggctaaagataatcgacttaagtgccattcaggacgaggtcatactagttgctgcagatcttaccccatccgaaaccgcacaactgaatctaaagaaggtgttagggtttataacggacgcggggggtaggacaagccatactagcatcatggcgcgctcactagagctaccagccatagtaggtacagggagtgttacgtcgcaagtgaaaaacgacgactacttgatattagacgcggttaataaccaagtctatgtaaacccgactaacgaggtgatcgacaagatgagggcggtacaggaacaggtagcgagcgaaaaagccgagttagctaagttaaaagacttgcccgcaatcaccttagacggccaccaggtagaggtctgcgcaaacatcggcacagtcagagacgtagagggagcggagcgtaacggggctgagggagttggactgtatagaacagaattccttttcatggatagagacgccctgccgactgaggaagaacagtttgcagcttacaaagccgtcgcagaagcatgcgggtcacaggcggtaattgtgcgaactatggatatagggggggataaggaattaccctacatgaacttcccgaaagaggaaaatcctttcctcgggtggcgtgctataaggatagccatggataggagagaaatactcagggatcaattacgcgcaatactgcgggcaagtgcctttggaaagctacggataatgttcccaatgatcataagcgtggaagaagtaagggctttgagaaaagagatcgagatatacaagcaggaactaagagatgaaggaaaagcatttgacgagtcgatcgagatcggagtaatggtagaaaccccagctgctgccacaatagcgagacacctagctaaagaggtagacttcttctctattgggactaatgatcttacccagtatacgcttgcagtggaccgtggaaatgatatgataagtcacctttaccaaccgatgtctccgagtgttctgaatttaattaaacaagtgatcgatgcgtcgcacgcagagggtaaatggacagggatgtgtggcgaattagcgggcgacgaaagggccactcttctattactgggcatggggttagacgagtttagtatgtcagccatatccattccaagaatcaagaagatcattcgaaatactaactttgaggatgcgaaagtcctcgctgaacaagcgttagcgcaaccgacaactgatgagctgatgacgttagttaataagttcatcgaagaaaaaacaatttgctaa

SEQ ID NO: 2423 - DNA, 510 bp, Artificial Sequence
  Optimized genes for E. coli.
atgggcctgtttgacaaacttaagtcgcttgtctccgacgataagaaggatacggggaccatcgagattattgctcctttgtcgggcgagatcgtaaacatcgaagacgtgccggatgtggttttcgctgaaaagattgttggagacggaattgcgataaagccgacgggtaacaaaatggtagcaccggttgacggcacaatcggcaaaatattcgagactaatcacgccttctccatagagtcagactcgggtgtggaacttttcgtgcatttcggtatagacacggttgagttgaaaggcgaaggctttaagcgcattgctgaagaagggcagcgcgtcaaggtcggagacacggtaattgagttcgacttaccattgttggaagaaaaggcgaaaagtacgcttactcccgtcgtaattagcaatatggatgaaataaaagaattgataaagctttcaggatctgtaacagttggtgaaacaccagtaattaggatcaaaaagtaa

SEQ ID NO: 2424 - DNA, 879 bp, Artificial Sequence
  Optimized genes for E. coli.
atgtttactggtagtatcgtggcgatcgttaccccaatggacgagaaaggaaacgtctgtcgtgcgtcactaaaaaagctaatcgactatcacgtcgctagtggaacctcggcaatagtgtccgtcggcacgacaggggagagcgcaaccctaaatcatgacgagcatgcggatgtggtgatgatgactctcgacctcgctgacggtcggatacctgtgatagccggaacaggcgctaacgctacggctgaagcaatctctcttactcagaggtttaacgattcaggcatcgtagggtgcttaacggttaccccgtattataatcgcccgtcgcaggaagggctctaccaacacttcaaggcaattgccgagcacactgacttgccgcaaatcctctataatgttccgtcgcggacgggttgcgaccttctacccgagacggtgggtcgtctcgcaaaagtaaaaaacataattggaattaaggaggccactggtaatctgaccagggtgaaccagattaaagagctggtatctgacgactttgtgttgctttccggtgacgacgcctcggcgttagactttatgcaacttggtggtcatggtgttatctccgtcacggcgaatgtagctgcgcgtgacatggcgcagatgtgcaagctagcagctgaaggacactttgcagaagcccgcgtaattaaccaacgccttatgcccttgcacaataaactttttgtcgagccaaatcccatcccagtgaagtgggcgtgtaaggaactcggattagtagcgaccgacactctcaggctcccaatgaccccaatcacagattcaggtcgtgaaactgtgcgggcggccttgaagcacgcgggtttattataa

SEQ ID NO: 2425 - DNA, 324 bp, Artificial Sequence
  Optimized genes for E. coli.
atgagtataacgttgagtgactcggcggctgcccgtgtaaatactttcttagcaaatcgtggtaaaggctttggcctccgtttaggcgtccgtactagcggctgctctggaatggcgtatgtactagagtttgtggatgagccaacaccggaggacattgtattcgaggacaaaggagtgaaggtagtcgtggatggaaagagtttacagtttcttgacgggacgcaacttgacttcgttaaagaagggttaaacgaaggctttaaattcactaatcccaatgttaaggacgaatgtggctgcggggagagcttccatgtctga

SEQ ID NO: 2426 - DNA, 651 bp, Artificial Sequence
  Optimized genes for E. coli.
atgcaaaaggagcaattgagtgcgttaatggatggagaaacgctggacagcgagttgctcaacgaattggctcataaccctgaaatgcaaaaaacatgggaatcataccacctcatccgggactccatgcgaggtgacacaccagaagttctgcactttgacatttccagtcgagtgatggctgcaatagaagaggaaccggtcaggcaaccagcaacattgatcccggaggctcaacccgccccgcaccagtggcagaagatgccattctggcagaaggtacgaccttgggcagctcagcttacgcagatgggggtcgcagcctgtgtctcgttagcagtcatcgtgggcgtccaacattataacggccagtccgaaaccagccaacaacccgaaacgccagtttttaataccttgccgatgatgggtaaggcgtctcctgtctcgctaggagttccatcggaagcaacggcaaataacggacaacaacaacaggttcaagaacagaggcggcgaatcaatgctatgctccaagattacgagttgcagcggagactacattctgagcagctgcagttcgaacaagcgcagacccagcaggcagcggtacaagttccaggtattcaaacgttgggcactcaatcacaatag

SEQ ID NO: 2427 - DNA, 342 bp, Artificial Sequence
  Optimized genes for E. coli.
atgactatgaacataacaagtaaacaaatggagatcacccccgcgatacgtcagcatgtcgcagaccggctagccaagctggagaagtggcaaacccatttaattaatccccacatcattttatcgaaggaaccgcaagggtttgtagcagatgcaaccattaatacgccgaacggcgtactggtcgcttctggtaaacatgaagatatgtataccgcgattaacgagctgattaataaactggaacggcaactaaacaagctacaacacaagggggaagcgcgaagagcagctacaagcgtgaaggacgcaaacttcgttgaggaagtagaagaagaatag

SEQ ID NO: 2428 - DNA, 348 bp, Artificial Sequence
  Optimized genes for E. coli.
atgtcgaatattatcaaacaactagagcaggaacagatgaaacaggatgttccgagtttcagaccaggcgacacagttgaagtgaaagtgtgggttgtagagggaagcaaaaaacggttacaggcatttgagggtgtcgtcatagctataaggaatcggggcttacattcggcctttaccgtacgtaaaattagtaatggggaaggtgtcgaaagagtattccagacgcacagtccggttgtggattccatctcagtcaagagaaggggagccgtgcgtaaggctaagttatattatctgagagagagaaccggaaaggctgcccggatcaaagagcgtcttaattaa

SEQ ID NO: 2429 - DNA, 768 bp, Artificial Sequence
  Optimized genes for E. coli.
atgtggatcggaataatatcgctcttccccgagatgttcagggcaattactgactatggtgttacgggtcgcgctgttaaaaatggactcttatcgatacaatcatggagtcctcgcgactttactcacgatcgacatcgcacagtcgacgacagaccttacggtgggggcccgggaatgttgatgatggtccagcccctacgcgatgcgatccacgcagcgaaggccgccgcaggggaaggtgctaaggtcatatacttgtccccacagggtcgtaaactagatcaagcgggtgtctcggagctagcgacaaaccagaagttgatactggtgtgtggcagatatgagggaatagacgagcgcgtaatccagacagagatagacgaggaatggtccataggggattatgttttatcaggtggagagctcccggctatgacactaatcgattcggtgagtagattcatcccaggagttctagggcacgaagcgtccgctacggaagatagttttgcagaaggtcttctcgattgtccgcactatacaaggcctgaggtgttagaagggatggaggttccccccgtcttactatcagggaaccacgccgagattcgccgatggcggcttaagcaatctctggggcggacatggctacgtcgcccagaacttctcgagaatctcgctttgactgaggaacaggcgcgactactagctgaatttaaaaccgagcacgcacaacaacaacataaacatgatgggatggcctga

SEQ ID NO: 2430 - DNA, 549 bp, Artificial Sequence
  Optimized genes for E. coli.
atgtcgaaacagcttaccgcacaagcaccggttgacccaattgtactggggaaaatgggaagctcttatggtatacggggatggctaagagtattctccagtactgaggatgcggaatcgattttcgactaccaaccttggtttatacagaaggcaggtcagtggcagcaggtacagctggagtcttggaagcaccacaaccaggacatgatcatcaaattgaaaggggtcgatgaccgagacgcagcgaatctgcttacaaattgcgaaatagtagttgactcaagccaattaccccagttagaggagggagactactactggaaggaccttatgggatgccaagtcgtaacgaccgaggggtatgatcttggcaaggttgtcgatatgatggagacggggagtaacgacgtcctcgtcattaaggcaaacttaaaggacgctttcgggataaaagaaaggctagtgccattccttgacggtcaagttatcaagaaagtggacctcacgacaagatcgatagaagttgattgggatcctggtttttaa

SEQ ID NO: 2431 - DNA, 249 bp, Artificial Sequence
  Optimized genes for E. coli.
atggtaaccattcgcctagcgaggcacggggcgaagaaacgaccgttctaccaggtagtcgtcgctgattcaagaaacgctaggaatgggcgtttcattgagcgagtaggcttctttaatccaattgcctcagaaaaagaggagggtacgagattagacttagatcgcatcgcacactgggttggacagggcgcgacaatatcagatagagtcgcggctttgataaaagaagtcaataaggccgcttag

SEQ ID NO: 2432 - DNA, 186 bp, Artificial Sequence
  Optimized genes for E. coli.
atgctaatcctaacgcgacgggtaggggagactttgatgatcggtgatgaagtgacagtgactgtcctgggggtcaaagggaaccaggtgcgaatcggtgttaatgcaccaaaagaggttagcgtgcaccgggaggaaatatatcaacgtatacaggcggaaaagtcacagcaatcctcctattga

SEQ ID NO: 2433 - DNA, 2631 bp, Artificial Sequence
  Optimized genes for E. coli.
atgtcaaagagcacagccgaaatccgccaggcttttctcgacttctttcacagtaagggacatcaagtcgttgctagcagttcgcttgtcccgcacaacgacccaacactgctttttacgaatgcaggaatgaaccagttcaaggacgtcttcttagggttagataagcgcaattatagtcgcgcgaccacttcccaacgctgcgttagggccgggggtaagcataacgacttagaaaatgtcggatacactgcgcggcaccacacattttttgagatgctgggcaatttttcatttggagattatttcaaacatgacgccatccagtttgcgtgggaattactgacgagcgagaaatggttcgccttgccgaaagagaggctatgggtaacggtttacgaaagtgatgatgaagcttacgagatctgggaaaaggaggttggaatcccgcgagagcgcatcatcaggattggcgacaataagggcgcaccgtatgcgtcagataacttctggcagatgggggatactggaccttgcggtccgtgtacagaaatcttttacgatcacggagaccatatttggggcggccctcccggaagtccggaagaagatggcgatcgatacatcgaaatatggaatatagtgtttatgcaatttaacaggcaagcggacggtaccatggaacccctcccaaagcccagcgtggatactggtatgggtcttgagaggatagccgcggttttgcagcacgtaaattcaaactacgacatcgatctcttccgaacgcttattcaggcagtagctaaagttacgggggctaccgacctaagtaataagagccttcgcgtgatcgccgaccatatacggtcctgcgcattcctaatcgcggacggggtgatgccctctaacgagaaccgcggctacgtgcttcgaagaattattcgccgggcagtccgacacggtaacatgttgggtgctaaggaaacgtttttttataaacttgtcggaccactgatcgatgtaatgggtagtgcaggtgaggacttaaagcggcaacaggcgcaagtagaacaagtcttgaaaacggaggaggagcagtttgctcgcacactcgaacggggtctcgccttgttagatgaggaattagctaaactttccggtgacactttggatggggaaaccgctttccgattgtatgacacctacggcttccccgttgacttgactgccgacgtatgtcgagaacgaaatatcaaagtagacgaggcgggttttgaagctgcaatggaggaacaaaggaggcgagcgagggaggcctccgggttcggtgccgactataatgcgatgattagggtggactctgcttcggaatttaaggggtatgatcacctcgaactgaatggtaaggttacagcattgtttgttgatggaaaagctgtggacgccattaatgctggccaggaggcggttgtcgtcttggatcaaaccccgttttatgccgaatccggaggtcaagtcggcgataaaggggagttgaagggagctaacttttcctttgccgttgaagacacccaaaaatacggtcaggccatcggccacattggcaagcttgcagcagggtcactaaaagtgggcgacgccgtgcaagcagacgttgacgaggcgaggagggctaggatcagactcaatcacagtgcaacgcacttaatgcatgcggcacttcgtcaggtactaggcacccacgtctcccaaaaggggtccttagtaaatgacaaagtcttgagatttgatttttctcacaatgaagctatgaagcccgaggagataagagcagtcgaggacctggttaatacacagatccgtagaaaccttcctatagagactaacattatggatttagaggcagctaaagctaagggcgctatggcgctattcggagagaaatatgacgaaagggttcgagtgctctccatgggtgatttctctaccgagctctgtgggggtacacacgctagcagaactggggatataggcttatttcgaatcatatccgagtcgggaacagcggccggcgtgcgtcgcattgaggcagtaacaggggagggagccatcgcgactgtccacgctgatagtgaccggctctctgaggtggcgcatctgttgaagggtgactcgaacaatttagctgataaggtccgttcggttttggaaagaacgagacaactagaaaaggagcttcagcaactaaaagagcaggctgcagcccaggagagtgctaacctctcttccaaggccattgacgtcaatggcgtcaagctgcttgtttctgagttaagcggcgtagaacctaagatgctaaggaccatggtagacgacctcaagaaccaactcggcagcacaataatagtgttggccaccgttgtagaaggtaaagtatcgttgatagcgggtgtgtctaaagacgtgaccgatcgcgtcaaggccggcgagctaattgggatggtagcgcagcaagtaggcggtaagggaggtggccgacctgatatggcccaggctggaggaaccgacgctgctgccctacccgcagcactagcgtcagttaaggggtgggtatcagcgaaacttcaatga

SEQ ID NO: 2434 - DNA, 993 bp, Artificial Sequence
  Optimized genes for E. coli.
atgtcacagaatactctgaaagtccatgatttgaacgaggatgctgaatttgacgaaaacggggttgaagtctttgacgagaaagctctagttgagcaggaaccatctgataacgatctagcagaggaggaattactgagtcaaggtgcaacacagagagtacttgacgctacacaactatatttaggtgagattggttacagccctctccttacggcagaagaagaagtctattttgcacgccgcgctctacggggcgatgtagctagcagacgaagaatgatcgaaagcaacttaagattggttgtcaaaatagcgagacgttacgggaatcgcggactagctttactggacctgatagaggaggggaatttgggccttatccgggctgttgaaaagttcgaccccgaacgaggctttcggttctcgacatacgctacctggtggatcagacagacaatagaacgtgccatcatgaaccaaacgcgtacaatccgtctccctatacatatcgtgaaagaattgaatgtctatttgcggacggcgagggagttatctcataagttagatcatgaaccttccgctgaagaaattgcggagcagctagacaaacccgtcgatgatgtgtctaggatgctacgactgaatgagcggattacgagtgtcgatacgccgctaggtggggatagtgaaaaggctttactggatattttggcagatgagaaagagaacggaccggaggatacgacacaagatgatgacatgaagcagagtatcgtaaagtggctattcgagttaaatgcgaaacaaagagaggtactcgcccgccgttttggattattgggctacgaagctgccactcttgaagacgtcggacgtgagattggcttaacgagagaacgagttcgtcaaatacaggttgaagggcttcgtcgattgcgcgaaattctccagacacaaggactcaacatagaggccctgtttagggagtag

SEQ ID NO: 2435 - DNA, 1140 bp, Artificial Sequence
  Optimized genes for E. coli.
atgtccgccggttccccaaaatttactgtacgacggattgccgcactatcccttgtcagtctctggctagctgggtgcagtgatacttcgaatccaccggcaccagtatcaagcgtgaatggcaacgcgccagcaaatacaaactctggtatgttaataactcctccacccaagatgggcactacgagcactgcacagcagccccagatccagccagttcagcagccacaaattcaggcaactcaacagccacaaatccagcccgtccagcccgtcgcacaacagccggtccagatggaaaatgggaggatagtctataaccggcagtacggaaatattcctaagggatcgtacagcggatcaacatacacggtcaaaaagggcgacacacttttctacatagcctggataaccggaaacgattttagagaccttgctcagcgcaataatatacaagcgccgtacgccttgaacgtagggcaaacactgcaggtgggtaacgcaagcggcacgccaattaccggtggtaatgctattacacaggccgatgctgctgagcagggggttgtaataaaaccagctcaaaactctaccgtggctgttgctagccaaccaacaattacgtattcggaatcttcaggtgaacaaagcgcaaacaagatgttaccaaacaataagcccacagcaacaactgtgaccgccccggttactgttcctactgccagcaccacagaaccgaccgtgagcagtacttcgacaagtactccaatctctacctggcgctggcccacggagggtaaagttatagaaacgttcggtgccagcgaaggtggcaataagggtatcgacatcgcagggtcaaagggtcaggctattatcgcaacagctgatggacgggtcgtatatgctgggaatgccttaagggggtacggtaatctgataattatcaaacacaacgatgattatctgtccgcctatgcacacaacgatactatgctagtacgggaacaacaggaggtcaaggcgggccaaaaaattgccacaatgggatctacggggactagttctacacgtctacattttgaaattaggtacaaaggtaaatcggttaatcctttaagatatctcccccaacgatga

SEQ ID NO: 2436 - DNA, 1299 bp, Artificial Sequence
  Optimized genes for E. coli.
atgtcgaaaatagttaaaatcatcggacgtgagatcatagactccaggggaaatccaactgttgaggctgaggtgcacctagagggtggctttgtggggatggcagcggccccttctggcgcaagtacagggagccgcgaggcgctcgaattacgtgatggagataaatcccggttcttaggcaagggcgtgacgaaagccgtcgcggcagttaatggaccgatcgctcaggctttgataggcaaagacgctaaagaccaggcaggcatagacaaaatcatgatagatttagacggcaccgaaaacaaatcgaaatttggagcaaatgctatcttggccgtaagtttagccaacgctaaagctgccgcggccgccaaaggcatgccgctttacgaacatattgcggagcttaatgggaccccgggtaaatatagcatgcctgttcctatgatgaacattatcaatggcggggagcatgcagataacaatgtggatattcaggagttcatgattcagccggtaggcgcgaaaactgtcaaggaggccataaggatgggttctgaagtctttcatcacctagcgaaggtcctcaaggctaaagggatgaatacagctgtaggtgacgaagggggctatgcacctaatttgggaagcaatgcggaagctcttgcagttatcgctgaagcagtaaaggcggccgggtatgaactcggtaaagatattacactggcaatggattgtgcggcgagcgaattttacaaagatgggaaatatgttttggctggtgagggaaataaagcgtttacatctgaagaatttactcactttctcgaggagttgacaaaacaataccctatcgtgagcatagaggatggcctcgatgaatcagattgggatggctttgcataccaaacgaaagtccttggtgacaaaatacagcttgtaggtgatgatctttttgtgacgaacactaagatacttaaagaagggatagagaaaggcatagctaatagcatcctgatcaaattcaatcagatagggtcactaactgaaacacttgccgcgatcaagatggccaaggacgctggatatacggccgtcatttcccatcgatcgggcgagacagaggatgcaactattgccgacctggctgtgggaacggctgcggggcaaatcaagactggtagtatgtcacgttccgaccgggtggccaagtataaccaattgatccggatcgaagaagctttgggggaaaaggccccatacaacggacgtaaagaaataaaggggcaggcctag

SEQ ID NO: 2437 - DNA, 1638 bp, Artificial Sequence
  Optimized genes for E. coli.
atgactacaaattacatttttgtaaccggcggtgtcgtttcgtcgctcgggaaaggcatagcagcggcatcgctcgcggctatcctagaagcccgggggctcaacgttaccattatgaagctagacccgtatataaatgtcgaccctggcacgatgtctcccattcagcacggggaagtgtttgtaactgaggatggggccgaaacggacctcgacttgggacattatgagagatttatacgcactaagatgtcccgccgcaataattttacaactgggcgaatttattccgatgttttacgaaaagagcgccggggggactaccttggagcaacggttcaggttattccgcacattactaatgctatcaaagagcgagttctcgagggtggcgaaggccacgacgtggtactagttgaaataggcgggactgtgggtgacattgagtccttaccgtttcttgaggcaatccgtcaaatggccgtcgagatcggacgggagcataccctgttcatgcatctgactttggttccgtacatggccgcatccggcgaggttaagaccaaacccacacagcattctgttaaggagctgttgtcaatcggcatccaaccggatatactgatatgtcgatctgaccgagccgttccagctaatgagcgggcgaaaatcgccctgttctgcaacgtccctgagaaggctgttatttccctgaaggacgtggactcgatctataaaataccgggattgctgaagagccaggggttggatgattacatctgtaagaggttctcattgaattgtccggaagcgaacttatcggaatgggaacaggtgatcttcgaagaggccaacccggtctctgaagtcacaattgggatggtggggaaatatattgagttgccagacgcctacaagtctgtaatcgaggcacttaaacacgggggtttaaagaaccgtgttagcgtcaatattaagctaattgacagtcaagacgtagaaaccagaggtgttgagattctcaaagggttggacgccatactggtaccggggggcttcgggtaccgaggtgttgaagggatgataacgacagccaggtttgcaagagaaaacaatattccataccttggaatctgcctgggtatgcaagtcgcccttattgactacgcgcgccatgttgcgaatatggagaacgcgaattctacagaatttgtaccagattgcaagtacccagtggttgccttgataactgagtggcgcgacgagaacggaaatgttgaggtacggtccgaaaaaagcgatttgggcgggactatgcggcttggggctcagcaatgtcagttagtcgatgactctttggttcgtcagttatacaatgcacctactatagtggaaagacatcgtcaccggtatgaggttaataacatgctgctaaaacaaattgaggatgcagggttacgggtggcgggtcgctcaggtgacgaccaactcgtagagatcattgaagtgcctaatcatccatggtttgttgcttgccaatttcaccctgaatttacatcgactccacgggatggccatcctttgtttgctggattcgtgaaggccgcgtcagagtttcaaaaacgccaggctaaatga

SEQ ID NO: 2438 - DNA, 1098 bp, Artificial Sequence
  Optimized genes for E. coli.
atgtttgagataaatccagttaataatcggatacaagatttaaccgagcgctctgatgttctaagaggatatcttgattatgacgcaaaaaaagagcgcctggaagaggtaaatgctgagctcgaacaacctgacgtgtggaatgagcctgaaagggcacaggctttagggaaggaacgctcctccctagaggcggttgttgacacattagatcaaatgaaacaggggctggaggacgtgagtggtttacttgaacttgcggttgaggccgacgatgaagaaacttttaatgaggcagtagccgaactcgacgcgctcgaggaaaagttggcgcaacttgagtttagacgaatgtttagcggcgaatacgattctgccgactgctaccttgacatccaggccggctcagggggaaccgaggcacaagactgggcatccatgttggaacggatgtacctccgctgggctgaatcgcgtggttttaaaaccgaaattattgaagagagtgagggcgaggtcgcagggatcaagtcagtcactataaagatcagcggagactacgcgtatggctggctccgaaccgagacgggggtacaccgcttggtacgaaagtccccgtttgactcaggaggacgaagacatacatccttttctagcgcttttgtctaccccgaagtcgatgacgatattgacatagaaattaatcccgccgatctgcgtatagatgtttatcgcacttcgggggcggggggacagcacgtaaatcggactgaatccgccgtacgcataacacacatccctaccggaatagtcactcaatgtcaaaatgataggtcccaacacaaaaacaaggaccaggcgatgaagcagatgaaagcgaagctttacgaattggaaatgcagaagaagaatgctgagaagcaggcgatggaggataacaaatctgacatcggttggggatcacaaatcagatcctatgttctggatgactctcgcataaaagatctacgaacgggggttgagacccgcaatacgcaagcagtcctcgatggttcactagatcagtttatcgaagcaagcctcaaggcaggtttataa

SEQ ID NO: 2439 - DNA, 390 bp, Artificial Sequence
  Optimized genes for E. coli.
atgtctaacgtcccagccgaattgaagtattcgaaggagcatgaatggctcaggaaggaggctgacgggacctacaccgttggcatcaccgagcatgcgcaggagctccttggggatatggtttttgtcgacttgccagaagtcggagccactgtatcagcgggcgacgactgcgcggtagccgagtctgtaaaggcagcatcagatatatacgcgccagtctcaggtgagatcgtggctgtcaacgatgcattgtcagacagtccggagctcgtgaattctgaaccatatgcaggaggttggatatttaagattaaagcttcggacgagtcagagttggaatccctgttggacgccacggcgtatgaggccctgttggaagatgagtag

SEQ ID NO: 2440 - DNA, 1233 bp, Artificial Sequence
  Optimized genes for E. coli.
atggcaaaggtctctttggaaaaggataagataaaattcttgttggttgaaggagtccatcagaaagctctggagtctcttagggcagcgggttacacgaatatcgaattccacaagggggcccttgatgatgagcagcttaaggagtcaatacgggacgcgcatttcatagggctgcgatcacgcactcacctgacggaagatgttatcaatgcggctgagaagctagtcgcgattggttgtttctgcattggtacaaatcaagttgatcttgacgctgctgcaaaacgtggcatcccagtattcaacgcaccattcagtaacactcgatctgtagctgaattagtcataggggagctgctcctcctgctccgcggcgtccccgaggccaatgcaaaagcccatcggggcgtttggaataaattggcagctggatcttttgaggcaagaggcaaaaaactcggcatcatcggttatggccatataggcacccaacttggaatcctagcggagtctcttggtatgtacgtatatttctacgatatcgaaaacaagttaccattggggaacgccacgcaggtacagcacctatcggaccttttaaatatgtctgacgtggtctccctccacgtccctgagaatccttccacgaagaatatgatgggcgccaaggaaatttcgttgatgaaaccgggctctcttcttattaatgcctcgcgggggacggttgttgacatacccgcactttgtgatgcgctggcctctaagcacttagctggagccgcgattgacgtcttcccaactgaaccagctacaaactcggatcctttcaccagtcccctctgtgaatttgacaatgtactacttacgccacacattggtggatccactcaagaagcccaggaaaacatcggacttgaagtcgcgggtaaactcataaagtattccgacaacgggagtacgttgtcagctgtcaatttccctgaagtaagtcttcccctgcatggcgggcggcggttaatgcatatacatgagaatcgccccggggtactgaccgcgctcaataaaattttcgccgagcaaggggttaatattgccgcgcaatatctacaaaccagcgctcaaatgggctacgtcgttatcgatatcgaagccgatgaagacgtagccgaaaaggctctacaggcaatgaaagccatacctgggacaataagagcacgcttgctctattag

SEQ ID NO: 2441 - DNA, 1164 bp, Artificial Sequence
  Optimized genes for E. coli.
atgtcggtcattaaaatgaccgacctggatttggccgggaagcgggtattcatacgtgcagatctcaacgtcccggttaaggatggcaaggtaaccagtgatgcgcgcattcgtgccagtttgccaactatagaactggctctaaaacagggggcgaaagtcatggttacatctcacttggggaggcctacggagggagagtataacgaagaattttcacttttgccggtggtaaattacctcaaagataaactatcgaaccccgtccgtctggtaaaagattacttagatggcgtcgacgtggctgaaggagagctcgtagtcctggagaacgttagatttaataagggagagaaaaaggacgacgagacgctttcaaaaaaatatgccgcactttgcgatgtcttcgtgatggatgcgttcggcacagctcatagggcccaagctagtacccacgggataggcaagttcgcggatgttgcatgtgctgggcccctcctagcggctgagctagacgccttaggaaaagctctcaaagaaccagcacgccccatggtagccatagtaggaggaagcaaagttagcactaaactgacagtattagactcgttaagcaagatcgcagaccaactgatagtgggggggggcattgccaatacattcattgcagctcaaggccatgacgtcggtaagtcattgtacgaggcagatttagtggatgaggctaagagattattaacaacctgcaatattccagtgcccagcgacgtccgcgtcgcaacggagttcagcgaaacggcaccagcaacattaaagtctgtcaatgacgtcaaggctgacgagcagatactagacatcggagatgcaagcgcccaagaattggcggagattctcaaaaacgctaagaccatcctttggaatggaccggtcggggtattcgaattccccaattttagaaagggtactgaaattgttgctaacgcaatagcagactctgaagccttctccatcgcgggaggtggcgacactcttgctgccatagatttgtttggcatagcagataagatatcatacatctcgacagggggcggcgcgtttctcgagtttgttgaaggaaaagtactgccggctgtggcaatgttagaggagagggccaaaaaataa

SEQ ID NO: 2442 - DNA, 216 bp, Artificial Sequence
  Optimized genes for E. coli.
atgcctgttatcaaagttcgtgaaaacgagccgttcgatgtcgccttaagacgcttcaagagatcttgcgaaaaagcaggcgtcctagcggaggtacgacggcgtgagttctacgaaaaaccgaccacagagcggaagagggcaaaagcctcagcggtaaagcggcatgcgaagaagcttgctagggagaacgcaaggcgtactcgactgtattaa

SEQ ID NO: 2443 - DNA, 369 bp, Artificial Sequence
  Optimized genes for E. coli.
atgaaatatcgtatcgcactagcagtttctctctttgcattgtccgcagggagctacgcgacgacactgtgccaagagaaggagcaaaatatacttaaggaaattagttacgccgaaaaacatcaaaaccaaaaccgtattgacggcctcaataaagcactatccgaggttcgtgcgaattgctccgattcgcaactacgtgcagaccaccaaaagaaaattgcgaagcaaaaagatgaagtagcggaacgtcaacaagatctggcagaggcgaagcaaaaaggggatgctgataagatcgcaaaacgagaacggaagttggctgaagctcaggaggaactcaaaaagctcgaggctcgtgactactaa

SEQ ID NO: 2444 - DNA, 306 bp, Artificial Sequence
  Optimized genes for E. coli.
atgagcaaggaacacacaaccgagcacctccgagcagaactgaagagtttatctgatacactggaagaagttcttagttcgagtggggaaaagagcaaagaagagcttagcaagataaggtccaaggcagaacaggcgcttaagcaaagccgctatcgtctgggtgagacgggcgacgcaattgcaaagcagacgcgtgtcgctgccgcgcgtgctgatgaatatgtacgagagaacccctggaccggggttggcattggagctgccataggtgtagtgctcggtgttttactctcacgccggtag

SEQ ID NO: 2445 - DNA, 1488 bp, Artificial Sequence
  Optimized genes for E. coli.
atgaacaaagaaattctagctgtggtggaggccgtctcgaatgaaaaggccctaccacgcgagaagatcttcgaggcattggagtccgcattggcgacagcgaccaaaaagaagtatgaacaggaaatagacgtacgagtacaaattgatagaaaatcaggcgacttcgacacttttcgccggtggcttgtagtcgatgaagttactcagcctacaaaggaaataacgcttgaggccgcacgctatgaggacgaatcattgaatttaggcgactacgtagaagaccaaattgagtcggtcaccttcgaccgtattacaactcagacagctaagcaggtaattgtccaaaaggttcgggaagccgaaagagcgatggtcgtggatcagttcagggagcatgaaggcgaaattatcaccggtgtcgtaaagaaagtcaatagggacaacatatccctggatttgggaaacaatgccgaagcagtgatcttacgcgaggatatgcttcctcgcgagaactttaggccgggcgaccgagtacgtggcgtgctatattctgtacgacctgaggccagaggagcgcagctatttgtaactcgttctaagcccgagatgttaatcgaattattcagaattgaggtgcctgagatcggcgaggaagttatagagattaaagccgcggcccgagaccctggaagccgagccaagatcgcagtcaagactaacgataagcggatagatcccgtgggcgcatgcgtaggaatgcggggcgcgcgagtgcaggctgttagcacagagttaggtggagaacggatcgacattgttctgtgggacgacaatccagcacagtttgtgattaacgctatggctcccgctgacgttgctagcatcgtggttgatgaagacaaacacacaatggatatcgctgttgaggctggaaacctcgcccaggcgataggtaggaatggacagaatgtaaggcttgcgtcacagctctcggggtgggaattaaacgtgatgaccgtggatgacctccaggcaaagcaccaagccgaggcacatgcggcgatcgacacatttactaagtatttagacattgatgaagattttgccactgttctggtagaagaaggattttccactcttgaggaattagcctacgttcccatgaaggagcttctggaaattgaaggcctcgacgagccgactgtcgaagcgctaagggaaagggccaagaacgcattagccactattgcgcaggctcaagaggagagtttgggagataacaaaccagcagatgatcttctcaacctcgaaggggtagacagggatttagccttcaaactagcagcgagaggggtttgtacgttggaggatttggccgagcaaggtatagatgatcttgcagatattgaaggcctgaccgacgaaaaggctggggctctcatcatggcggcgcgaaatatatgttggtttggagacgaggcttaa

SEQ ID NO: 2446 - DNA, 312 bp, Artificial Sequence
  Optimized genes for E. coli.
atgtatgcagtattccaaagtggaggaaaacagcaccgggtatctgagggtcaaactgtgcgccttgaaaagcttgatatcgcaacaggagaaacggtagaattcgccgaggtattgatgatagcaaatggcgaagaggttaagatcggcgtcccctttgttgatggcggcgttattaaagccgaagtagtcgctcatggtagaggtgagaaggtaaaaatcgtcaaattccgtaggagaaaacattacaggaaacaacaagggcatagacaatggttcacagatgtcaagatcactggcatcagtgcatag

SEQ ID NO: 2447 - DNA, 4461 bp, Artificial Sequence
  Optimized genes for E. coli.
atgctgtacgataaatccttggaacgagacaactgtggctttgggcttattgcgcatattgagggagagccgagtcataaagttgtacgaactgccattcatgcactggcaagaatgcagcacagaggcgctatactagccgacgggaagaccggagatggatgtggcttactgctgcaaaaacccgatagatttttccgcattgtagctcaagagagaggttggcggctggcaaagaattacgcagtcggcatgctgtttctcaataaggaccctgagttagcggccgccgcgcgtagaatagtggaagaggagttacaacgtgaaactttgtcgatagtcgggtggagagacgtcccaacgaatgagggggtcttaggggaaatagcactctcgagcctgccacggatagagcaaattttcgtcaatgcgcctgcgggctggagacctagggacatggagcgtcgattatttatcgctcggcgtagaatcgagaagcgactagaagccgataaagatttctatgtctgttcgctaagcaatctggtcaacatctataaaggcttgtgtatgccaaccgatctaccaaggttttatttggacctcgcggatcttcggctcgagtcggccatatgcctatttcaccaaagattctccaccaacactgttccacgctggccgctagctcaaccatttcggtatctcgcgcataacggtgagatcaacaccatcacaggaaaccgccaatgggctagggcgaggacgtacaagttccagactcctctgatccctgacctacatgatgcagcgccctttgtaaatgaaacaggctcagactcgtcttcaatggacaatatgctggagttattactagcaggcggtatggacataattagagctatgcgcctcttggtaccacctgcctggcaaaacaatcctgacatggacccggaattgcgggcctttttcgattttaactctatgcacatggagccctgggacggaccggccgggatagtaatgagcgatggtcgattcgccgcgtgtaacttggacaggaacggtcttcggcctgcccgttacgtcattaccaaggacaagctcataacgtgcgctagcgaagtcggtatttgggactaccaaccggatgaggtggtagaaaaaggacgcgtcggacctggtgagttgatggtaatagatacaaggagcggaagaatcctgcactcggctgaaacagatgacgacttaaagtcgaggcatccttacaaggagtggatggaaaagaatgttaggagactggtcccgttcgaggatctgccagacgaagaagtcggtagccgagagctggatgatgacacgctagcttcgtaccagaaacaattcaattactctgcagaagagctcgattccgtgatacgagttcttggcgagaacgggcaggaagcggtcggttctatgggggacgatacaccgtttgccgtgctatcctctcagccccgtatcatctatgattatttcagacaacagtttgctcaagtcaccaacccaccgatcgacccactaagagaggcgcatgtcatgagtcttgctacctcaatagggagggaaatgaatgttttctgtgaggctgaaggtcaagcgcatcgtctgtccttcaagagtccaattctattatatagcgacttcaagcaactgaccacaatgaaagaagaacattatcgcgcggatacgctcgatataacctttgacgtcactaaaactaccttggaagcaacagtgaaggaactgtgtgataaggcagaaaaaatggtacgaagtggaaccgttctgctcgtcctctccgaccggaacattgcaaaagacaggctgccagttccagcgccgatggcggtaggggccatacagactcgactcgtagatcaatctctccgctgcgatgcaaatattatagttgaaaccgcatcggctagagacccccatcatttcgcagttctactcggttttggggctacggcgatctacccctatcttgcatacgaaaccttggggagattagttgatacacacgctattgcaaaagactaccgaactgtaatgcttaactatagaaatggaattaacaaaggactgtataaaataatgtctaagatgggtatctccaccatcgcatcttaccgttgctcaaagttattcgaagcggttggcctccacgacgacgtggtaggtctatgtttccaaggagctgtcagtcggataggcggagcatcgttcgaggactttcaacaggacttattaaacttatcaaaaagggcgtggcttgcacggaaaccaataagccaaggtgggttgttgaaatacgttcatggcggcgaataccatgcatataacccggatgtcgtgcggactctgcaacaagcggtgcagtcaggggaatactccgactaccaagagtacgccaagctcgtaaatgagaggcctgccacaacccttcgagacttgctagctattactccgggtgagaacgctgtaaatatcgccgatgtagaacccgcgagtgaattattcaagcggtttgatacagccgccatgtcgataggggcactttcacctgaggcacacgaggcactggcggaggcaatgaacagtatagggggcaatagcaactcaggtgaggggggggaggatcctgcgcggtacggtacaaacaaggtcagtagaatcaaacaggtagcaagtgggcgcttcggggttactccagcctacctggtcaatgctgacgtcattcaaataaaggtagcgcaaggtgccaagcccggcgagggaggtcagctaccaggcgacaaagttactccatatattgcgaaactccgttacagtgtccctggcgtaaccctgatctcccctcctccacatcatgacatttactccatagaggatttagcacagctaattttcgacctgaaacaagtcaatcccaaagcaatgatttcggtaaagttggtatctgaaccaggcgtggggacaatcgccacaggggtagcgaaagcttacgcagatctgattacaatagctggatacgatggcggaaccggggcatcgcccctaagttcggtgaaatatgctggctgcccatgggaactggggttggtcgagacccaacaggcgctagtagctaacgggttgaggcataaaattcgccttcaagtcgacggcggcctcaaaacgggtgttgacattattaaagctgctatactaggcgcggaaagtttcggttttggtacaggtcctatggtagcgttaggctgtaaatatctgcggatctgtcatctaaataattgcgctacgggtgtggcgacacaagatgataagttacgtaaaaaccattaccacggcttgccgttcaaagttaccaattatttcgaatttattgcgcgcgagacgcgagagctcatggctcagctaggggtaactcggcttgtagatctgattggtcgcacggaccttctaaaggaattagatggttttacagccaagcagcagaagttggctttgagcaaacttctggagacggctgagccgcaccctgggaaagcattgtactgcactgagaataacccacctttcgataatggattgctcaacgcacagctcttacagcaagcgaagcccttcgttgatgagaggcagagcaaaacgttctggttcgatatcaggaacacggatcgctcggtcggagcatcgctatcgggctatatcgcacaaacgcacggcgaccagggcctcgcggcagatcctataaaggcttactttaatggtacagcgggacagtcttttggggtttggaatgcaggcggggttgaactctacctcacgggggatgcaaacgactatgtggggaagggcatggcaggaggtttaatcgcgatacgcccccctgtgggctcagcttttcgttcacatgaggcgtctatcatcggcaatacgtgtctatatggggcgacaggaggccgactgtatgctgccggtagagcaggcgaaagatttggtgttcggaattccggggcgatcacagtcgtagaggggatcggagataacggctgtgaatacatgactggcggaattgtatgcatactaggtaaaaccggcgtcaatttcggcgcgggcatgacggggggattcgcctatgtgttggatgaaagcggtgattttcgaaagagagtgaaccccgagttagtggaagtcctctctgttgatgctctggccatccacgaggaacacctgagaggtctaataacagagcacgtacaacatactggttcccagcggggcgaggaaattttggccaattggtctaccttcgcaacgaagttcgcgcttgtaaaaccgaagtcatctgatgttaaagcactccttgggcacagaagtcggtctgccgctgagttaagagttcaagcgcaatag

SEQ ID NO: 2448 - DNA, 1419 bp, Artificial Sequence
  Optimized genes for E. coli.
atgtcgcaaaatgtgtaccaattcatcgacctacaacgggtcgaccccccaaaaaagcccttgaagatccgaaagatcgagttcgttgagatatatgaaccgttctccgaagggcaagcgaaagctcaggccgaccgctgtctaagttgtgggaacccttactgtgagtggaaatgtcctgtccataattacattccgaactggctaaagctcgcaaatgaaggcaggattttcgaggctgctgagttatcacaccaaactaacactctacctgaagtttgcgggagagtgtgcccccaggatcgtctatgtgaaggttcctgtacgctaaacgatgaatttggtgccgttactatcggtaatatcgagagatacatcaatgacaaggcttttgagatgggctggcgccctgacatgtccggtgtgaaacagactggtaaaaaagtagcaattattggggcgggcccggctggcttagcctgtgccgacgtgctaactcgtaacggcgtcaaagccgtcgttttcgatcgccatcccgaaatagggggcttactcacttttggcataccagcgtttaaactggaaaaggaagtgatgacacgtaggcgagagatttttacaggaatgggaatcgagtttaagctaaacacagaggttggcagagatgtacaactcgatgacttattgtcagattacgacgcggtttttctgggagtaggtacataccagtctatgagaggaggtttagaaaacgaagacgccgatggtgtatacgcagcgctccccttccttatagccaatacaaaacagctaatgggatttggggagaccagagatgagcctttcgtaagtatggaaggcaagagagtcgtcgtcctggggggcggagatacagcgatggattgtgttcgcacaagtgttcgacaaggtgcgaagcatgtaacgtgtgcctacaggcgggatgaagaaaacatgccaggatctcgacgggaagtcaagaacgcccgggaggaaggcgttgaattcaaattcaacgttcaaccccttggcatcgaagttaacggtaacggaaaggtcagcggagtaaagatggtacggacggaaatgggggaaccagacgcgaaaggacggaggagggcggaaattgttgctgggtctgagcatatagtacccgcggacgctgttataatggcattcggcttccgcccccacaacatggagtggctcgctaagcattctgttgaattagattcacaggggcgcataatcgcgcccgagggatcggataacgcttttcagacatccaatcccaagatcttcgccggtggtgatatcgttagaggttctgatttggtggtcacggccatagctgaagggcgaaaagctgccgatggaattatgaattggctcgaagtatga

SEQ ID NO: 2449 - DNA, 393 bp, Artificial Sequence
  Optimized genes for E. coli.
atggccgaaaaccaatactatggtacgggaaggcgcaagtcctcggctgcgcgcgttttcattaagccagggaacggcaagattgttattaatcaaaggagtctcgaacaatactttggccgggagacggcacgcatggtagtacgtcaaccgctagagcttgttgatatggtagagaaattggacctgtatatcactgtaaagggtggaggcatctctgggcaagcaggagctattcggcatggcatcactcgggctcttatggaatatgacgaatcactaagatccgagctgcgaaaagcagggtttgtcacgcgagatgcccgccaagtcgagcgcaaaaaagtgggactcaggaaggcccggagacgaccacaattctcaaaacgttag

SEQ ID NO: 2450 - DNA, 429 bp, Artificial Sequence
  Optimized genes for E. coli.
atgaaaacattcacagccaagcccgagaccgtgaaacgcgactggtatgtggttgatgcaactggcaaaactctcggtcggctcgccacggagttagcacggaggttgagaggtaaacacaaggcagaatacaccccgcacgtagatactggggattatatcattgtattaaatgctgataaagtggcagtcacggggaataagaggaccgataaggtgtactatcatcatactggccacataggtggaatcaaacaggcaacgttcgaagaaatgatcgcaaggagacccgagcgggtgattgagatagccgtgaaaggcatgctcccaaaaggccctttggggcgtgcaatgtttaggaagttaaaggtttacgcagggaacgaacacaatcatgcagctcagcagccgcaggttctagatatttag

SEQ ID NO: 2451 - DNA, 939 bp, Artificial Sequence
  Optimized genes for E. coli.
atgaaggtagcggtcctcggtgccgccggggggattggtcaagccttggcacttctcctcaagacccaactcccgtctggatcggaattatcgctttacgacattgcgcccgtcacacccggagtagccgtagatctatctcatattcccactgcggtcaagataaaaggattcagtggggaggacgcaactccagccttggagggtgccgatgtagtactaatatcggctggtgtggcgagaaagcccggcatggacaggtctgacctctttaatgtcaatgcaggtatagtgaagaatctagtacaacaagtagctaaaacttgccctaaagcttgcataggtataataacgaaccctgtcaatactaccgttgctatagctgccgaagtcttgaaaaaagctggcgtctacgacaagaataaattatttggggttactacactagacataattcggagcaacacttttgtggccgagttgaaaggtaaacagccgggtgaggttgaagtacccgtaattggcggtcacagtggtgttaccattctacccctgctctctcaggtgccgggcgtctcatttacggaacaagaggtcgcggacttgactaaacgtatacaaaatgcaggcaccgaggtggtagaggctaaagcaggaggaggctcagcaacactcagtatggggcaggcggccgcccgattcgggctttcattagttagggcattacagggggagcagggagtggtggaatgtgcctacgtggaaggcgacggccaatacgcgcgattcttttcacaacctttattacttggtaagaatggagtcgaggaacgcaaatcgattggtaccttaagcgcattcgagcaaaacgctttggaagggatgcttgatacactcaaaaaagacattgcgttaggagaagagtttgtcaataagtga

SEQ ID NO: 2452 - DNA, 471 bp, Artificial Sequence
  Optimized genes for E. coli.
atggacatccgcaaaattaagaaactgatagaactagttgaggaatccgggatctccgaactcgagatatctgaaggcgaagaatcagtacgcatctccagggctgcaccggctgcctcctttcctgtgatgcaacaagcttatgccgcacctatgatgcaacagccggcgcaatccaatgctgccgcccccgcgacagttccgtcgatggaagccccagctgcagcggagatttcggggcatatcgttaggagcccgatggttggcaccttttaccgtactccgtccccggatgcaaaggcttttattgaagttgggcaaaaagtaaatgtcggtgacacgctgtgtattgttgaagcgatgaagatgatgaaccaaattgaggcggacaaaagcggaacggttaaggcaatcttggtagagagtggtcaacctgtggaatttgacgagcccctcgtcgtaattgagtaa

SEQ ID NO: 2453 - DNA, 297 bp, Artificial Sequence
  Optimized genes for E. coli.
atgtttgagcaacgcgtaaattccgatgttctaaccgtctcgaccgtaaactctcaagatcaagtgacgcaaaaaccgttaagggactccgtcaagcaggccttgaagaattactttgcgcaacttaacggacaagatgtcaatgacctctatgagctcgtcttggctgaagttgaacagccccttctcgatatggtgatgcaatatacgcgggggaatcagacgagagccgccctcatgatgggtatcaaccgagggacgttacgaaaaaaattaaaaaaatacggcatgaattaa

SEQ ID NO: 2454 - DNA, 384 bp, Artificial Sequence
  Optimized genes for E. coli.
atgcgtcaccgtaaatccggccgtcagcttaaccggaattcttctcaccggcaagccatgttccgcaacatggcgggcagtctagttaggcatgaaatcataaagacaaccctacctaaggccaaagaactccggcgtgttgtagaaccactgattactttagcaaaaaccgacagtgtcgccaatagaagactagcatttgccaggactcgggataacgagatcgtggcgaaactgttcaacgaacttggtccaaggtttgcatctagggcgggaggatatacccgcattctcaagtgcggttttagggctggggacaatgccccaatggcctatatagaacttgttgatagatctgagaaggcagaggcggcggcagaatga

SEQ ID NO: 2455 - DNA, 990 bp, Artificial Sequence
  Optimized genes for E. coli.
atgcagggatctgtaacagaattcctgaagccccgactagtggatatagaacaagtatcttccacccacgccaaggtcactctagagccactcgaacgcggttttggtcataccctgggaaacgccctcagaaggatcctattatcctcgatgcctgggtgtgctgtgactgaagtggaaatcgacggcgttctccacgagtacagcacaaaggaaggtgttcaagaagacattctcgaaattctcctcaatctgaagggactcgctgtacgtgttcaggggaaagatgaggtgattttaacattaaataagtcaggaattggtccggtcacggcagccgatattacgcatgatggtgacgtggagattgtgaagcctcagcatgtcatctgccacctgacggacgagaatgcgtcaattagcatgcgtataaaggttcagcgaggacgaggatatgttccagcgtccacccgaattcacagcgaggaagacgaacgccccatcggacggttgctcgtggatgcttgctactcccctgttgagagaatagcgtacaatgtagaggccgccagagttgagcaaagaacagatttggataagttggtcatagagatggagactaatggaactatcgaccccgaggaggcgatccggcgcgcggcgacgattctggcggaacagctagaagcctttgttgatctgcgagatgtgcgtcagcctgaagttaaggaagaaaagcccgagttcgatccgatacttctcagacccgtcgacgatctagaactcaccgttcgatctgccaactgtctcaaggcggaagcgatacactacatcggcgacctggtccaacgtaccgaggtcgagctccttaaaactccgaacttaggcaaaaagtcgctaaccgagatcaaggatgtgcttgcctcccgtgggttatctctgggaatgagattagaaaactggcccccagcaagtattgccgacgaatga

SEQ ID NO: 2456 - DNA, 621 bp, Artificial Sequence
  Optimized genes for E. coli.
atggctaggtacctaggtccaaagctgaagttgtcacgtcgggagggcaccgatctatttctgaaatcaggagtgcgagctattgatactaaatgtaaaatcgagcaagcgcctggccaacatggggctcgtaaaccgcggctaagcgactatggtgtgcagttacgggaaaaacaaaaagtgcggcggatttacggggtgctagaacggcaatttcgaaactattacaaggaagctgcccgacttaaagggaatacgggggagaatttattggctctactcgaggggagactggacaatgtcgtgtacaggatgggattcggggctacaagagcggaagcacgccagctagtttctcacaaagcgatcatggtcaacggacgtgtggtcaatatagcatcttaccaggtcagccctaatgacgtcgtgtcgattcgtgaaaaggccaagaagcagtcacgagtaaaagcagcgctagaactcgctgagcaaagagaaaagccgacctggctggaggttgacgcgggcaagatggagggcacttttaaacgtaagccggagagatcggacctatcagccgacatcaatgagcatcttattgttgaactttactcgaaataa

SEQ ID NO: 2457 - DNA, 390 bp, Artificial Sequence
  Optimized genes for E. coli.
atggctaaagcacccataagagcgcgtaagagagtcagaaaacaggtgtcagatggggtagcccatatccacgcgtcgtttaataatactatagtcactattaccgatcgacagggcaacgctttaggctgggccaccgcagggggaagcggctttcgcgggtctagaaagtctaccccatttgcagcacaggttgcagccgaacgctgtgccgacgcagtaaaagagtacggtataaaaaacttagaagtgatggtcaagggtccgggtcccggccgtgaaagcacgattcgagcactgaatgccgcaggtttccggattactaatataacggacgttaccccgatccctcataatgggtgtcgtccaccgaagaagcgtagggtctag

SEQ ID NO: 2458 - DNA, 117 bp, Artificial Sequence
  Optimized genes for E. coli.
atgaaagtacgcgcaagcgtgaagaaactgtgtaggaattgtaaaatagtcaaaagagatggggtcattcgggttatctgcagcgcagagcccaagcataaacagagacagggttaa

SEQ ID NO: 2459 - DNA, 1332 bp, Artificial Sequence
  Optimized genes for E. coli.
atggcgaagcagcctggacttgacttccagtcagctaagggagggctcggcgagcttaaacgtagactattatttgtcataggggccctaattgtgttcaggatcggttcattcatacccatccccggcattgatgcggccgtgttggccaaacttttagagcaacagcgtggtacgattatcgagatgttcaatatgttctccggaggggcactttcccgcgcgtctatatttgcgctgggcatcatgccatatatatcagcgtcgatcataattcagttgcttactgtggtacaccctacattggctgagatcaaaaaggaaggggaaagtggccgccgtaaaattagccagtacactcgctatgggacactagtgctggcaatttttcagtcaataggtatagctacgggcttgcccaatatgccaggtatgcaaggtcttgtaatcaatcctggttttgcgttctacttcaccgctgtagtgtcattggtcaccggaactatgtttcttatgtggttaggcgagcaaataactgagcgtggaattggaaatggtatatcgatcatcatttttgctggcatagtggccggtctgcccccagcgattgcacacacgatagaacaagcgagacaaggggatttgcactttttggtgcttttattagtggcagtactggtattcgccgtgacgttcttcgtggtgttcgttgagcgcggccagcgacggatcgtagtcaattacgcaaaaaggcagcaagggcgacgagtatatgctgctcaatccacacaccttcccttaaaggtaaacatggcaggcgtgatccctgcaatctttgcctcctctataatactgtttccagccaccatcgcttcttggtttgggggtggcactggatggaattggctgaccactatatctctgtatcttcagccgggccagcctctttatgtactgttatatgcctccgcaataatcttcttttgtttcttctatacagcgctagtctttaatccccgggaaacggctgataacctgaagaagtctggggcgttcgtcccgggcattagaccaggcgagcaaactgccaaatatatagataaagtgatgacccgactcactttggtgggggctctgtacataacttttatatgtctgatcccggaatttatgcgggatgcaatgaaagtcccattctattttggcgggactagtctcctgatcgtggtcgttgttataatggactttatggctcaggtacagaccttgatgatgtcttcgcaatacgagtctgccttgaagaaagccaatctgaaaggttacggacgataa

SEQ ID NO: 2460 - DNA, 435 bp, Artificial Sequence
  Optimized genes for E. coli.
atgcggctcaacaccctgtcgcccgcggagggaagtaaaaaagctggcaagagactgggtcgcgggattggtagcggcttaggtaaaaccggagggcgtggacataaaggacaaaagagtcgtagtggcgggggggtcagacgaggattcgaggggggtcaaatgccgctttacaggcgacttccaaaatttggcttcacgagccgtaaagctgctataactgcagagattcgtctttccgatctagccaaggttgaggggggtgtagtagacctgaataccctaaaggccgcaaacattatcggtatacagatagagttcgctaaggttatattggcgggtgaagtgactactcctgtgacggtccgaggacttagggtgactaaaggagcgagggcagctatagaggctgccgggggtaagatcgaggagtaa

SEQ ID NO: 2461 - DNA, 180 bp, Artificial Sequence
  Optimized genes for E. coli.
atggcgaagacaatcaagatcacgcaaactcggtcggctataggtaggctccccaagcacaaagcaactttgctggggctaggtcttcggcggataggccacacggtggagcgggaagacacgccagccatccgggggatgataaacgcagtgtcttttatggttaaggttgaggagtag

SEQ ID NO: 2462 - DNA, 504 bp, Artificial Sequence
  Optimized genes for E. coli.
atggcacatatcgagaaacaagctggggagttacaagagaagttaatcgcagtcaaccgtgttagcaagacagtcaagggcggccgtatattctcatttacagcactgaccgtcgtcggcgatggcaatggcagagtcggcttcggatacggaaaggctcgagaggtccccgccgctatccaaaaagcgatggaaaaggcacgtcgcaatatgattaacgtagccctaaataatggtacgctacaacatccagtgaagggtgtccatacagggtcccgcgtattcatgcaaccggcaagcgagggtacaggcattatcgctggtggtgctatgcgagcggtgctggaggttgccggtgttcataacgtcttagcgaaagcgtatggtagtactaatccaattaacgtcgtgcgagcgaccatagacggattggagaacatgaactcgccagagatggtcgcggcaaagcgaggaaaatctgttgaggagattcttggtaagtag

SEQ ID NO: 2463 - DNA, 354 bp, Artificial Sequence
  Optimized genes for E. coli.
atggataagaaatccgcgcgtattaggcgcgctactcgcgcgaggcgaaaactccaggagcttggtgcaacgcgtttagtagttcaccgaactccacgtcatatttacgctcaagtgattgcgccaaatggatcagaggtgttggtagctgcatcaactgttgagaaagcaatagctgagcaattaaagtacacggggaataaagatgcagcagcggctgtgggtaaggccgttgcggagcgtgctctagaaaagggtataaaggatgtgtcatttgatagatccggattccaatatcacgggagggttcaggccctagccgacgctgctagggaggctgggttacagttctga

SEQ ID NO: 2464 - DNA, 534 bp, Artificial Sequence
  Optimized genes for E. coli.
atgtctcgtgtggcgaaagcgccggtcgttgttcccgcgggtgtggatgtaaagatcaacggtcaggtgattaccatcaagggtaaaaatggcgaattgacccgtacactcaacgacgcggtggaggtcaaacacgcagataatacactaacgtttggccccagagatgggtacgcggacggttgggctcaagcagggaccgccagggctttgcttaacagtatggtaataggggtaaccgagggcttcactaagaaactgcaactcgttggagtagggtatcgggcagcagtaaaaggcaatgttataaatttgagtctcggattctctcacccggtggaccatcagttacccgcgggcataacagcagaatgcccaacccaaacagaaatagttcttaaaggagcagacaagcaagttattggacaggtcgcggcagatttgcgagcctaccgacgacccgagccttacaaaggaaaaggggtccgatacgcagatgaggtcgtacgtaccaaagaagccaagaagaagtaa

SEQ ID NO: 2465 - DNA, 393 bp, Artificial Sequence
  Optimized genes for E. coli.
atgagtatgcaagatcccatcgctgacatgttgactcgaatacgaaatggacaagctgcaaataaagctgctgttactatgccaagctccaagctaaaggtggcgatagcgaacgtactcaaggaagagggattcatcgaggactttaaggtagagggcgacactaagcctgaattggagttgacgttaaaatattttcagggaaaggcggtagtcgaatcgatacaacgagtttcaaggccggggctgaggatctataagaggaaggatgagcttccaaaagtcatggccggtttagggattgcagtagtctcaacgagcaaaggtgtgatgacggacagagctgctcggcaagctggactgggaggtgaaataatatgctatgttgcttag

SEQ ID NO: 2466 - DNA, 306 bp, Artificial Sequence
  Optimized genes for E. coli.
atggctaagcaaagtatgaaggctagggaggttaagagagtggcgcttgccgataaatatttcgcaaaacgcgccgagttgaaggctattatatcggatgtaaatgcgtcggacgaggacaggtggaatgccgttttaaaactccagacacttccgcgcgactcaagcccatctcgtcaaaggaatcgctgtcggcagaccgggaggccgcatgggtttctcagaaagttcgggctctcacggataaaggtcagggaagctgctatgcgtggcgaaatccccggactaaagaaggctagctggtaa

SEQ ID NO: 2467 - DNA, 540 bp, Artificial Sequence
  Optimized genes for E. coli.
atggccaagctgcacgattactataaggatgaggttgttaagaagctcatgacagaattcaattataacagcgttatgcaagtcccgcgggtggagaaaataacgttaaatatgggggtaggagaagcaatagctgataaaaagttactggacaatgctgccgcggatctcgcagcgatatcgggtcagaagccattaattacaaaggcacgcaaatcagtggcgggtttcaaaatcagacagggataccctatagggtgcaaggtcactttacgtggcgaacggatgtgggaatttttcgagcggctcataaccattgccgtaccgagaatacgagattttcggggactttccgcaaagtctttcgacggccgaggcaactattcgatgggagttagagagcagattatattcccggagattgactatgataaagtagaccgagtacggggactcgacataactattacgacgaccgctaagtcagacgaagagggtagagcacttcttgcggcctttgatttcccttttcgcaagtaa

SEQ ID NO: 2468 - DNA, 315 bp, Artificial Sequence
  Optimized genes for E. coli.
atggcagcaaaaataagacgcgacgacgaagtgatagttttaacgggaaaagacaaaggaaagcgaggcaaggtcaagaatgtactaagtagtggcaaggtgatcgtagaagggataaatctcgtaaagaaacaccagaagccggtgccagcgctcaaccaacccggaggcatagttgaaaaagaggcagcaattcaggtttccaatgtagcgatatttaacgcggctactggcaaggccgatcgtgtagggttccgctttgaggacgggaagaaagttcgattcttcaaatcaaactctgaaacaattaaatag

SEQ ID NO: 2469 - DNA, 372 bp, Artificial Sequence
  Optimized genes for E. coli.
atgatccaggagcaaaccatgttaaacgttgctgacaacagtggtgccagacgggtaatgtgcataaaggtcctggggggcagccatcgtaggtatgcgggagtcggcgacatcataaaaattacgataaaagaggctattccacgaggaaaggttaagaaaggggatgtcttgaaggctgtcgttgtccgtacaaaaaagggtgtcagacggccggatgggtccgtcattaggtttgatggtaacgcctgcgttttgttaaacaacaattccgagcaaccaatcgggactcgtatattcggaccggtcactcgggagttgaggtcggaaaagtttatgaaaatcatatctctcgctccggaagtactttaa

SEQ ID NO: 2470 - DNA, 255 bp, Artificial Sequence
  Optimized genes for E. coli.
atgaccgacaaaatcagaacgttgcaggggagagttgtttccgataagatggagaagtcaattgttgtagcgatagagcgattcgtgaagcacccaatctacggcaagtttatcaagagaaccactaagttacatgtccacgatgaaaataacgagtgcggaattggcgatgtggttgaaatacgtgaatgccggcccttgtcaaagactaaatcctggacgctggtgagggtggtagaaaaggctgtactatga

SEQ ID NO: 2471 - DNA, 192 bp, Artificial Sequence
  Optimized genes for E. coli.
atgaaagcgaaggaattacgtgaaaaatctgttgaggaactcaacacggaacttcttaatttactccgagaacagttcaatctaagaatgcaagctgcgagcggccagttacagcagagtcatttattaaagcaggtgagacgtgacgtagccagagtgaagacattgttgaacgagaaggctggagcttag

SEQ ID NO: 2472 - DNA, 411 bp, Artificial Sequence
  Optimized genes for E. coli.
atgcttcagcccaaaagaactaaatttcgaaaaatgcataagggtaggaatcggggcttagcacaaggcactgatgtcagctttggaagttttggcctcaaagctgttggtaggggccgactgaccgcccggcaaatagaagcagcaagacgggcgatgacacgggcggtcaaacgacaagggaagatttggatacgagtattcccagataagccaattacggaaaaacccctagctgtccgcatgggcaagggcaagggcaatgtagaatactgggtggctttgatacaaccaggtaaggtattgtatgaaatggatggggtccctgaagagctcgctcgagaggcttttaagctggcagcggcaaaacttccaattaaaaccactttcgtaactaagacggtgatgtga

SEQ ID NO: 2473 - DNA, 702 bp, Artificial Sequence
  Optimized genes for E. coli.
atgggccagaaagttcacccaaatgggatccgattaggaatagtcaaaccatggaattctacttggttcgcgaacaccaaggagttcgcggacaatttagacagtgattttaaagtacgacaatatctaacgaaggagctggctaaggcatctgtctcccgcatcgttatagaacgaccagcgaaaagcatcagagtaacgatccataccgctcggccggggatagtgatcggaaagaaaggggaagatgtcgaaaaattgcgcaaggttgtggcagatatagctggtgtgccagctcagatcaatatcgcggaagtgcgtaagcctgaattggacgcaaagttggtcgcggactccattacgtcgcaactagaacggcgggttatgttcagacgggccatgaaacgggcggtgcaaaatgctatgaggctaggcgcgaaaggtatcaaagtggaagtatccggccggcttggaggtgctgaaattgcccggaccgaatggtaccgagaaggacgtgtacctctgcacacccttagagccgatattgattacaatacttccgaggcacacacgacttatggtgtgatcggggtaaaagtttggatattcaagggcgaaattttgggcggaatggcagcagtagaacaacccgaaaaaccggcagctcagccaaaaaaacagcagcggaagggaagaaagtga

SEQ ID NO: 2474 - DNA, 333 bp, Artificial Sequence
  Optimized genes for E. coli.
atggagacaatcgcgaaacaccgacacgctcgttcctcagcgcagaaagtgcgactcgttgccgatctaataagaggaaaaaaggtgagtcaagcactagatatactaacctatacgaacaaaaaagccgcagttcttgtaaaaaaggtactcgagtcagcgattgccaacgcggagcataacgacggggccgatatcgatgatctaaaagtcaccaagatcttcgtagatgaaggtccgagtatgaagcggataatgcctcgagccaagggcagggcagaccgcattctaaaacggacaagccatattacggtagtggtcagtgacaggtga

SEQ ID NO: 2475 - DNA, 279 bp, Artificial Sequence
  Optimized genes for E. coli.
atgccccgatcgttaaagaaaggccccttcatcgacttgcacctccttaagaaggtggaaaaagcagttgagtcaggggataaaaagcctttacgcacttggtccaggcgatccacaatttttccgaatatgataggtttaacaatagcggttcacaacggacgtcaacacgtacctgtgttcgtaactgatgaaatggttggccataagctgggggagtttgcccccactcgaacttatagggggcatgccgctgacaaaaaggccaagaaaaagtga

SEQ ID NO: 2476 - DNA, 822 bp, Artificial Sequence
  Optimized genes for E. coli.
atggcagtcgttaaatgtaagccaacgtcgccagggcggcgacacgtagtgaaagtagttaatccggaacttcataaaggaaaacccttcgccccgctgttggaaaaaaacagcaagtcgggggggagaaacaacaacggccgcatcacgacgaggcacataggtgggggacataaacaagcctaccggatcgtcgacttcaaacggaataaagacggcatccctgcggtggtagagaggctagaatacgacccgaaccgatcagcgaatatagcccttgtactttacaaagatggggaacgccgatatatactagcacccaagggtctcaaagcaggagatcagatacaatcgggggttgatgccgctattaagccaggcaacacactacctatgagaaatatccctgtgggttcgacagtgcataatgtcgaaatgaagccaggcaaaggaggtcaattagctagaagtgctggcacgtatgtacagatagtcgcgagggacggtgcttacgttacgctaaggcttcgctcaggagaaatgcgcaaagtcgaagctgactgccgagcgactcttggagaggttgggaacgctgagcatatgcttcgagtattaggcaaagccggcgcggcgcgctggcggggggtgagacccactgtaagggggacagccatgaacccagttgaccatccccatggtggtggggaaggtagaaatttcggaaaacacccggtgaccccgtggggcgtgcaaactaaggggaagaaaacacgatctaataagcgcacagataaatttatagtacgtcgacggagcaaataa

SEQ ID NO: 2477 - DNA, 303 bp, Artificial Sequence
  Optimized genes for E. coli.
atgatccgggaagagcgattattaaaagtactgcgggcacctcatgtatcagaaaaggcctctacggcaatggaaaaaagcaacacgatcgtgttaaaggtagccaaggatgcaacaaaagcagagataaaggcagcggttcagaagttatttgaggtcgaggttgaagtggtaaataccttggtggtcaaggggaaggtaaaaagacacggacagcgaattgggcgccgaagcgattggaaaaaagcctacgtcactttgaaggaggggcaaaatctcgacttcgtcggaggagctgaataa

SEQ ID NO: 2478 - DNA, 606 bp, Artificial Sequence
  Optimized genes for E. coli.
atggagttagttcttaaagatgcgcaaagcgctttgacagtcagtgaaacaacctttggacgtgatttcaatgaagcactagtgcaccaagtcgtagttgcttacgccgctggagcgagacagggcacgagggcgcagaaaacgcgtgccgaggttacggggtcaggaaaaaaaccttggcgccaaaagggaacggggagggcacgtagtggctcgattaaaagtccgatctggaggagtgggggtgtgacctttgcagcacgtccacaagaccactctcagaaagtcaataaaaagatgtaccggggggcattgaagtcaatcctcagtgaactggttagacaagaccgtttaatagttgtagaaaaattcagtgtggaagccccgaaaacaaagcttctggcccagaaacttaaggatatggcgttagaggacgtgttgattataactggcgagttagatgagaatttgtttctggctgccagaaacttacacaaagtggacgtccgagacgcaaccggtatcgatccagtatctcttattgccttcgataaggttgtcatgactgctgacgcggtaaagcaggtagaagagatgctagcgtag

SEQ ID NO: 2479 - DNA, 630 bp, Artificial Sequence
  Optimized genes for E. coli.
atgatcggtctagtgggaaaaaaggtagggatgacgcgtatattcactgaggacggagtcagcataccggttactgtcattgaagttgaggctaacagagttacacaagtgaaggaccttgccaatgatggttaccgcgcaattcaagtgactaccggcgcgaaaaaggcgaatagagtaactaaaccggaagctggccacttcgctaaagcaggggtggaggcaggacgcggtctatgggagtttcgcctggcggagggcgaggagttcactgttggacaatccatctcagttgaacttttcgccgatgttaagaaggtcgacgtaactggaacgtcaaagggcaaagggttcgcgggaaccgtcaaacggtggaactttcgcacgcaggacgcgacgcatggtaactctctgagtcatcgggtcccaggttccattggacagaatcagacgccggggaaggtatttaaagggaaaaaaatggcagggcagatgggcaatgagcgtgttacagttcaaagcctggacgttgtgcgcgtcgacgcggagagaaacttattgctggtaaaaggagcagttccgggtgccactggatcggatctcatagtaaagccggctgttaaggcataa

SEQ ID NO: 2480 - DNA, 312 bp, Artificial Sequence
  Optimized genes for E. coli.
atgcaaaatcaaaggatacggataaggctcaaagcgttcgaccatcgcctcatcgaccaagccacagcagaaattgtagaaacggcaaagcgcacaggtgcgcaagtaagaggaccaataccgctaccgacacgaaaagaacgattcactgtacttatcagtccgcatgtgaacaaagacgctcgagaccagtatgagatccgcacgcacctccgtttggtggacattgtcgagccgacagagaagaccgtggacgctctaatgcggctagatctcgcagcaggcgttgatgttcaaatctcgctcggttaa

SEQ ID NO: 2481 - DNA, 2115 bp, Artificial Sequence
  Optimized genes for E. coli.
atggcccgtacaacgccgatagcaaggtacaggaatatcggtataagcgctcatatagatgccggaaaaactacgactacggagcgcatattgttttacacgggggttaaccacaagattggagaggtccacgacggggcggcgactatggattggatggagcaagaacaagaacggggtattaccataacgtcggcagcaacgacagcattttggtccggtatggcaaaacaatatgagcctcaccgaattaatataatagataccccgggacatgttgatttcacaatagaagtagagcgttcgatgcgcgtattggacggagcagtgatggtctactgtgcagtagggggagtgcagccacagagtgaaaccgtttggcgccaagcaaacaagtataaggtaccgcgcatagcatttgttaataagatggaccgaatgggagcaaacttcttaaaggttgtcaatcagataaaaacgagattaggggcaaatcccgttccactgcagctggccatcggagctgaagaacatttcaccggagtagtggatcttgttaaaatgaaagcaattaattggaatgacgcggaccaaggagttacgtttgagtatgaggatattcctgcggatatggtcgagttagcgaatgaatggcaccagaatttgattgagagtgcggctgaggcctccgaagaacttatggagaagtatcttgggggcgaagaactcactgaagcagaaatcaaaggtgccctgagacagcgggtgcttaataatgagataatcctggtcacgtgtgggtcagcatttaaaaacaaaggcgtgcaggccatgctcgatgctgtaattgattatttgccgtcacccgtggacgtgcctgcaatcaacggaatcctagatgatgggaaggatacgcctgccgaacgtcacgcctctgatgacgagcctttctccgcgctagcgtttaaaatcgcgacggatccattcgttggcaatctaacgttttttagagtttacagtggcgtcgtaaactccggtgatacagtccttaactcagtgaaagcagcaagggagcgattcgggagaatcgtccagatgcacgcgaataaaagggaggagatcaaggaagtccgcgctggggacattgcagccgcaattggattgaaggatgtgacgacgggagacacactgtgcgatcccgacgcgcccataatcctcgagcggatggagttccccgagccggtcatatcgattgccgtcgagcctaagacaaaagcagaccaggaaaagatgggattggctctaggacgtctggctaaagaggacccgtcgtttcgtgtttggactgatgaggaatccaaccaaacaataattgcaggaatgggggaacttcaccttgacataattgtggatcgtatgaaacgcgagtttaatgtagaggctaacgtgggtaagccgcaagttgcatatagagagactattagacagaaagtgactgacgttgaaggtaaacatgccaagcaatcaggcggacgcggacaatatgggcacgtggttatcgacatgtatccactcgagcccgggtcgaatccgaagggttacgagtttatcaatgatataaaaggtggagtgattccgggcgagtacatacctgctgttgacaaagggattcaagagcagcttaaagcaggtccgctcgcggggtatcctgttgtagatatgggcattcgattgcacttcggaagctaccacgacgtcgattcatctgaactagctttcaagttagcggcgtccattgcctttaaagaaggatttaaaaaagctaagccggttctcctagagcccatcatgaaagttgaggtcgagactccggaagaaaatactggagacgtcattggggatctcagtaggagaagggggatgcttaaagggcaggagtcggaggtgaccggagtgaaaatccatgcagaagttccgctatcggaaatgttcggctatgcaactcaattgcgttcgttaaccaaagggagggcttcgtacaccatggagtttttaaaatatgacgaggcccctagcaacgttgctcaggcagtaatagaggcacgaggcaagtga

SEQ ID NO: 2482 - DNA, 540 bp, Artificial Sequence
  Optimized genes for E. coli.
atgccacgacgtcgggtaatcggtcaacggaaaatacttccggatcctaagttcggatccgaattactcgctaagttcgtgaacatcctgatggtagatggaaaaaagagtaccgcggaatctattgtctattctgctttggaaacacttgcacagagatccggaaaaagcgagctcgaggcttttgaagttgctttagaaaacgtgcgccctacagtcgaggttaagtccaggagagttgggggcagtacgtatcaagttccagtagaagtcaggccggtgaggcgcaacgccctcgcaatgaggtggatcgttgaagcagccagaaagcggggcgacaagtcgatggccttgagactagcgaacgagttatctgacgccgcagaaaataagggaacagcggtcaagaaacgcgaagacgtgcaccgtatggctgaggcaaacaaggctttcgcccactatcggtggctatcgctccgttctttcagtcatcaggccggtgcttcgtccaaacaacccgcattgggatatttaaattag

SEQ ID NO: 2483 - DNA, 375 bp, Artificial Sequence
  Optimized genes for E. coli.
atggctaccgtaaaccagctcgtccgaaaacctcgtgcgaggaaggtcgccaaaagcaacgtacctgctttggaggcatgcccacagaaacgcggggtatgcacccgcgtgtataccacgacacccaagaagccgaactcagctttgagaaaggtgtgtcgagtgcgactgacgaatggctttgaagttacttcctacatcgggggtgagggtcacaacttgcaggagcattccgttatcttaattcgcggaggtcgggtaaaagaccttcctggagtacgttaccatacggttcgaggagctctggactgctcgggagtaaaggaccgaaagcaggcacgatcgaagtacggcgtcaaaaggcctaaggcttag

SEQ ID NO: 2484 - DNA, 633 bp, Artificial Sequence
  Optimized genes for E. coli.
atggtgctgggcaaacctcaaacagatccaacactagagtggttcttgtcgcactgtcacattcacaaatacccgtcaaaatcgacgctcattcaccaaggagaaaaagcagaaacactctattatatcgtcaaaggatccgttgcggttctaataaaagatgaggaaggtaaggaaatgatactgagttatctaaatcagggagacttcatcggagagctaggcctattcgaagagggtcaagaacggtcggcatgggtacgggcgaaaacggcctgcgaagtagcggagatttcttacaaaaagttccggcaacttatacaggtcaatcccgacatactgatgcgtttatcagcacagatggcgcgccgtctgcaggttactagcgagaaagttggtaatttagcgtttttagatgtcacaggccgaatcgcacaaacccttctaaatctcgctaaacaacctgacgctatgacacatcctgacggcatgcaaataaagatcacaagacaggagattggccagatagtaggatgctcgagggagactgttggaaggatccttaagatgttggaggatcagaacttgatatcagcccacgggaaaaccatagtagtttatgggacacgctaa

SEQ ID NO: 2485 - DNA, 1104 bp, Artificial Sequence
  Optimized genes for E. coli.
atgaaaaatgtcggattcattggatggcgaggcatggttggttctgtgctaatgcagcgtatggtggaagaaagagacttcgacgctatacgccctgtatttttttcgacttcgcaattgggacaggcggccccaagctttggtggtactacaggtacgttacaggacgcgtttgatttggaggcgttgaaggcgctagatatcatcgtcacttgtcaggggggtgactataccaacgaaatataccccaaattacgcgaatcgggctggcaaggttactggattgacgccgccagtagcttgcggatgaaagatgatgctattattattctggatcctgtaaaccaggatgtgatcacggatgggctcaataacggtatccgtacattcgttggtggcaattgtactgtctcactcatgcttatgtcattaggtggtctgtttgctaatgatttagtcgactgggtttccgtagcaacgtaccaagcagcgtccggtggcggagctagacatatgcgagaactcctcacgcagatgggtcatctttatggtcacgtagctgatgagctagccacgccaagtagtgcgatcttagatatagagagaaaggtaacgaccttaacccgaagcggggaactcccggtagacaattttggcgtcccactggcgggctcattaattccctggatcgacaagcaactggacaacggacagagtcgggaagagtggaagggtcaagcggaaaccaataaaattttgaacacttcaagcgttatcccagtagacggcctatgtgttcgtgtgggtgctttacgctgccattctcaggcttttaccattaagttgaagaaggatgtatcaatacccacagtggaggagctcttagctgctcacaacccttgggcgaaggtagtgccaaatgatcgggagattaccatgcgcgaattaacgcctgctgctgtcacaggcaccctcaccacccctgtaggtcgattacgtaagttaaatatgggtccggaattcctgtcggcttttacagtgggtgatcaactgctttggggcgccgctgaaccgctaaggcgaatgttacgtcaattagcatga

SEQ ID NO: 2486 - DNA, 1104 bp, Artificial Sequence
  Optimized genes for E. coli.
atgaatatcaagggcaaagcattattagcaggctgcatcgcactagccttcagcaacatggccctggctgaagatataaaggtagccgtggtaggcgccatgagtggccctgtcgcacagtatggcgatcaagagttcacgggagccgagcaggctgtcgccgacataaacgccaaaggcgggattaagggaaataaactccagattgttaaatatgacgacgcttgcgatccgaagcaggctgtggccgttgctaacaaagttgtaaacgacggaatcaaatacgtcatcgggcatttatgtagctcaagtactcagcccgcgagcgatatctatgaggatgaagggatcctgatgattacccccgcagcgacggcaccagaacttaccgcacgtgggtaccagctaatcctgcgtacgactggcctagactccgaccaaggtcctacggccgctaaatatattttagaaaaggtgaaacctcaacgcattgcaatagtccatgataaacaacaatatggcgaaggtctggcaagagcggttcaggacggtttaaaaaaaggaaacgccaacgtcgtttttttcgatggtattacggcgggtgagaaagactttagtacgctagtcgctagactaaagaaagaaaatatcgactttgtctattatggcgggtaccatccagagatgggtcagatactcaggcaagcccgggcggccggattaaagacacagttcatgggtcccgagggagtggctaacgtctctctgtccaatatagctggcgaaagcgctgagggtctattagtcactaagccgaagaattatgaccaggttccagcaaataaacctatcgtggatgcgatcaaggcgaaaaagcaggatccgtctggagcatttgtctggacaacctacgcagcgttgcagagtcttcaggcaggtctcaatcagagtgatgacccagcagagattgccaaatacctaaaggccaactccgtggatactgtgatgggccccttaacttgggacgagaaaggcgacctaaagggtttcgaattcggggtctttgactggcatgctaatggtaccgcgaccgacgctaagtga

SEQ ID NO: 2487 - DNA, 435 bp, Artificial Sequence
  Optimized genes for E. coli.
atggcctataagcacatcctcattgccgtcgatttatcaccggagagcaaagtgttggtcgaaaaggcagtgagtatggcacgaccttacaatgccaaggtttccttaattcacgtggatgtcaactactcggatttatataccgggcttatcgatgtgaacctaggcgacatgcagaaacgaatcagcgaagagacacaccacgcactaactgaactttcaacgaatgcaggatatcccattacggaaacattgagcgggtccggcgatctcggacaggtgttagtcgatgcgattaagaaatacgatatggatctggtggtttgcgggcatcaccaagacttttggagtaaacttatgtcgtccgcacggcaattgatcaacacggtgcacgtagatatgttaattgtacctttacgagacgaggaagaataa

SEQ ID NO: 2488 - DNA, 333 bp, Artificial Sequence
  Optimized genes for E. coli.
atgaagaaggtactgggtgtaatactaggcgggttacttcttcttcctgtagtgtctaatgccgcggacgcgcagaaagcggcagacaataaaaaaccggttaattcatggacctgcgaggactttctagcagtcgacgagagttttcagccaacggcagtcggttttgctgaagcgttaaataacaaagacaagcccgaagacgccgtcctcgacgtgcaaggaatcgcgacagtaacacctgcgattgtgcaggcatgtacgcaggacaagcaggcaaattttaaagacaaggtcaagggcgagtgggacaagataaaaaaagatatgtag

SEQ ID NO: 2489 - DNA, 252 bp, Artificial Sequence
  Optimized genes for E. coli.
atggccaacgtcgaaatttacactaaagagacctgtccatattgtcatagggctaaagctctattgtcttcgaagggggtatcattccaggagctcccaattgatgggaacgctgccaagcgggaagaaatgatcaagcgttctggtcgtaccacggttccccagatattcattgacgcgcagcacattggtgggtgcgacgatctttatgcattggacgccaggggcggcttagatcccttgctaaagtga

SEQ ID NO: 2490 - DNA, 168 bp, Artificial Sequence
  Optimized genes for E. coli.
atggcaaagggaatcagagagaagattaagttagtgtcttctgcggggacaggacacttttatacaacaactaaaaataagcgaactaaaccagagaagcttgagctcaagaaattcgatcccgtcgtacggcagcatgtaatctataaggaggcgaaaataaaataa

SEQ ID NO: 2491 - DNA, 237 bp, Artificial Sequence
  Optimized genes for E. coli.
atgtcacgtgtgtgccaagtcacaggtaagcggcctgttaccggtaataatcgatcccacgcactaaacgccactaaacggagatttctcccgaatctccattcacatcggttttgggttgaaagtgaaaaacggtttgtaaccctacgagtatcagctaaaggtatgcgtgtaattgataagaaaggtatcgacacagtattagcggaactgcgagcgaggggagagaaatactaa

SEQ ID NO: 2492 - DNA, 276 bp, Artificial Sequence
  Optimized genes for E. coli.
atggcgagggtgacagtgcaggacgccgtcgagaagatcggaaatcgctttgatctcgtccttgtagccgcacgcagagctaggcaaatgcaagtgggcggcaaggaccctttggtccctgaagagaatgacaaaacgaccgttattgcgctcagagaaattgaagagggtcttatcaacaatcaaattttagacgtacgcgaacgacaggagcagcaggagcaagaagcagctgagttacaggccgtcaccgcgattgccgagggacgacggtag

SEQ ID NO: 2493 - DNA, 99 bp, Artificial Sequence
  Optimized genes for E. coli.
atgacgacttcaatgttaaacgcaaagctgctgccaaccgccccttctgcggcagtcgttgttgtgagggtggtggtagtcgtagggaatgcgccctaa

SEQ ID NO: 2494 - DNA, 141 bp, Artificial Sequence
  Optimized genes for E. coli.
atgaagaggacatttcaaccgagcgtgctaaagagaaaccgttcacatggctttagagctaggatggccacaaagaatggtcgacaggttcttgcgcgtcgtcgtgctaaaggacgagcccggcttacggtgagcaagtaa

SEQ ID NO: 2495 - DNA, 1371 bp, Artificial Sequence
  Optimized genes for E. coli.
atgcttaataacgctatgtctgtggtgatccttgccgcaggaaaaggcacgcggatgtactctgacctcccgaaggtgttgcacaccctcgcaggcaaggccatggttcagcacgtcatagatgctgctaacgagttaggcgcggcgcatgtacacctagtctacggacatggcggagaccttctcaaacaagcgttgaaagatgataatttaaattgggtgctacaggcggaacagctgggcacagggcacgctatgcaacaagctgcgccatttttcgccgatgatgaagacattttaatgttatatggcgatgtcccgctaatatcagtcgagactctgcagcggctaagggatgcaaagccacaagggggtatcgggttactaactgtcaaactcgacgatcccacaggatatgggcgaatcactcgcgagaacgggaaagtcaccggtattgtcgagcataaagacgcgacagatgagcagcgccaaattcaagagatcaatactgggattttgatagcgaacggtgcggacatgaaacggtggctggcgaaattaacgaataataatgctcagggagagtactacattacggacataattgcactagcttatcaggaggggagagaaatcgttgcagtgcacccccaacggctatctgaggtcgagggagtaaataatcgcttgcaattgagtcgactagagcgtgtttatcaaagtgaacaagccgagaagttattactagctggcgtcatgctccgcgatcctgcgaggttcgatctgcgaggtacgctaacgcacggcagggacgtagagatcgacactaacgtgatcatagagggcaacgtaacactaggccatcgtgttaaaataggcactggttgtgttataaagaacagcgtgataggcgacgattgtgaaatctcgccgtatacggttgtggaggacgcaaacctggctgcggcatgcaccataggaccattcgcccggcttcggccgggagccgaactgctagaaggggctcacgtcgggaactttgtagagatgaagaaggctagattaggcaagggtagcaaagcaggacatctaacgtatttaggggatgctgagatcggcgataacgttaatatcggggccggaaccattacctgcaattatgacggcgctaataagttcaaaaccattataggggatgatgtgtttgtcggcagtgacacgcagctcgtcgcacccgtcacagtggggaagggagctaccatagcagcagggacaacggtgacgcgaaacgttggagagaacgcactggccatctcgcgagttccgcagacccaaaaagaagggtggcggaggcccgtgaagaagaaatga

SEQ ID NO: 2496 - DNA, 864 bp, Artificial Sequence
  Optimized genes for E. coli.
atggccggagccaaggaaattcgatctaaaatcgccagcgttcagaatactcaaaaaataacgaaagctatggaaatggttgctgcctccaagatgcgaaagagtcaagatcgcatggctgctagccgtccctacgcagaaacaatgcgtaaggtaattggacacttagctcatggtaaccttgagtataaacacccttatctcgaagatagagatgtaaaaagggtcggctatttggttgtctctacggatcgcggtctatgtggaggcttgaatatcaacttgttcaaaaaactgctcgcagaaatgaaaacctggaccgataaaggggtccaatgtgaccttgccatgataggaagcaaaggcgttagcttctttaattctgtaggaggtaacgtggtggcacaagttacaggtatgggagacaacccaagcctgagcgagcttattggtcccgtgaaggtcatgctccaagcatatgatgaagggcggttggataagctctacatagtgtccaataaattcatcaataccatgtcgcaagtaccaactatctcacaactgttaccacttcccgcctccgatgacgatgacttgaagcataagagttgggattatctgtatgagcccgatccgaaggccctcctagataccctgctccgacgatacgtagagagtcaagtataccaaggagtcgtcgagaacctggccagtgagcaagcggctcgaatggttgcgatgaaggccgcgacagataatgggggtagtttgattaaggagctgcagctcgtctataataaagcacggcaggccagcataactcaagaactgactgagattgtttccggggctgctgctgtttaa

SEQ ID NO: 2497 - DNA, 1542 bp, Artificial Sequence
  Optimized genes for E. coli.
atgcagttgaactctactgagatctcagagttaataaaacagcgaatcgcccaatttaatgtcgtctcagaggctcacaacgaagggacgatagttagtgtatcggatggggtaatccgtatccatggcctcgccgattgcatgcaaggagaaatgatttctctaccaggtaatcggtatgcaattgcattgaacctagaaagggattccgtaggtgccgtggttatgggtccgtatgccgatttggcggagggaatgaaggtcaaatgtacagggcgtatcctagaggtgcccgtgggtagaggccttcttggccgagtagttaacacgctaggcgcacccatagacggtaaaggtccgctcgaccacgatggcttctccgctgtagaggcaatcgcgcctggtgttatcgagaggcaatcggtcgaccagccggttcagaccggctataaagccgtggacagtatgataccaataggcagaggccaacgcgagctgattatcggggatcgacagaccggaaagaccgccctagctatagatgccataattaatcagagagattcgggcattaagtgcatatacgtcgcaatcggacagaaagcctctacaatatctaatgtagttcgtaagctcgaagagcacggtgccctggccaataccatagttgtagtggccacggcttctgaatcagcagcgctacagtacttggctccttacgcaggttgtgcgatgggtgagtactttcgtgacagaggagaagacgccttaatcatatacgatgacctaagcaaacaagcagtagcgtaccgacagatctccttgctactacgcaggccgcccggcagggaggccttcccaggagatgtcttctatctgcactcgaggctactagaacgcgcagcgagggtaaacgccgaatatgttgaggcctttacgaaaggcgaagttaaaggaaaaacggggagtttgacggcgctccctatcatcgagacccaggcgggggacgtttctgcgttcgtaccaacaaacgttataagtatcacagatggtcaaatttttcttgagacgaatctctttaatgcgggcatccgcccagcagtaaaccccggtatttcggtgtcacgggttgggggggcggcccaaactaagataatgaaaaaattaagcgggggtatccgcacggccttggcgcaatatcgtgagctagctgcgttcagccagtttgcctcagatcttgatgatgccactcgcaaacaactagaccacggccaaaaagtgacggagctgcttaaacaaaagcagtacgcgccgatgtcagtcgctcagcagtcgctcgtgttattcgcggccgagcgcggttatctggccgatgtcgaattgtccaaaataggctcttttgaggctgctttactggcatatgttgatcgtgaccatgccccccttatgcaggaaattaatcaaacgggaggctataacgatgagattgagggtaaattaaaagggatcttagactcatttaaggctacgcagagttggtaa

SEQ ID NO: 2498 - DNA, 534 bp, Artificial Sequence
  Optimized genes for E. coli.
atgagtgagtttattactgttgcgcgaccctatgcgaaggccgcctttgacttcgccgtagagcatcagagcgtggagaggtggcaggatatgttagcattcgcagcggaggtcactaagaacgaacagatggcagagctcctatctggtgccctagctcctgagacattagcagaatcatttatagcggtctgcggtgagcagctagatgagaacggccagaatttaatacgagttatggcggagaatggaaggctcaatgcacttcccgacgtgttagagcaattcattcacctacgggcggtatctgaggcaacggctgaagttgacgtgatatcggcggctgcccttagtgagcagcaactagctaaaatatcggccgctatggaaaaaagactttcaagaaaagtaaagctcaactgcaaaatcgataaatctgttatggcgggagtgataatacgtgccggggacatggtgattgatggtagtgtgcgtgggcggctagagcgcctcgctgacgtcctccagtcatga

SEQ ID NO: 2499 - DNA, 240 bp, Artificial Sequence
  Optimized genes for E. coli.
atggaaaatttaaacatggatcttctttatatggcagctgccgtcatgatgggtcttgccgcaataggagcggcgataggcattgggatcctcgggggcaagtttctagaaggtgcagcgagacaacctgatttaattccattgctccgcacgcaattctttattgtaatgggactggtcgacgcgataccaatgattgcggtcggactggggctatatgttatgttcgcggtggcttaa

SEQ ID NO: 2500 - DNA, 816 bp, Artificial Sequence
  Optimized genes for E. coli.
atggcgtcggaaaatatgacgccccaagactatataggccatcatctgaacaatttgcaattagatcttcgcacattttcattggtggatccgcaaaatccgccagcaacattttggacgattaatattgactccatgtttttctcggtggtgctaggcctcctattcttggttctttttcggtcggttgcaaaaaaggcgacttcaggggtaccaggcaagttccaaactgccattgagttagtcataggatttgtgaatgggtcagtaaaagacatgtatcatggaaaaagcaaacttatagctccactcgccctaaccatatttgtttgggtctttctaatgaacctgatggacctattgccaattgatttactcccctacatcgcggaacatgttctaggattaccagctttacgtgtagtccccagtgccgacgtcaatgtaaccctaagcatggcgctgggagtgtttatattaatcctattttattcgataaaaatgaaggggatagggggcttcacgaaagaactaacgctccagccctttaatcattgggctttcattccagtcaatctcatccttgaaggtgtgtcgctgctaagtaaacccgtgtcgttagggctgcgtttgtttggaaacatgtatgctggcgagctgatcttcatactaattgctggactccttccgtggtggtcgcaatggattcttaatgtaccttgggcgatattccacatcctaatcataacactgcaagccttcattttcatggtcttaacaatcgtctacttgagcatggccagtgaagaacactaa

SEQ ID NO: 2501 - DNA, 891 bp, Artificial Sequence
  Optimized genes for E. coli.
atgaacatgaaaaagcttgcgacgctagtgagcgctgtcgctctgtcggcaacggttagcgctaatgcgatggccaaggacacgatcgcattggtagtcagtacactgaacaacccttttttcgtctcgcttaaagatggcgcacagaaggaagccgacaaactgggttacaaccttgtggtgctggacagtcagaataatccagcgaaagaactagcgaatgtccaagacttgactgttcgcggcaccaagattctgttgattaacccaacggatagtgacgctgtcggtaatgcagtgaagatggccaatcaagcaaacataccagtcatcactttggaccggcaagccactaaaggtgaggtcgtgtcacacatagcgtcagataatgttctgggaggtaagatcgcaggagattacattgcaaaaaaggcaggtgaaggggccaaagtgattgagctccagggaattgccggaacctcagcggcgagagagcgcggggaaggcttccagcaggcggtcgctgcacataaattcaatgttctagcttcgcagcccgccgactttgataggataaaaggccttaatgtaatgcagaatcttctgactgcccacccggacgtgcaggcagtctttgcccagaacgacgaaatggccctcggcgccctcagagcattgcaaaccgctggtaagagcgacgtcatggtcgtgggatttgatgggacaccagatggtgagaaggcagtcaatgacggaaagctcgcggctactattgcgcagctacctgatcagatcggagcgaagggggtggaaacagccgacaaggttcttaagggcgaaaaagtgcaagcaaagtatccggtcgatcttaaactcgtagtcaagcagtaa

SEQ ID NO: 2502 - DNA, 99 bp, Artificial Sequence
  Optimized genes for E. coli.
atgaccgcgctactgagggtcattagcctggttgtcatctcagtggtggttattattataccaccctgtggcgcggcactagggagaggaaaagcttga

SEQ ID NO: 2503 - DNA, 330 bp, Artificial Sequence
  Optimized genes for E. coli.
atgtctgataagattatccatctaactgacgacagcttcgataccgatgtactaaaagcggatggcgccatacttgtcgacttctgggctgaatggtgtggtccatgtaaaatgatcgcaccgatcctggatgagatcgcggatgagtatcaaggaaaacttacggtagcgaaactaaatattgatcaaaatcctggcaccgcccctaagtacggcatacgagggataccaacgttactactgtttaagaatggagaggtggctgcaactaaagttggggctctatcgaaggggcaactaaaagaatttttagacgctaatttagcgtga

SEQ ID NO: 2504 - DNA, 2262 bp, Artificial Sequence
  Optimized genes for E. coli.
atgaccattcttaatcatacgcttggtttcccgcgagtcgggctacgacgggaattgaaaaaggctcaggagagctactgggcgggcaactccactcgggaggagttgctagcggttgggcgggagctacgggcgaggcactgggatcaacagaaacaagcggggatagacctattaccagtaggagattttgcgtggtacgaccacgtcctgacgacttcacttctgctcggtaacgttccggcacgccatcaaaataaggacggtagcgtagatatagatacacttttccggatcggacgtggcagagctccgactggtgagcccgcagctgccgccgaaatgacaaaatggtttaacacgaattatcactatatggtccccgagttcgttaaggggcagcagttcaaactgacttggacacagttgttagacgaagttgacgaggctctagctctagggcataaagtaaaaccagttctgctggggccggttacatggttatggctaggtaaagtcaaaggagagcagtttgatcgcttgtctctgttaaacgacattctaccggtgtaccagcaagtactggccgagctcgcgaagagagggatagagtgggtacagatagacgagcccgcattggttctggaactacctcaagcctggcttgacgcgtataagccagcgtatgacgccttacaaggtcaggttaaactgctgttgacgacatattttgaaggtgtgacgccaaatctagataccataaccgctttacctgtacagggcctgcatgtcgacctcgtccacggaaaagatgacgtcgctgaattgcataagcggctaccttcggactggctgctctccgccgggttaattaatgggcgcaacgtttggagggctgatctcacggagaaatacgcacagataaaggacatcgtgggaaaaagggatctttgggttgcaagctcatgctcgctacttcattcgcctattgatctgagcgtagaaacgcgtttggacgcggaagtaaagtcttggtttgcttttgcactgcagaagtgtcatgagctagcactcttgagggacgcgttaaattcgggtgatacagccgccttggctgaatggtccgctccaatccaggctaggcgacattccacgcgggtgcataatccagccgtggaaaagaggcttgcagcaattacggctcaagattcgcagagggctaatgtctacgaagttcgtgccgaggcgcaacgcgcccgtttcaaattgccggcctggccgactacaacgataggatccttcccgcagacaacggaaattcgtaccttgaggttggacttcaaaaagggtaacctggatgccaacaactatcgcacagggattgccgaacatataaaacaagctatagtggagcaagagagattaggtctggatgtactagtccatggcgaggccgagagaaatgacatggttgaatactttggagagcacctcgacggatttgtatttacccaaaatgggtgggtgcagtcttacggctcccgctgtgtcaagccgcccatagtaataggagatatatctcggccagcaccgattaccgtcgaatgggctaaatacgcccagagcctcactgacaaacctgtaaagggtatgcttactggacccgtaacaatactatgctggtctttcccaagagaggacgtctctcgtgaaacgattgccaagcaaatagccttagcgttgcgagatgaagtagcggacctggaggctgcaggcattggaattatacaaatagacgagccggcgctgcgggaggggctgccattgaggcgttcagattgggatgcctacttacaatggggagtggaagctttccgtattaacgccgcagtggcaaaggacgatactcagattcatacgcatatgtgttactgtgaattcaacgacatcatggacagtattgcggcacttgatgccgatgtcataaccattgaaacctcacggtcagatatggagttactcgaatcgttcgaagagttcgattatccaaatgaaataggacctggagtgtatgatatccattctccgaatgtaccttcagttgaatggatcgaggccctactcaaaaaagccgccaaacgtattcccgcggagcgcttgtgggtcaaccccgactgcggcctgaaaactcgtgggtggccagagaccagagctgcattagccaacatggtccaggccgcgcagaatcttcggcgcggctga

SEQ ID NO: 2505 - DNA, 213 bp, Artificial Sequence
  Optimized genes for E. coli.
atgaagaaagatattcaccctaaatatgaagagataactgcctcgtgctcgtgcggaaatgtaatgaagattagatccacggtaggacacgaccttaaccttgatgtctgctctaaatgccaccccttctttactggtaagcaaagagatgtagctaccgggggcagggtcgatcgattcaataaacgtttcaatatccctgggagtaagtga

SEQ ID NO: 2506 - DNA, 429 bp, Artificial Sequence
  Optimized genes for E. coli.
atggctaaaaaggttcaagcgtacgtaaaattacaagtggccgcaggtatggctaatccaagtccacctgtaggacctgcgcttggtcagcagggggtaaatatcatggagttttgcaaagcattcaatgctaagacggattccatcgagaaagggctgcctattccagtcgttataactgtctatgccgaccgttcttttaccttcgtaacaaaaaccccgcctgcagcggttttacttaaaaaagcagcggggattaaatcgggcagtggaaagcccaataaagataaggtaggaaaaatttcgcgtgcccagctacaggaaattgcgcaaactaaggctgcggacatgaccggtgcggacattgaggcgatgactaggtcaatagagggtactgcgagaagcatgggtctggttgttgaggactaa

SEQ ID NO: 2507 - DNA, 705 bp, Artificial Sequence
  Optimized genes for E. coli.
atggcgaagctcacaaaaagaatgagagtgattcgtgaaaaagttgacgccacaaaacagtatgatatcaatgaagcaatagctttgctgaaagaactcgcaaccgcgaagttcgtggagtcggtcgatgttgcggtcaacttgggtatagatgctaggaaatctgatcaaaacgtacgcggagctactgtattaccccacggcacggggagatcagtacgagtggcagttttcacacagggagcaaacgcagaggcggcaaaggcggcgggggcagagttagtcgggatggaggacctcgcagaccaaataaagaagggggaaatgaacttcgacgtcgtaatagcatcacctgatgcaatgagagtagttggacagcttggacaggtgctgggcccgcgtggattgatgcccaaccccaaagtcggaaccgtcaccccaaatgttgctgaagcggtaaaaaatgcgaaggcaggtcaagtacgttataggaatgataaaaacggaattatccacacaaccataggaaaggtcgacttcgatgcggataagcttaaagaaaatttggaagcgttgttggtcgcactaaagaaggccaaacccactcaagcaaagggggtatacatcaaaaaagtctcgataagcaccacgatgggagccggcgtagctgtagaccaggcaggactgtcggcctcagtaaattaa

SEQ ID NO: 2508 - DNA, 498 bp, Artificial Sequence
  Optimized genes for E. coli.
atggccctcaatcttcaggataaacaagcaatcgttgcagaggtgtcggaggtagctaaaggggcgttgagtgctgttgtggcggattcgcgtggtgtgactgttgacaagatgaccgagctgcgcaaggctggtcgggaagcaggcgtgtacatgcgagtggtccgtaacacgctgcttcgtagagcggtggagggaacccccttcgagtgcttgaaagacgccttcgtcggaccaacgctcatagcgtattctatggagcatcctggtgctgcagcacgcttatttaaagaatttgcaaaagccaatgcgaagtttgaggtaaaggctgccgcatttgagggggaactgattcccgcatcccagattgatcggttagctacccttccaacctacgaagaagcgatcgctcgactaatggctactatgaaggaagcatctgcagggaagttggtgagaacgttagcggcggtccgcgacgcaaaggaggctgcctag

SEQ ID NO: 2509 - DNA, 366 bp, Artificial Sequence
  Optimized genes for E. coli.
atgtccattaccaaagaccaaatcattgaggcagttgcagcgatgagtgtgatggatgttgttgagctgataagtgctatggaggaaaaatttggggtttctgccgccgcggccgtagcagtcgcggcgggacctgtcgaagcggcagaagaaaaaacggagttcgacgtgattttgaaggccgcgggagccaacaaggtagcagtgattaaggcagttcgcggagccaccggcctaggacttaaagaggcgaaagacttagtcgaatccgccccggcagctctaaaggaaggggtgtccaaagacgacgcggaagccctgaaaaaagctctagaggaagcgggagctgaagtcgaagttaaataa

SEQ ID NO: 2510 - DNA, 4029 bp, Artificial Sequence
  Optimized genes for E. coli.
atggtatatagctatacggagaagaagagaatacgcaaagattttggtaagcgtccacaggtcttagacgttccgtacctgctatctatccagctggacagcttccagaagttcatcgaacaggacccggagggacagtacggacttgaagccgctttcagatccgtctttcccattcaatcatactcgggcaacagtgagttacaatacgtgtcataccgtctgggggaacccgtctttgacgttcaggaatgtcaaattaggggggtgacgtattcagcaccattacgcgttaaacttcgcctagtaatttacgagcgtgaggctcccgaaggtaccgtgaaagacattaaggaacaggaggtgtacatgggcgagatcccactaatgaccgataatggcacttttgtaatcaatgggactgagagggtaatagtgtcccagcttcacagatcacccggagtcttttttgatagtgacaaaggcaaaacacattcgtcgggcaaagtactgtataatgctcgcataatcccgtatcgtggctcttggttagacttcgaatttgatccaaaagataatctatttgtcaggattgaccgtaggcggaagctcccggcgaccattatcctgcgggcccttaattacaccactgagcagatactggacctgttctttgagaaggttatcttcgagattcgagataacaagctgcaaatggaactggttcccgaacggctccgtggcgagacggcctcatttgatattgaagccaacggcaaagtgtatgttgagaaaggacgccgaataaccgcgcgacacatacggcagttggagaaagacgatgtgaagctaatagaagtaccggttgaatatatagccgggaaagtggtagcaaaggactacattgatgagagtacgggtgaattaatttgcgccgcaaatatggaattgtcattggacttacttgctaagctaagccagtcaggtcacaaaagaatagagaccttatttaccaatgatctcgaccatgggccatatatatccgagacacttagagttgacccaacgaacgatcgtctgtcagcactggtagaaatctataggatgatgcgaccaggcgaacctccaacacgcgaagcagcggagtcgctgttcgagaatctgttttttagtgaggatagatacgacttgagtgccgttggacggatgaagttcaatcgcagcctgctgcgggaggaaatagaaggatccggaatactcagcaaagacgacattatagacgtgatgaaaaaactgatagacataagaaatggtaaaggagaggtagacgatatcgatcacttggggaaccgccggattaggtccgttggggaaatggcagaaaatcaatttagggttggactggtgcgcgttgaacgggctgtaaaagagcgcctgtctttaggtgatctggacaccctgatgccacaagacatgattaacgccaagcccatatcagcggctgtcaaagaattcttcggctcatcacaactgtctcaattcatggatcagaataatcccctgtcagaaattacacataagagacgcatctcagcactgggacccggtgggcttacccgcgaacgcgcgggatttgaggttcgagacgtgcatcctacacattatgggagagtttgtcctatagagactccagaaggcccaaatataggcttaattaattcgctgtccgtgtatgcccagacgaatgaatatggatttcttgagaccccgtaccgaaaagtcacggatggagtagtcacggatgagattcactatcttagcgccatagaagaagggaactacgtcattgctcaagctaatagcaacttggacgaagagggccatttcgttgaagacctggttacttgtaggtccaaaggggaatcgtcgttgtttagtcgagaccaagtcgactacatggacgtgtcgacgcagcaggtggtgagcgtcggtgcatccctgataccgttcctagagcatgatgatgcgaatcgtgcactaatgggggccaacatgcaacgacaagctgtacccactctgcgagcggacaaacccttagttggcacgggtatggaacgcgctgtcgcggtggactcaggtgtgactgcagtcgctaagcgagggggcgtcgtccaatatgtggacgcttctcgtatcgtgattaaggttaacgaggacgaaatgtacccaggtgaggccggcatagatatttacaacctcaccaagtacacaaggtccaatcaaaatacctgtataaatcagatgccatgtgtttccttgggtgagccggtagagcgtggcgatgtacttgccgacggccccagtaccgatctaggagagttggccctaggacagaatatgcgagtggcatttatgccctggaacggctataacttcgaagattccatactagtctcggagcgagttgtacaagaggacagattcaccactattcatatacaggaattagcatgcgtgtctagggacacaaaattgggtccagaggagattacggcagacatccccaatgtaggtgaggctgccttgagcaagctagacgagtcagggatagtctacataggtgcggaggtcacaggaggggatatactagtagggaaagtcacaccaaaaggcgaaacacaacttacgcccgaggagaagctcctcagggctatcttcggcgagaaagcgtcagacgtcaaggattcgtcccttcgtgtacccaatggagtatcaggcaccgtgattgacgtacaagtttttacaagggatggggttgaaaaagataaacgtgcgctagaaattgaagagatgcaattgaaacaggccaagaaggaccttagcgaggaacttcagattctagaggcaggtttgttctccagaattagagcggtattggtagcaggtggcgtggaggcggaaaagctggacaagctacctcgagacaggtggcttgagctcggtcttaccgatgaggaaaaacaaaatcagctcgaacaattggcagagcaatatgatgagctcaagcacgagtttgaaaaaaaactagaagctaagcggcgcaagattacacagggcgacgatctggcgcctggagtccttaagattgtgaaagtatatctggcagttaagagaagaatccaacccggcgataaaatggctggccgtcatggaaacaagggtgttatcagtaaaataaatccgattgaagacatgccttatgacgagaacgggacgccagtagatattgtactcaaccccttaggcgttcccagtcgcatgaacattggccaaatactcgaaacccacttgggaatggccgcgaaaggaattggcgacaagatcaacgctatgcttaagcagcagcaggaggttgcaaaattgagagaattcatccaacgggcctacgaccttggtgccgatgtgaggcaaaaagttgacttgtcgactttctctgatgaggaagtgatgagacttgcagagaacttaaggaaggggatgccgatcgccactccggtgtttgacggggctaaggaggctgaaataaaggaacttctaaaactaggcgatttgccaacatcaggtcagatccgtctgtatgacggtcggactggcgagcagtttgagagacctgtgacggtagggtatatgtacatgctaaaattaaaccatctggtggacgataaaatgcacgcgcgaagcaccggttcctattccctagtcactcaacaaccacttggaggaaaagcgcaattcggtggccagcggtttggtgaaatggaggtatgggctcttgaggcatacggcgcagcctatacacttcaggaaatgctgacggtaaaaagtgatgatgtaaacggtagaacaaaaatgtacaagaacattgtcgatggtaaccatcaaatggaaccgggaatgcctgagtcattcaacgtactgttaaaagagatccgctcgctcgggataaatatcgagcttgaggacgagtag

SEQ ID NO: 2511 - DNA, 273 bp, Artificial Sequence
  Optimized genes for E. coli.
atgaataagactcaactcattgatgtgattgctgaaaaagcagagctcagtaagacgcaagcaaaagccgcactggagtcaaccttagccgctatcacggagagcttaaaggaaggtgatgccgtccaacttgtaggcttcggaacctttaaagtaaaccatagggccgaacgaacgggaaggaaccctcaaacggggaaggagattaaaatagcggcagcgaacgtgcctgcgtttgtatcggggaaagcactgaaagatgcagtgaaataa

SEQ ID NO: 2512 - DNA, 1602 bp, Artificial Sequence
  Optimized genes for E. coli.
atgactgaacaggcaacgacaacggatgaactcgccttcacacggccgtatggtgaacaggaaaagcaaatactgacagcggaggcggttgaatttttgaccgaattagtcacacacttcacccctcaacgcaacaaactcctcgcagcgcgcatacagcagcaacaagatatagacaacgggacgttacccgactttatctcggaaacagcgagtattagggatgcggactggaagatacggggaatcccggctgatttagaggatcggcgcgttgaaatcactgggcctgtggagcggaaaatggtcataaatgcgctgaatgctaacgttaaagtatttatggccgactttgaggacagcttggctcctgactggaacaaagtaatagacggccagatcaatttacgcgacgccgtgaatgggactatctcttacactaatgaagcgggaaaaatttaccagctcaaacccaacccggcagtgctgatttgtcgggtgagggggttgcacttgcccgaaaagcatgtaacatggcgaggggaggcgatcccaggtagtctcttcgattttgcgctctacttctttcacaattaccaggcgcttctagcaaagggtagtggcccgtatttctatttaccaaagacgcagtcttggcaagaagcagcatggtggtctgaggtcttcagttacgcggaagatcggttcaatttgccgcgtggtactataaaagccaccttactcattgagactttaccggccgttttccaaatggatgagattctgcatgcactacgcgatcatattgtcgggctcaactgcggtcgatgggattacattttttcctacataaagacgttgaaaaactaccctgaccgggtacttcctgatagacaggccgtcactatggacaagcctttcctcaatgcttattcgcgacttcttattaaaacttgccataagcgtggcgcgttcgcgatgggcggtatggctgccttcattccttcgaaggacgaggaacataacaaccaggttctgaacaaagtgaaggccgataagagccttgaagcaaacaatggtcacgatggtacatggatagctcaccccggacttgcagacactgccatggccgtgttcaatgacattttgggaagtcggaagaatcagctggaggtcatgcgcgaacaagatgcgcccataaccgcagatcagctactagccccatgtgacggtgagagaacggaagagggtatgcgcgccaacatcagggtcgcagtccagtatatcgaagcgtggatttcgggcaatggatgcgtaccaatctatgggttaatggaagatgctgccacggctgaaatatcccgaacaagtatctggcagtggatacatcatcaaaaaacactgtctaacggaaaacctgtgaccaaggctttgtttcgccagatgttgggggaagaaatgaaggtaatcgcctcggagttgggagaagagcgattcagccaaggaaggtttgatgacgcggcgaggcttatggagcaaatcactacaagtgacgagctgattgatttcttgaccttgcccgggtatcgcctgttggcttag

SEQ ID NO: 2513 - DNA, 1305 bp, Artificial Sequence
  Optimized genes for E. coli.
atgaaaactcgcacacagcaaatcgaagagcttcagaaggaatggacgcaaccccgctgggagggtataactcgaccttacagtgcagaggatgttgtcaagctccggggatcagtcaacccagagtgtactctcgctcagctcggtgccgcaaagatgtggcgtttactgcatggagagagtaaaaagggatacataaattcgcttggtgcgcttactggcggccaagcgttgcaacaggccaaagctggaatcgaagctgtatatttatcgggctggcaagtagcggcagacgcgaacctggccgcaagtatgtatccagaccagtcgctgtaccccgctaattccgtccccgcagttgtcgagagaatcaataatacatttcggcgtgcagatcaaatacaatggtcggcgggtatcgagcccggcgacccacgctacgtcgattattttctgcccattgttgctgatgccgaagcgggtttcgggggagtccttaatgcttttgagctcatgaaggccatgatagaagcaggtgcggctgccgtacatttcgaggaccaacttgcatcagttaaaaagtgcggccacatgggtggaaaggtgttggtccctactcaggaggccatacagaaattagtggccgctagacttgcggccgacgtgaccggagtcccgaccctcttagtggctagaacggatgccgacgcggctgatttaattacatctgactgtgacccctatgattctgagttcatcacgggtgaaagaacaagtgaaggattcttccgaacccatgcaggcattgaacaggccattagtcgcgggttggcatatgcaccttacgccgacttagtatggtgcgagacaagcacacctgacttggagttagctcgtcgattcgctcaagctatacatgcaaagtaccccggtaaattacttgcttacaactgctccccgtcttttaattggcaaaagaatcttgatgacaagactattgcgtcctttcagcaacaattgagcgatatgggttacaaattccaattcattaccctggcgggtattcatagtatgtggtttaatatgttcgacttggcgaatgcatatgctcaaggagaaggcatgaaacactatgtggaaaaggttcaacaacccgagtttgcagcagccaaagacggttacacctttgttagtcatcagcaagaggtaggaactggttatttcgacaaggtaacaaccataatacaaggcggaacgtcctcagttacagcactgactggctctaccgaagagtcacaattttga

SEQ ID NO: 2514 - DNA, 294 bp, Artificial Sequence
  Optimized genes for E. coli.
atgaacatccgcccgttgcatgatagggtgatagtgaaacgtaaggaagtggagacaaaatcggcaggcggaattgtacttactggtagcgcggcggctaagtctactcgcggagaggtcttagcagtaggtaacggccgcattctggagaatggcgaggttaaaccgctagacgtaaaggtaggggatatcgtaatctttaatgatggatacggggttaaatctgaaaaaatcgataacgaggaagtactgattatgtcagagtccgacattctcgccatagttgaagcgtga

SEQ ID NO: 2515 - DNA, 951 bp, Artificial Sequence
  Optimized genes for E. coli.
atgtccgacattagtaaggcctccctgccaaaagctatctttctcatgggcccaaccgcgtcgggtaagaccgcgctggcaatagaacttaggaagatcctccctgtggaacttataagcgtagattctgcgctaatatataagggaatggatattggaaccgcgaagcctaatgcagaagagctcttagcagcaccgcaccggcttctcgacatacgggacccttcgcaagcatatagtgcagctgacttccggcgggatgcgcttgcggagatggcggacattacggcggcgggtcggataccgctactagtagggggcactatgttatacttcaaggcgcttttggaaggcctctcccccctcccatccgccgacccagaggtccgagcaaggatcgaacaacaagctgcggaacaggggtgggaatccttgcaccgccaattgcaggaagtggatcctgttgccgcggcacgtatacatccgaacgatccacaacgtctctcaagggccttggaagttttctttatttctggcaagacattaacggagcttactcagacatccggagacgcattgccttaccaagttcaccaattcgccatagcgcctgcgtcgagagagcttcttcaccagcgcattgaacagaggtttcaccaaatgctcgctagtggatttgaggcggaggtgcgggctctctttgcacggggtgatttacataccgatttgccaagtatccgctgcgttggctatcgacaaatgtggagttatctagaaggagagattagttatgatgaaatggtctatcgtggggtatgtgcaacgcgacaattggcaaagcggcagatcacatggcttcgtggttgggagggcgtccactggttggactcggaaaagccggaacaggcgcgtgacgaagttttacaggttgtaggagcaatcgcgggttag

SEQ ID NO: 2516 - DNA, 309 bp, Artificial Sequence
  Optimized genes for E. coli.
atggcgaaaggccaatctctgcaggatccatttcttaatgccttgagacgggagagagtgcccgtatccatttatcttgtaaacgggattaaattgcaagggcaaatcgagtcattcgaccaatttgttatcctattgaagaacacagtgagccaaatggtctataaacatgccatatcgacggtcgttcccagtcgccctgtatcacatcattcgaacaatgcgggcggcggtacgtcctcgaattatcaccatggctcttcagcccaaaacacttccgcccagcaagactctgaagagacagagtag

SEQ ID NO: 2517 - DNA, 396 bp, Artificial Sequence
  Optimized genes for E. coli.
atgaggcactatgagatcgtattcatggtgcatcccgatcagagcgaacaagtacccggtatgatcgaaagatacacagctgcaattaccggggccgaagggaagattcaccgcttagaagattgggggcggagacagttagcgtaccccatcaataagttgcacaaagctcactatgtcctaatgaatgtcgaggcaccccaagaggtcatagacgagttggaaactacgtttcggtttaacgatgcagtaattcgtagtatggtaatgaggaccaagcacgctgtcacagaagcatctcctatggtcaaggcaaaagacgagcgaagggaacgaagggacgacttcgccaatgaaaccgctgacgatgcggaggcgggtgactccgaagagtga

SEQ ID NO: 2518 - DNA, 315 bp, Artificial Sequence
  Optimized genes for E. coli.
atgaccaatagactggtattgtccggtactgtatgtagagcccctcttcggaaggtctctccgagcggtatacctcactgtcaattcgttctcgagcatcggtcggttcaagaggaggctggcttccaccgtcaggcgtggtgtcaaatgcccgtaatcgtcagcgggcacgagaatcaagccataactcacagcataacagtagggagtcggattaccgtacaggggtttatatcgtgtcacaaagcaaaaaatgggttatctaagatggttttacacgcagaacagatagagcttatagattctggggactag

SEQ ID NO: 2519 - DNA, 228 bp, Artificial Sequence
  Optimized genes for E. coli.
atggcgaggtattttcggcgacgcaagttttgtagattcacagctgagggggtacaggaaattgattacaaggacattgcgacgctaaagaactatataacggagtctggaaaaatcgttccaagcaggatcacagggacacgggcgaagtatcaacgacagttagctagagccattaaacgggcgagatacctgtccctgttaccatatacagataggcaccagtag

SEQ ID NO: 2520 - DNA, 387 bp, Artificial Sequence
  Optimized genes for E. coli.
atgtctaagacgatcgcgacggagaacgcacctgctgccatcggtccgtatgtacaaggcgtggacttaggtaatatgataatcacttccggtcaaataccagtaaacccaaagactggcgaagtgccggcagacgtagccgcgcaggctcggcagtcgctggataatgtgaaggctattgtggaagctgcgggtctgaaagttggagacattgtaaagacaaccgtgttcgtaaaggatctaaatgacttcgcgaccgtcaatgctacgtacgaagcttttttcacagaacacaatgctacgtttccagccagaagttgcgtagaggtagctcgtctcccaaaagatgtgaaaattgagattgaggcgattgcagtgagacggtga

SEQ ID NO: 2521 - DNA, 936 bp, Artificial Sequence
  Optimized genes for E. coli.
atggcaaaccccttgtatcagaagcatatcatctcgataaacgatctgagccgtgatgatcttaacttagtcctggcaacggcagcgaagttgaaagctaacccccagcccgagctgttaaaacataaggtaatagcaagttgtttttttgaagcttccacccggacaaggttaagttttgaaactagcatgcatcgcctcggagcgtcggtcgtgggttttagcgactcggcaaatactagtttgggaaaaaagggggaaacacttgccgatacgatctcagtaatctcaacgtacgtggatgccatcgttatgaggcatccgcaagagggggccgcccgtttggctacggagtttagtggtaatgtccctgtgctaaatgctggggatggttcgaaccaacatccgacacagacccttctcgacctgttcacaatacaagaaactcagggacgattggataacctccacgtggccatggttggcgacctgaagtacggcagaactgtgcatagtctaacgcaagcgcttgccaaatttgacggtaaccggttttacttcattgcgcccgacgctctagcaatgccgcagtatattcttgacatgctggacgaaaaaggaatcgcctggtctctccactctagcattgaagaagtgatggctgaggttgacatactttacatgacacgagttcagaaggaaaggttagatccgagtgaatacgcaaacgtaaaagcacagttcgtcctccgagcatctgaccttcataacgcaaaggccaacatgaaggtcctacacccattgccacgggtagatgagattgcgacggacgtagataaaacccctcatgcctggtactttcagcaagccggcaatgggatcttcgctcgccaagcactattggcattggtattgaatcgtgatctagtgttatga

SEQ ID NO: 2522 - DNA, 417 bp, Artificial Sequence
  Optimized genes for E. coli.
atggcaaatcctgaacaactggaggaacagagggaggaaacacgtctaatcatcgaggagctcctcgaagatggttccgatccggacgcactttacacgatagagcatcacctcagtgctgacgacttggagacgttagagaaggctgcagttgaagcgttcaagttggggtacgaggtgaccgacccggaagagctcgaggtagaagatggagacatagtgatttgctgcgacatactgtccgagtgtgcccttaacgccgacctgatagatgcccaggtggaacagttgatgactctagctgaaaagttcgacgtcgagtacgacggatggggcacctactttgaagatccaaatggcgaagacggtgacgacgaggacttcgtcgatgaggacgacgatggggtgagacattag

SEQ ID NO: 2523 - DNA, 1320 bp, Artificial Sequence
  Optimized genes for Lactococcus lactis
atgccagtttctcgtattaaagtaaaaaatcgtcatttgaaaaaaaaagccaaaaagccacttgctttttataaaccagcaacaaaatttgctggtgctgttttaattgctggtactttaacaacaactcatgaacttttacttcaacaaacttctccaatggttcaagctgcgacaaattctactgaagcatttattgaatcaattgccgcaagtgctaaacctgtagctgattctaacggactttatcctagtgttatgattgctcaagcaattttagaaagtaattggggctctagccaattatcaagagctccatactataatctttttggaatccaaggaacatatcaaggtaaatctgttgtttttaaaactcaagaatatttgaatggaaaatgggttactaaagatatgccttttcgtgtttatccatcatttaatcaaagttttcaagataatgcttatgttcttaaaacaactaattttggtaatggtccttattatgctaaagcttggcgtgctaatgcagcaacttatcaggcagctactgctgctttaactggtaaatatgcaactgacccaaattatggagcttcacttaatagaattattagtcaatataacttgacacgttttgatggtgcatcttcagctggaacttcaaactctggtggttctacagctacaaataccaataacaattcaaatacttcgtcaacaacctatactgttaaatcgggtgacacactttggggaatttctcagaaatatggtatttcagttgctcaaattcaatctgcaaataatttaaaaagtacagttatttatattggacaaaaattagttttgactactagttcaagttcatcaaatacaaactcatcaacttcttctggaaatagtgcaggaaccactacaccaacaacatcagtaacacctgcaaaaccagcttctcaaacaacgataaaagttaaatcaggagatacattatggggattatctgtcaaatacaaaacaacaatcgcacaacttaaatcttggaatcatttaaattcagatacaatttttatcgggcaaaatttgattgtttcacaatcagcaggttcaagtagctcatcaacaggaagttcttcggcatcaacttcaagcacatctaatagctctgctgcaagcaatacaagtattcataaagttgtgaaaggtgatactttgtggggtttaagtcaaaaatcaggttcaccaattgcatctattaaagcatggaaccatctttcatctgataccattcttattggtcaatatcttcgtatcaaataa

SEQ ID NO: 2524 - DNA, 1428 bp, Artificial Sequence
  Optimized genes for Lactococcus lactis
atgactacttttggtgttgccggtcatgctgatggagtaacagttggttcatcatcagatgcaagttcatcaacaggttcatcaagtagctctagtggtactggtggaagttcaagttctagctcaactggaagcagtagtagttcaagtaattcaaacgcttcttcatcttcaagctcaacgggaaactcttccagttcgagtaagccaagcacatcaggatcaacaagtaaaccatcaaatccaagttcaagtacaaataataactcaacttcaaattctagtactacaacacaagctccttctacttcagtttccacaattgctccatcagctagtacctcaaccgttgcaccatctaattattcacaagataatgcttattatcaaacttctacagctgcccaaattccaaatagctcagcagatagtgcaccttcaatttatgcaggaccagttttaaaaactattgaggcagctaaatcaattgataaaatagatacaagctcaactgaagcatttattaagtctatcgctgaccgtgttcgtattttagctggaaaaaataatctttatgcttcaatcatccttgctcaagcaattcttgaaagtggatctggtcaatctaatatgagtcaacaatattttaacatttttaatattacaggagcctatcttggtaaatctatttcatttaaaacagaagaattttcaggtaacaatccttattacattgaacaatcattccgtgtttattctaactatgaccaagctttggatgattatatcaatttaatgattaaaggaacaacttggaattcagagatttacgcaggtgcttggaaaagtcatgcaaaaacatatcaagaagctgcacaagcacttcaaggtatctttgctactgacccagcttatgctcaaaaattgattgaaattatccaagaatataaattagatgcttatgataatgttgactcaacaacgcaagttgttgattctaaaattcctgaatcacctttagcagcatcaaaacttgataatagtgcttacccagaatacaatggagttgagtatccaggagctgattcatatgcctttggaaattgtactcaatatgtttataatagaattattcaacttggaggacttgttggaactcatatgggaaatggtggtgaatggggaattaatgcacaagcgcaaggatactttacaacaactgttccaacagaaggttatgcagtttcttttccaccaggtgtcgctggttcttcttctgaatatggacatgttgcttttgttgaaaaagtttactctgataacagtattttggtttcagaaatgaatgttaaaggtaataatattgttagtgaacgtcatatttctgctggtgtagctgctcttgcaacttatattcaaccaaaataa

SEQ ID NO: 2525 - DNA, 1086 bp, Artificial Sequence
  Optimized genes for Lactococcus lactis
atgaaacaaaaacataaacttgctttgggtgctagtattgttgcacttgcaagcttaggtggtattaaagcacaagcagcatctgtacaagagattattaatgcagctgttccagttgccaatgattatggattatatccaagtgttatgattgctcaaggtatccttgaaagttctggaggacaatctgctttagcatcaaattataataatatttttggtgtaaaatatacatctggtacaccagtctatttaccaacacaagaatatttgaatgggacaatgacaaatgttgttgaaccatttcaagcttatagttcagtttatgatgcttgtgtcgctcaggctaaaatgcttcgtgcttcaagctattattcaggagcatggcgtgaaaatacctcatcatatcttgatgcaacagcttggttagaaggacgttatgcaactgacccaacttatgcttcaaaattaaatagcgttatttctgaacttggtttatctgtttatgaccaaggaggtgaaatttcaggtggaacagcagttacaacttcaagtagtgcaagtacaaatagtgctggtacctataaagttcaagaaggtgatagtctttcagcaattgctgctcaatacggaactaccgttgatgcgcttgtttctgcaaattcattggaaaatgctaacgatattcacgttggagaagttttacaagttgctggagcttctactacaacaacaagtactaatacaaccagcaatgtaagttcatcttcaacttacactgttaaatcaggcgattcactttattctatcgctgaacaatatggtatgactgtatcttctttgatgtcagcaaacggaatttatgatgttaattcaatgttgcaagttggtcaggttcttcaagtaacagtttcaacatcagctacaacttctaatactactacgagtaattcttatactattcaaaatggagattctatttactcaattgcaacggctaatggaatgactgctgatcaacttgcggctcttaatggttttggaatcaatgatatgattcatccaggtcaaacaattcgtatttga

SEQ ID NO: 2526 - DNA, 222 bp, Artificial Sequence
  Optimized genes for Lactococcus lactis
atggctgtttttgaaaaagttcaagatatcattgttgacgaacttggtaaagaaaaagaagaagtaacacttgaaacaagttttgaagaattagatgctgactcacttgatttatttcaaattattaatgatattgaagatgaatttgatgttgaagttgatacagaagcagatatgaaaacagttgctgatttggttaaatatgttgaaaataataaataa

SEQ ID NO: 2527 - DNA, 2712 bp, Artificial Sequence
  Optimized genes for Lactococcus lactis
atggctactaaaaaggcagcaccagcagctaagaaagttctttcagcagaagaaaaagcggcaaaattccaagaggctgtagcttatactgacaaacttgttaaaaaagcacaagcagcagttttgaaatttgaaggttatacccaaactcaagttgacacaatcgtagccgcaatggcattagctgcttctaaacattcactagaacttgcacatgaagcagtaaatgaaacaggtcgcggtgttgttgaagacaaagatacaaaaaatcattttgcgtctgagtctgtttataatgcaattaaaaatgataagactgttggggttatttcagaaaataaagtggctggaagtgttgaaattgccagtccacttggtgtgcttgctgggattgttccaactacaaatccaacatcaacagccatctttaaatcattactgacagctaaaacacgtaacgcaattgtctttgcttttcatcctcaggcccaaaagttttcatctcatgcagctaaaattgtttatgatgccgctattgaagctggtgctccagaagattttattcaatggatagaagtaccatcacttgatatgacaactgctcttattcaaaatcgtggattagcaacaattttagcgacagggggtccaggaatggttaatgctgcacttaaatctggaaatccttcattgggtgtaggagcaggtaacggtgcagtttatgtcgatgcaacagcaaatatcgaacgtgctgttgaggaccttcttttatcaaaacgttttgataatggaatgatttgtgcaactgaaaactcagctgtcattgatgcgtcagtctatgacgagtttatcgcaaaaatgcaagaacaaggagcttatatggttccaaaaaaagattacaaagccattgaatcatttgtttttgttgaacgtgcaggagaaggatttggagtaactggaccagttgcaggacgttcaggacaatggattgctgagcaagcaggcgttaaagttcccaaagataaagatgttttactttttgagttggataaaaaaaatattggggaagctttgtcatcagaaaaattatctcctttattatcgatttataaagcagaaactcgtgaagaaggaattgaaatcgttcgttctcttttggcctatcaaggtgctggacataatgctgctatccaaattggagccatggatgacccttttgtaaaagaatacggtgaaaaggttgaagcatcacgtatcttggtcaatcaacctgattcaattggtggagttggtgatatttacacagacgcgatgcgtccaagtttaacacttggaactggttcatggggaaaaaattcactcagtcataatctttcaacttacgatttgttaaatgtcaaaactgtagcaaagcgtcgtaatagaccacaatgggttcgtttaccaaaagaaatctattatgaaaaaaacgctataagttatcttcaagaacttccacatgttcataaagcatttattgttgctgatccaggtatggtaaaatttggtttcgttgataaagtacttgaacaacttgcaattcgtcctacacaagtagaaacaagtatttatggttctgtacaacctgacccaacgcttagtgaagcgattgcgattgctcgtcaaatgaaacaatttgaaccagatactgtcatctgtttaggtggtgggtctgctctagatgctggtaaaatcggtcgtttgatttatgaatatgatgcacgtggtgaagcagatttaagtgatgatgcttcattaaaagagttatttcaagaattggctcaaaaatttgttgatattagaaaacgtattattaagttttatcatccacataaagctcaaatggtcgctattccaacaacatctggtacaggctctgaagttactccatttgctgttatcactgatgatgaaactcatgtgaaatatccattggctgactatcaattaactcctcaagttgccattgtagatcctgaatttgtcatgactgttcctaaaagaacagtttcttggtcaggtattgatgctatgtcacatgctttagaatcttatgtttcagttatgagttcagattatacaaaaccaatttctttacaagctatcaaattaatttttgaaaatttaacagaaagttaccattatgatcctgctcatccaaccaaagaaggtcaaaaagcaagagaaaatatgcacaatgcagcgactttagcagggatggcctttgccaatgcttttttaggaattaatcatagtcttgctcacaaaattggcggagaatttggtttacctcatggtttggcaatcgctattgcaatgccacacgttataaaatttaatgcggttacaggaaatgttaaacgaacaccttatcctcgttatgagacttatcgtgcgcaagaagattatgctgaaattagtcgctttatgggttttgcaggtaaagacgattctgatgaaaaagctgttcaagcgttggttgctgaactcaaaaaattgacagatagtatagatatcaatattactttgtctgggaatggtgttgataaagctcatttggaacgcgaattagataaactcgctgatttagtttacgatgatcaatgtacaccagctaatcctagacaaccaagaattgacgaaattaaacaattgttgcttgaccaatattga

SEQ ID NO: 2528 - DNA, 564 bp, Artificial Sequence
  Optimized genes for Lactococcus lactis
atgtcacttgttggaaaaaaaattgaagaattttcaacagatgcttatcttggtggtaaatttatcaaagtttctgataaagatttttatggtaaatggtcagttctttgtttttatcctgctgacttttcttttgtatgtccaacagaacttgaagatttggaagaaacttacccaactttaaaatcattaggagttgaagtttattcagcttcaactgatactcattttgttcatgctgcttggcatgaacattcagatgcaatttcaaaaattacttatccaatgcttgctgatccaagtcaaaaaatttctcgtgcttttgatgttttagatgaagaagctggtttagctcaacgtggaacttttattattgacccagatggtgttattcaagcattagaaattacagcagatggaattggtcgtgatgcctcacaattagttgataaaattaaagcagcacaatatgttcgtaatcatccaggtgaagtttgtcctgctaaatggaaagaagacggtgcttctcttcatgttggtattgatttagtaggaaagatttaa

SEQ ID NO: 2529 - DNA, 711 bp, Artificial Sequence
  Optimized genes for Lactococcus lactis
atgactgaaattactcaactttttcaatataatacacttggtgctttgatggctggactttatgaaggaacaatgacaattggtgaacttttgaaacatggagatttgggaattggaactttggattctgttgatggcgaattgattgttttagacggtaaagcttatcaagcaaaaggtgacaaaacaatcgtagaattaactgatgatatcaaagttccttatgctgctgttgttccacatcaagctgaagttgtttttaaacaaaaatttacagcttcagataaagaacttgaagatcgtatcgaatcttattttgatggtcaaaaccttttccgttcaattaaaattacaggagaatttcctaaaatgcacgttcgtatgattccacgtgctaaatcaggtactcgttttgttgaagtaagtcaaaatcaaccagaatatacagaagaaaatgttaaaggaaccattgttggtatttggacacctgaaatgtttcatggtgtttcagttgctggttatcatcttcattttatctcagaagactttacttttggtggacatgttcttgattttattattgataatggtacagttgaaatcggtgcaattgaccaattaaatcaatcatttccagttcaagaccgtaaatttttatttgctgatttagatattgaagctttaaaaaaagatattgatgttgcagaataa

SEQ ID NO: 2530 - DNA, 1665 bp, Artificial Sequence
  Optimized genes for Lactococcus lactis
atgtcagaaaaacaatttggtgctaatttggtagttgattctttaatcaatcataaagtaaaatacgtctttggaattcctggtgctaagattgatcgtgtttttgacttgttagaaaatgaagaaggtccacaaatggttgtaactcgtcacgaacaaggtgcagcttttatggcacaagcagttggacgtttaactggtgaacctggagttgttgtcgttacatcaggaccaggagtaagtaatttagcaacaccacttttgacagcaacaagtgaaggagatgctattcttgcaatcggtggacaagttaaacgttcagaccgtttgaaaagagctcatcaatcaatggataatgcaggtatgatgcaatctgcaactaaatattcagcagaagttttagatccaaatacattatctgaatctattgcaaatgcttatcgtatcgctaaatctggacatccaggcgctacttttttgtcaatccctcaagatgtaacagatgccgaagtttcaattaaagcaattcaaccattatcagatccaaaaatgggaaatgcaagtattgatgatattaattatcttgctcaagctatcaaaaatgctgttcttcctgtaattttggttggtgctggagcatcagatgcaaaagttgcttcatcattacgtaacttgttgactcatgttaatattccagttgttgaaactttccaaggagctggtgttatcagtcatgatttggaacatacattttatggacgaattggattattccgtaatcaacccggtgacatgcttttaaaacgaagtgatttagttattgctgtaggttatgacccaattgaatatgaagcaagaaattggaacgctgaaatagattcaagaattatcgtcattgacaatgcgattgctgaaatcgacacttattatcaacctgaacgtgaattaattggtgatatcgcagcaactttggataatttattaccagctgttcgtggttataaaattcctaaaggtacaaaagattatttagacggacttcatgaagtagcagagcaacatgaatttgatacagaaaatactgaagaaggccgtatgcacccattggaccttgtttctacttttcaagaaattgttaaagacgatgaaacagttactgttgatgtcggttcactttatatttggatggctcgtcattttaaatcatacgaaccacgtcatttgcttttttcaaatggaatgcaaacacttggtgtagctttgccttgggcaattacagctgctttacttcgtccaggtaaaaaagtttattcacattcaggtgatggaggatttttatttacaggtcaagaacttgaaactgctgtcagattaaatcttccaatcgttcaaattatttggaatgatggtcattatgatatggtcaaatttcaagaggaaatgaaatatggtcgttctgctgcagtagattttggctatgttgactatgttaagtatgctgaagctatgcgtgctaaaggatatcgagcacattctaaagaagaattggctgaaattttaaagtcaattccagatactacaggacctgttgtgattgatgttccacttgattattctgataacataaaacttgcagaaaaattattgccagaagaattctactaa

SEQ ID NO: 2531 - DNA, 1476 bp, Artificial Sequence
  Optimized genes for Lactococcus lactis
atgaaaactatcttgcaagcttttgaatggtaccttccaagtgatagtcaacattggaataacataaaagaaaatattcctgatttaggaaaacttggtttttcaggactttggttaccaccagcttctaaagcagcatctggtgttgaagatgttggttatggtacttatgatttgtttgatttaggtgaattcgaccaaaaaggaactattccaacaaaatatggtacaaaagatgaatatcttgatttaattaatacacttcatcataataatatcgaagtttatgctgatattgtctttaaccatatgatgggtgcagatgaaacagaaacaattgaagctgatatcaaagctgaagacaatcatttacacaatattgaaaacaataaaacagtagaagtatggactaaatttacttttccaggacgtcaaggaaagtatgataattatatttggacttggcataactttacaggaatagattatgacgaacgtaaaaatcaagaagaaatcttagaatttgaaggtcacgaatgggatgaaaatgttgacagtgaaaataataatttcgattatttaatgggagctgacttagactttagtgtttcagaaactgttgaacaacttgaaaaatggggtcattggttttctgaaatgactaagattgatggtttccgtttggatgctattaaacatattgattttaaatactttgataaatggcttgagcaacgtgctaaacaattagatagaaaattatttattgttggagaatattggtcagatgatttgggtaaattggaatattatttggaacaatcaagtgaccgtattcaactttttgacgttccattgcattttaatatgaaagaagcatcatcaactaatggagagtttgatatgcgtacactctttgaccatacattgactgcttcacaaccagaactttcagtaacatttgttgataatcatgatactcaagaaggacaagcacttcaatcttggattcctgcttggtttaaagaacatgcttattcattgattttacttcgtaaaaaagagactcctacagttttttggggagatctttatggaattccttcacataatgtaaatccagttggtgataatttaagaacaatgattgctttgagaaaagattcagaatttttacgtgaaaatgactattttgatcatccagatattattggttggacaaacattttaaaaattgataacaaagaatacggattatcttgtattttgacaaataaaaatggtggttcaaaatatatgattatcgataaggcctatgcaggtaaagtttacattgacctttttggtcgtcatgaaattccaattactttggaccaaaacggtggagcagaattttatgttaatgatggatcagtttctgtttgggttgataaagaaattgtaagtaaaattgatcaaatgaattttcaaaattaa

SEQ ID NO: 2532 - DNA, 645 bp, Artificial Sequence
  Optimized genes for Lactococcus lactis
atgcaagaaattattattcaagttatgaatcaatttggatatttcggtgttgcttttcttatcatgattgaaaatatttttccaccaattccttcagaagttattttgacttttggtggttttatgactacttatagtgaacttggaatcattggaatgataattgcagcaactattggttcagtattaggtgctttaatcctttattttgtaggacgtcttctttcagttgaacgtttagaaaaattagtttctggtcgtttgggtaaagttttaagattgaaaccagaagatattactaaagctgaaaaatggtttttaaaacgtggttatgcaacaattttcttttgtcgttttattccacttattcgttcacttatttcaattccagctggatcagctaaaatgaaacttccaagttttttgattttaacaactttaggaactttgatttggaatattgttcttgtttgtttgggagctgctcttggtgataattgggaaatgattgctggtattcttgattcttattcaagtgttgtagttgttatcctcggaattatctttatcttggcaattttaatttttgttaaaaaaagatttttcccaaaaaataaaaattattcttctgatacagaaaaataa

SEQ ID NO: 2533 - DNA, 1473 bp, Artificial Sequence
  Optimized genes for Lactococcus lactis
atggatgctgaaaataagaaaggcattggtttagcggcacttgttgctatcattgtgtcaggagcaatcggaggtggagtctttaatttatctaatgatttagcaacaaacgcttctccaggtggggttgttatttcttggattgttattggtttcggtatcttaatgttggttttaagtttaaatcatttagtagttaataaaccagaactttctggtgtttcagattatgcacgtgctggttttggtaatatggttggatttatctcaggttggggatattggctctctgcttgggcagggaatatcgcatttgctgtactcatgatgacttctgttgattacttttttccaggagtattccaagcaaaaaatggttcactgacaattttgtcagttatcgttgtatcaatcgtttcttggggattgacacttttggtcatgcgtggtgtagaaggagctgcagcaattaatgctattgtccttgtcgctaaattaattccattatttgtatttgtcattgctggaattgtaactttcaaagcaggtgttttttcagctcatttttggcaaaattttgttgcaaatacaaatgctgatggtgtcattaaatcattgacttggtcaaatatgacaggaggagatttgttttctcaagttaaaggaagtttgatggttatgatttgggtttttgttgggattgaaggtgctgctatgatgggtgaccgtgccaaacgtaaatctgatgcaggaaaagcttcaattttaggattaatcgctttgcttgtaatttatattttattgtctttacttccttttggctttatgagtcaacaagaattagctaatactggtcaacctggtttggttcatattttgaatgcaatggtaggtggatggggtggttctttgatggcaattggacttgtgatttcattattaggggcttggctttcatggacaatgcttccagttgaagctactcaacaattatcagaacaaaaacttttaccaagttggtttggtaagcttaatgataaaggtgcaccaaaaaattcacttcttttaacacaacttattgttcaaatttttttaattgttacttattttgtggctgacgcttataatgttttcgtctatctttgtacagcagttatcatgatttgttacgctttagttggtctttacctttttaaattgggtattcaagaaaaaaaaacaagtaatattattatcggttttattgccgcagcttttcaaatcttggcattatattattcaggctggcaatttgtttggttaagcttgattttatacgcagtaggattcatcctttatgctcttggtaaaaaagaatatggtacaaaaatgtcaactgcagaattgattgcaacttttgttcttactgttttgggaattcttgctgtttttggagtttatggaaattggttggctcgttgcacttggaattaa

SEQ ID NO: 2534 - DNA, 1131 bp, Artificial Sequence
  Optimized genes for Lactococcus lactis
atggaattagttcaatttggttgtgaagattggcttaatgtttgggaaaaatctgcaacaattgatattgcacaatcaaccattgacagtttatcattagaagaagttttagcatttgaagaagataatggtgaagcttttatgagtcaaatgatgaaagaaaaattttcttatggttggattgaaggttcaccagcttttaaaagtgaagtagctaaactttataaacgtgttccagaagacaatattctttcaacaaatggagcaactggtgcaaattttttaactattttaggattgattggtcaaggtgatcatgttattgctcaatatccaagttaccaacaactttatgactggccaaaaacacttggtgcccaagtagattattggcatattaaagaagaaaataattggttaccacaaattgaagagttacgtcgtttggtaaaatcaaatactaaattgatctgtttaaataacgctgctcaaccaactggtgctatcatgtcacctaaattcttatctgaagttgttgaaattgcccgttctgttgatgcttatattttgtgtgatgaagtctatcttccattagatgaagaaactccttattctccaattgctgatttatatgaaaaaggaatctcaactaattcaatttcaaaaacttattcagttcctggaattcgcgttggatgggttgctactcaagatcgtgatctttgtaatgaatttcgtaaaattcgtgactatactttaatttgtacaggtgtttttgatgatgcagttgcagctttggttttgaaacataaagataaagttcttgaacgtgcaagaaaaattgttaaaggtaatttaagtattcttaaagaatgggtagaaaacgaaccacttgtttcaatggtttatcctaatgctgttagtgtttcttttgttaaatttgaagaacttgatccaacaaaaacagaagattttgctattcaattattaagagaaaagggtgtacttattattccaggaaatcgttttgacctttctggttatgctcgtattggatattgtactgacgaaacaactttgcgtcaaggattaaaattattgtcagaattccttcgtgaatatcaagtttaa

SEQ ID NO: 2535 - DNA, 1023 bp, Artificial Sequence
  Optimized genes for Lactococcus lactis
atgacttttaaagaactttcaaataaaatcaatattaaagatgttcgtgaattaaatcatttgaatgatgaacaacaagaaaaaaaagaaaaacgtgataaggaactcgaagcaattattaaaggtgaagatgaccgtattttgcttgtcattggtccttgctcatcagataacgaagctgctgttttggaatatgctcaccgtttgttaaaattacaaaaagaagttgaagacaaaatttttatcgtcatgcgtgtttatacagctaaacctcgtactaatggtgatggctacaaaggacttatccatgaaccagatgcagatggacatacagatttgatcaacggaattaaaatggttcgtgaccttcattataaagtaattacagaaacaggtttaacaactgctgatgaaatgctttatcctgaaaatttaccacttgttgatgatttagtttcttattacgcagttggtgctcgttcagttgaaaatcaacagcatcgttttgttgcttcaggtattgatgctccaacaggaatgaaaaatccaacttctggtaatttgaaagttatgtttaatggtatgtatgcagctcaacaaagtcaagattttttatttggaaatgctgaagtagaaacttcaggaaacccattggctcatgctattttacgtggtggtcaagacgaaaatggaaaaaatcatccaaattattatactgataatcttttagaatcaatcgaaatctatgaaaaaatgggtcttcaaaatccttttattgttattgacacaaatcatgataattctgggaaaaaatatatggaacaaattcgtatcgttagacaaactttggttaatcgtaattgggatgagcaaattcataaatatgttcgtggatttatgattgaaagttatcttgaagatggtcgtcaagataaaccagaagtttttggtaaatcaattactgacccttgtcttggttgggataaaactgaagaattgattaatgaaatttataatagttaa

SEQ ID NO: 2536 - DNA, 564 bp, Artificial Sequence
  Optimized genes for Lactococcus lactis
atggaattccgtttggctaaaaaatcagatgcaaaacgtttattggaaatttacaaaccatatgttgagaaaacagctatcacttttgaatatgaagttccaacaattgctgaatttgaaaaaagaatcgaaaaaatcggttcacgttatccttatattgtcgctattgaaaatgataaaattattggatatgcatacgctggagcttaccgtgaaagagctgcttatgattgggttgttgaattatcaatttatcttgatgaaaacgaacgtcaacatggtgctggttctgctctttatcaaaaattattaactgctttgagtgttttaaattatcaacgtgcttatgcttgtattacttatccaaatccagcttcagttgcttttcataaaaaatttggttttgagcaaattggtctttttccaaaagcaggttataaatttgaacaatggtacggaattgtttggttagaacgttcacttcaaacaactgataaagttacagcaattaaacttttgactgacctttcagaaaatgaacttgaaaaaattttagcaaattaa

SEQ ID NO: 2537 - DNA, 1023 bp, Artificial Sequence
  Optimized genes for Lactococcus lactis
atggcaattaatcttgattgggaaaatttgggtttttcataccgtaatttaccttttcgttatattgctcgtttcaaagatggaaaatggtcagctggagaattaacaggagataatcaacttcatatttctgaatcatctccagcattgcattatggtcaacaaggatttgaaggattaaaagcttatcgtacaaaggatggttcaattcaattattccgtcctgaccaaaatgctgctagacttcaaaatacagctcgtcgtctttgtatggctgaagtaccaactgaaatgtttatcgatgcagtcaaacaagttgttaaggctaatgaagattttgttccaccttatggaacaggtgcaactttgtatcttcgtccacttttgattggtgttggtgatgttattggggtaaaaccagctgacgaatatatctttactgtttttgctatgccagttggttcttattttaaaggtggacttgctccttcaaaatttgtaattagtcgtgattatgaccgtgcagctccattaggaactggtggtgctaaagtaggaggaaattatgcagcaagtttacaagcagaagtgggagcaaaagcatcaggttatgctgatgctatttatttggacccatcaactcatacaaaaattgaagaagttggagctgcaaatttttttggaatcacagcagataacgaatttattacacctttaagtccatctattttaccaagtattactaaatattcacttctttatttagctgaacatcgtttgggattgaaagccattgagggtgaagtttatgccaaagatttaggtaaattcgtagaagctggtgcctgtgggactgctgcgattatttcaccaattggacgtattgatgatggcgaagacagttatatttttcattcagaaacagaagtcggtccaacagttaaacgtttatatgatgaacttgttggaattcaatttggtgacgttgaagcaccagaaggttggattgttaaagttgattaa

SEQ ID NO: 2538 - DNA, 1053 bp, Artificial Sequence
  Optimized genes for Lactococcus lactis
atgaaaaaacgtgtgattgcagtatcagctttagcacttgcttcagttgcagttttggctggttgtcgctcacatgatgcggctggaagtgggaaagctaaaactgatttaaaagcagcaattgttacagaaatcggtggagtaaatgatcgttcatttaatcaatctgcttgggaaggattacaatcttggggaaaagaaaataatcttaaaaaaggaacaggatatacatattttcaaagtaattctgcaagtgattatactacaaattataatagtgctgaacaacaaggatacaaattactttttggaactggtttttcacttcaagatgcaacatcagcagctgctaaaaacaatcctaaatcaaattttgttatcgttgattcagtaattaaagaccaaaaaaatgttgcctcagcaacttttgctgataatgaatcagcttatttagcgggtgtagctgcggcaaaagctactaaaactaataaaatcggatttattggtggaatgcaatcagatgtcattacacgttttgaaaaaggttatgaagcgggagcaaaatctgttaatccagatatcaaagtagacgttcaatatgctggttctttttctgatgctgccaaaggcaaaacaattgctgctgcaatgtatggtgcaggagatgatgttgtttatcaatgtgcaggtggggttggtacaggtgtttttagtgaagctaaggcattaaattcaacaaaaaatgaagcagacaaagtttgggttattggagttgatcaagaccaagaatatcttggtaaatataaatcaaaagatggaaaagattctaactttgtattagtttcaactataaaagaagttggaaatgtcgttaaagatattgccgataaaacaaaggacggtaaatttccaggaggtactattgttacttatgatttgaaaaatggtggtgtcaatttaggacttgatagtgcaaattcagaaattaaagatgctgttgctaaagcgaaagcagatattattgatggtaaaattactgttccaagtaaataa

SEQ ID NO: 2539 - DNA, 1503 bp, Artificial Sequence
  Optimized genes for Lactococcus lactis
atgaatcaacttatctctactttccaaagtcaacaaggacaattttggcaagctcttttagagcatattcaaatttctttgattagtatttttattgcaatcttgatttcaattccacttgctctattattaagacgtttgccaaaaattgccgaacctgttcttcaagttactggtatctttcaaactattcctagtttagctttattgggtttgttaattccatttattggcattggttcacttccagcaattgtagcacttgttgtctatgctatttttccaattgttcaaaatacatatacaggtttagaacaaatcgaaccaagtctcattgaagcagcaacagcttttggaatgaaccgtcgtgaacgtttaatgaaatttgaactttcattggcaatgcattttatcatggcaggaattcgcacttctactgttatggttattggtacagcaactttggctgcactgattggagcaggtggtcttggaaattttattttactggggattaatatgaatgatgtatctttaattttaatcggtgctatcagttcagctttgcttgcgattattttctcatcattacttaaattccttgaaaaagcaaagatcaaaactattttgatttcatttttcattgggcttttggtacttggtggaagttattatcgtcctcaaacaagtaatcatccacaaattacaatcgctgggaaattaggagctgaaccagatgttttgatcaatatgtataaactcatgattgaaaaagattcaaatattcgtgttaatttgaaaagtaactttggtgatacaacttttctttacaatgctttgaaagctggaaaaattgatttatatccagaatttacaggaacaattacttcaacatttttaaaagacccagtttctagtacagatccaaatgttgtttggcaaaaagctgaagaaggaattaaaaaattgaaccaatttacttaccttagtccaatgaaatttcaagatacttatgcaattgctgttaaatctgattttgcaaaagaacatcaattgacaaaaataagtgatttagcaaatgtttcaggattgactgctggttttgatgttgaatttgctaatcgttcagatggtaatatcggacttcgtaaactttatggtcttgatttgaatgtaaaaacaatgcaaaactctcttatttataaggcattaaattcaggtgcagtaaatgtggcagaagtttattcaactgattctcaaattaagcaatataatcttacagttttaaaagatgataaaaatttatttcctccttatcaagcagctccattgatgaaagaaagtcttcttaagaaatatcctgaattaaaaaaaattcttaataaactttctggtaaaatcactgaccaagaaatgattgaaatgaattatgatgtcaatgtcaaacaagaagatgctgctaaagttgctgagcgttatcttaaatcaaaaggattaatctaa

SEQ ID NO: 2540 - DNA, 1041 bp, Artificial Sequence
  Optimized genes for Lactococcus lactis
atgcttattcatcgtaaagaatgggataaatttttaactgaccttcatttaaatgtatcaaattcatcagaaatcgaaacaattgacgaaactgttgctatttttgcaaaaaatggtgaagttcttgctactggttcaatcgctggtaatgttattaaatatgttgcaacttgtacaaaaggcgagcaatctgctggagaacgttttaataaaatcattactgaattgatgaatcgtttggctcaaaaagggatttatcatgtttttgtctttactaaaccaatgtatgctaaatcatttggttatttgggttttaaagaattagcacgtgcagaacaaggagttttgcttgaaaaaggtcgtccaaatattacagattttttgtcaagtttgacagaaaaaaaacttgttcctgcaggagctaagaaaattgcagcagttgttatgaatgctaatccatttacattaggacattgttacttggttgaacaagcagctgctgaaaatgattttgtttatgttttcgtagtttcaacagaccgttcactttttagagctgatgaacgtcttgatttagttaaaaaaggactttcagctttaacaaatgtctcagttgtttctggtggagattatcttgtaagttttgctacttttccagcttattttattcaatcagatgaagaagtcatggatttccaaacacaaattgatgctagaattttcaaaaattggtttgtagaagcacttggaattacgactcgttatttaggtgctgaacctttttcaaaaacaacttcaatttataatcaacaacttacagaagttttatctgatgttattgatgtaaaaataattgaaagaaaaaaagcagatgataatgaagaaattatttcagcaacagctgttcgtgctgcaattgctacaaaccaattagaaaaaattcgtaattttgttccagaaacaacatttgaatttattgaacaacatttgcaagaacttcaagctcgtatcaaaggtggtcaaaaaactaatggaaattaa

SEQ ID NO: 2541 - DNA, 291 bp, Artificial Sequence
  Optimized genes for Lactococcus lactis
atggaaattaaacaacatgctttggctggaactttagaatcatcagatgtacaaatcatgattgcaccagctaataatggaatttcaattgacttgatttctgatgttaaaaaacaatttggtaaacaaattgaagcaacagttcgtcaagttcttgctgcttatgctattgaaaatgctgacgttcaagtaattgataaaggtgctttagatttagttatcaaagctcgtgcaattgctgttgttgaacgtgctatcgaagctaaagatttgaattgggaagttctctaa

SEQ ID NO: 2542 - DNA, 915 bp, Artificial Sequence
  Optimized genes for Lactococcus lactis
atggctgttgctgaacgtttgcgtcgtacaatgatgttcgttccaggtaataatcctgcgatgattaaagatgctggaatttttgaagctgattcaatcatgtttgatttagaagatgcagtttctcttgctgagaaagacgcagccagagtattggtttatgaagcagtaaaaaatattgattttggtggtgctgaattagttgttcgtatcaatggacttgatacaccattttggcaaaaagatgttcgagcaatggttaaagctggtattgaagtaattcgtgcaccaaaagttgaaacagctgctatgatggaagaacttgaagttgaaatcgaaaaagccgaaaaagaatttggaatagaagttggtacaactcatgttatggcagctttggaatcagcacttggtgtcatgaatgctttagaaattgcacgttcttgtccagaacgtatgatgggaattgctctttcaggaatggattatcgtgttgatatgaaaactaaatcttatccagatgaaggtgaactttattttgctcgtaatatggtacttcatgcagcgcgtgctgcaggtgtagctgcttttgacacagtttttgggaatgtagatgatgaggagggttttgttaaaggagtagaattgattcatcaacttggatttgatggtaaatcagtcattaatccacgtcaaattccacttgttaataaagtatatgctccaacaaaaaaagaagtggttcatgctcaacaagttatggaagcaattgaagaagctaaacaaaaaggttcaggtgttatttcattaaatggtcaaatggttgaccgtccaattgttcttcaagcagaacgcgttttgatgcttgcaaaagcagcaaatgttttagatgaaggaggaaattatattgaaaaataa

SEQ ID NO: 2543 - DNA, 1539 bp, Artificial Sequence
  Optimized genes for Lactococcus lactis
atgaaaaacaaagtaaatcgtgaattgcctgatgaaattttgaaaacaactggttataaaccttttgaatcagtagaagttaaagatttagtcattgaacgtgtttcagctaaagttcgtcagtcagttaaacccaataaattagtagattctttagaggaagttgttttaaaaactgttaaggatggtatgacaatttcttttcatcatcattttagagaaggtgattacgtttttaacaaagtcatgagaataattattgaccatggtttcaaagatttgagaattgccccaagttcattgacaaatgttatgaatgatattttagttgaagcaatagaaaaaggagttgtgactaacattacttcatcaggaatgcgtggtactttaggtgacgttgtaagtcatggagccctaaaaaatccagtaatttttcgttcacacggtggtcgtgctcgtgcgattgaaacaggtgaaattcatattgatgtcgcttttttaggaactcctaatgcagatgaaatgggaaatgctaatggaatggacggtaaagctccatttggttctttgggttacgcattgatggatgctcaatatgctgatactgtagttgcaatcactgattcacttgtttcttatccaaatacacctgcttcaattaaacaaactcaagttgattatgttgtcaaaattgatgcagttggtaatcccgataaaatcggtgctggagcaacacgctttactaaagacccaaaagaacttaaaattgcatcaatggttaacgatgtgattgttaattcaccttattttaaaaatggtttttcatttcaaacaggaacagggggagctgctttagctgttactcgttttttgcgtcaaagtatgattgatcataatgttaaagcaacttttggacttggtggaattaccaaaccaatggttgaccttttagaagaaggattggttgataagttaatggatgttcaagattttgatggcggatctgcacaatcaatgcacttaaataaaaatcaacaagaaatcgatgcttcttggtatgcagatccagcaaataaaggtgcaatggtcgataaacttgatgttgttatcctttcagcacttgaaatagatacaaaatttaatgtcaatgtaatgtcaggttcagatggtgttattagaggagcaattggaggacatcaagacgctggtacagcaaaattgactattatttcagcaccacttgtacgtggacgtattgctactgtcgttccagatgtaacaacagttattacaccaggagatagtattgatgttttagttacagaaattggtattgctattaatcctaaacgtacagatttattagataaattatcaaatattccaggtttaccagtttatacaatcgaagaattacaaaaaatagctgaagaaaaacttggaaaaccagaaccattggaatttacagacaaagttgttgctttgattgaatatcgtgatggaagtcttttggatatcattcgtgaagtaaaagattaa

SEQ ID NO: 2544 - DNA, 663 bp, Artificial Sequence
  Optimized genes for Lactococcus lactis
atgaaaaaaattcaaattgccattgatggaccagcttcatcaggtaaatcaactgtagctaaaatcattgctcgtaatttggatttaatttatcttgatactggtgcaatgtatcgtgttgcaacttttgttgctcttcaaaaagaaacagatgatgctaaagaaattattgaatttatcgaaaaaaatccaattagttttatgaatggacaaaaaggtcaagaagtattgatgggttcagaaaatgttacagaagttattcgtacaaatgaagttactaatacagtttcaaaaatatcagctatgactgaaatccgtgaattcatggttgcagaacaacaacgtatcgcaaaaaatggtggtattatcatggatggtcgtgatattggaactgttgttttaccaaaagctgatttgaaaatttttttagttgcctcagttgatgaaagagctgagcgtcgttataaagaaaatttatctaaaggaattccaactgaccttgaacgtttaaaaattgagatttctgaacgtgaccgtaaagattctactcgtgctatttcaccacttaaacaagctgaagatgcaattttattagattcaacaggaaaaacaattaatgaaattgttcaatttattgaagataaagcaaaggaattaatgtaa

SEQ ID NO: 2545 - DNA, 609 bp, Artificial Sequence
  Optimized genes for Lactococcus lactis
atgaaagaaatttatgataaaattcaagacatcaatattattcttaaacgttcatttattgatttaggtaaaccattggcttatcaagaagttgttgaaaaatcagctaaagttttagaatcatcactttttattattgatacaaaacgaaattgtcttggttatggttttacagattctgataattcttatcaagatgatattaatttacaaaattttttcatttaccaaaaaatttcaaaagatatctcaagtcaacttttaaatcattatgaaatgtctgcttcattgccaatggctcaatcaattttggaaccagttaaagaaatcagttctaaatttccaaataaattcttaagttttttaccaattgaaggaaatcatttacgtttaggaactttatttcttttgactgattcaccacttgaagaagaaaaaagaattttagttgattttttgtcaacatttatcggtaatcaaatgtcatatattatgcttgctgaattagaaggtcaacgtcgtaatgaaacttttgtttctcttgttcaaagtctttcacgctcagaacttgaagcttttaaatctattatcgaaaagattgaccgttaa

SEQ ID NO: 2546 - DNA, 432 bp, Artificial Sequence
  Optimized genes for Lactococcus lactis
atgattcgtattaaaatgaaaaatgaaattttaatgactaaagcttttacattacttgaatcattattagttcttttgattatctcatttatcacaactttattttcacttgagattattcaaacaattcatttattcaaaggtgaactttttgttttgcaatttgaaaatttttataaacgtagtcaagaagatgctgctttgcttcaaaaatcagaaagtcttgttgcaaaaaatcaagaattaatttgtgaagaccgttcaattaccattccaaaagaagttgctgtaaaagattttactgttaaatttgatgataaaggagaaaattcaagtttacaaaaattaactatttctcttccttatgaaaaaaagtttattacttatcaattagaaattggttcaggtaaatttaaaaaaaaaatttcatag

SEQ ID NO: 2547 - DNA, 594 bp, Artificial Sequence
  Optimized genes for Lactococcus lactis
atgactgataatttctttgaaaaaacattagctgctcgtgaaattagtcaaattcctggaatgcttgaatttgatattccagttcatggtgataaccgtggttggtttaaagaaaactttcaaaaagaaaaaatgatgccacttggttttccagaatcattttttgctgaagaaaaacttcaaaataatgttagtttttcacgtaaaaatgtccttcgtggacttcatgctgaaccttgggataaatatatttctgttgctgatggtggttcagttttaggtgcttgggttgatttaagagaaggtgaaaattttggtcatgtttatcaaacagttattgatgcttcaaaaggaatttttgttccacgtggtgttgcaaatggtttccaagttctttcagatactgtttcttattcatatcttgttaatgattattgggctttagaattaaaaccaaaatacgcttttgtaaattatgctgacccaacacttgggattaaatgggaagatgttgaaaatgcagaagtttcagaagcagacaaaaatcatccattacttaaagatgttaaagctttgaaagcagatgaattgtaa

SEQ ID NO: 2548 - DNA, 198 bp, Artificial Sequence
  Optimized genes for Lactococcus lactis
atggctcaaggaactgttaaatggtttaatgcaacaaaaggatttggttttattacaacagaagaaggaaatgatgtttttgctcatttttcagcaattcaaacagatggttttaaaacacttgatgaaggtcaaaaagttacttttgatgttgaagatggaccacgtggtccacaagcagttaatattcaaaaataa

SEQ ID NO: 2549 - DNA, 1410 bp, Artificial Sequence
  Optimized genes for Lactococcus lactis
atgggttttatgcgtaaagctgattttgaactttatcgtgatgcagataaacattataatcaagtattgacaactcgtgactttcttgctttaggtgtaggtacaattatttcaacttcaattttcacattgccaggtcaagttgctgcacaatttgccggtccaggagttgtcttttcttatcttttagcagctcttgttgcaggctttgtagcattagcttatgctgaaatgtcaacagttatgccattcgctggaagtgcctattcttggatatcagttttatttggtgaaggatttggatggattgcaggttgggcacttcttgcagaatattttatagcagttgcttttgtgggatctggattctcagcaaatcttcaacaattattggcaccacttggatttcatttacccaaagtacttgctaatccatttggtactgatggtggagtagttgatattatctcattgcttgtcattcttctttcagctattatagttttccgtggagcttcagatgctggtcgtattagtcaaattttagttgttttgaaagttgccgctgtgattgcctttatcattgttggaattactgttattaaaccagctaattatcatccatttattccaccacataatcctaaaactggtttcggtggtttttcagggatttggtcaggtgtttcaatgatttttctagcttatattgggtttgattcaatcgcagcaaattcagctgaagctaaaaaacctcaaaaaacaatgccacgtggtattattggctcacttttgattgctgttgttttgtttgctgctgtaactttagtccttgtaggaatgcacccttatagtgcttacgctggtaatgctgctccagttggttgggctttacaacaatctggttattcagtattatcagaagttgtaacagcaattgctttggctggaatgttcattgctctccttggtatggttttagctggttcacgtttgttatatgcatttggacgtgatggattacttccaaaaggtttaggaaaaatgaatgcacgtaatttacctgccaatggtgtttggacattagcaatcgttgcgattgttatcggtgctttttttccttttgcttttttggctcaacttatttctgcaggaacacttatcgctttcatgtttgttactttgggaatttatagcttacgtagacgtcaaggtaaagatttaccagaagcaacttataaaatgcctttttatcctgttcttcctgctttgggttttattggttctctttttgttttttggggacttgatgttcaagcaaaactttactcaggaatctggtttttaattggaattttgatttactttgcatatggaaatcgtcgttcaagaaaatctgaagaaaaataa

SEQ ID NO: 2550 - DNA, 456 bp, Artificial Sequence
  Optimized genes for Lactococcus lactis
atggctggtcaaaaaaatacttctgatatcattgaggcttatcttcgtaaattacttgaagaagctcaagttattgaaataaaaagagctgatttagctaatcaatttgatgttgttccaagtcaaattaattatgttatcaaaacacgttttacagcaagtaaaggttttgacgttgaatctaaacgtggtggaggtggttatattaaaattgttaaatatcaatattcagctcgtcatgaatttttaacagctctttatcaaaaagtaccagcaaatctttcatcaaaagctgctcatgatattgttcaacttctttttgatgaaaaagttttgacagaacgtgaaggaaatttattgcttttagtgattactgatggtgcaatttcaccatttactcgtggaatcatgatgaaatcaattattaaccgtttggaccgtgatgatgaaatttaa

SEQ ID NO: 2551 - DNA, 1347 bp, Artificial Sequence
  Optimized genes for Lactococcus lactis
atgaaaatttataatacttattcaagacaattggaagacttccaaccaattgaaccaggtaaagttaaaatgtatgtttgtggtccaacagtctataactatattcacgttggtaatgctcgttcagttgttgcttttgatttagtacgtaaatatcttgaattccgtggttttgaagttcaatatatctcaaattttactgatgtagatgataaaattattaatggcgctaaagctgctaatatgactacaacagacttttcagaacgttatattgcagctttctatgaagatacagatgctcttaatgtaaaacgtgcttcacaaaatcctaaagcaacagaatttattgaagcgatgattgagttcattcaagaacttgttgacaaagaatttgcttatgtaagtcaaggagatgtttattttcgtgttagtaaatcaaaagattatgcaaaacttgccaataaaaatcttgctgaccttttggctggtgcttctggtcgtactgacgaagaaactaaattaaaagaaagtccagcagattttgctttatggaaatcagctaaagctgatgaagtttcttggcaagcaccttggggagctggacgtcctggttggcatattgaatgtagtgttatgtcaacttctcttttaggtgaaacaattgatattcatggtggtggggctgatttggagtttccacatcatacaaatgaaattgctcaaagtgaagccaaaacaggtcaaaaatttgttaattattggatgcacaatggatttgtaaatgttgatggagaaaaaatgtctaaaagtcttggtaactttacaactgttcatgaattacttcaagtagtcaatccacaaattttacgtttctttttagcaactactcattatcgtcgtccagttaatttcacagatgatgcattaactgaagcagaaaataatattaaaaaaatcgaaaatgcataccgtcatttagatgagcaagctgaatctaatttatctgctttgacaacttttagaaatgattttgttgcagcaatggatgaagattttaatatcgcaaatggaatgacagttttttatgatttcgtttcatgggttaacaaaggaaatggtggaccagaagtcaaagaattttttgaccaagttttagaaatcttaggaattaagtttaaatttgaacaatcacttgattctgaaatagaagctatgattgaagcacgtcaacttgcaagagaagtaagagattttgcaaaatctgatgaaattcgtgatgccttgaaagcacaaggtattgttcttgaagacacaaaagatggtgttcgttggcaccgtgaataa

SEQ ID NO: 2552 - DNA, 1308 bp, Artificial Sequence
  Optimized genes for Lactococcus lactis
atgaaaaaaattgccattattttttgttcatttttaatttctttaagcgttctttctgactttagtgtttcagctgcgactactccaacaacaaatgattttacagttgctgctaagtcagcaattgctattgatgcatcaagtggaaaaatcctttatgctcaaaattctgatgatgcttcaactcgtattgcttcaattaccaaacttttaactgcttatcttgtctataaaaatgttgctgaaaataaactcacttggaatacaaaagtaccaatttcagattatgcctatgaacttactcaaaattcaaatgcaagtaacattccacttgcacaaaacggtcaatatacagttaaagaccttttgaatgctttattacttccaagtgctaattcggcagctgtcgctcttgctgaaaaaattgcaggaagtgaaccaaaatttgttgatatgatgactaaacaaatgaaagattggggaattacagattcacatttagttaatgcctctggtttacctaatgacgatttaaatggacatatttatccaggatcaggagctagtgcaacaaacacaatgtctgctaaagctgttgccactttatcttatcatttgattcaagatttcccagaaattttacaaatcacaaaaaaaactgaaatcccttttgatactggaaatgaagcaaaaatgacattaacaaatactaaccaaatgctttcaggtttttctacttctcgtacaggagttgacggattaaaaacaggttctacatcattccaaattgattgttttgctggtacaaccaatcagaatggtttccgtatcatcactgtagttttagaagctactgacccagctgcagataatagtacaccatttactttgactaatcaattgatgaattatgtttatggtcattggcgtactacaagtcttgtacaaaaaaatcaatcacttgatgattttaaagaaattactgttattgacggtaaagagaaatcagttcaacttgttgcaccacaaaatattacgccagttgttccttatgcaactgatggttcagctgatacaaaatctttgacagtaaaattttcaaaagaaaaaacagcttctgttgaagcgaccgttactaaaaatcaaaaattggttacattgtcaacaactgtcaaagattctcttggttatttaccaaattgtacagcagaacaaattcctttagtagctaaaaagactgttccacgttcatcagcacctaaagttttttggaatcattttgtaaattttgtcaatgaaaaattatag

SEQ ID NO: 2553 - DNA, 747 bp, Artificial Sequence
  Optimized genes for Lactococcus lactis
atgaaacgtcgtattactttttcacttattgttttggtacttttaattattggagcacttggttttattttaatcacaaatgataaatcaaactcaactaatgaatcagcaaaaaaaacatcaattagttcatcaaaagaagttgctaaaaagaaagatttaccagatgcaaaacaatctgattgggatttggttcttgtttcacgtaaatctcctaaagatgaaatgaatccaacacttgcaacagttaatggaattcaagttgaccaacgtatcgcttcagctgttcagcaatttttagcagcagctcaacaaattagtccagcagagcatttgatttctggttaccgttcagtttcttatcaagaaggtctttatcaatcatacgttcaagcagaaatgaatggtcaaggaactgttaattcaagtggaaatcctatttcagaagaagaagcaattaaaaatgttcaaacttattcacaaccaccacgttcttctgaacatcaaacaggacttgctatagatatgtcaaatattgattcattaaatgaaagtcaatatgctaagcaagtagctgctattgctccaaaatacggatttgttttacgttttccagaaggaaaaaaagctgaaacaggtattggttatgaagactggcattttcgttatgttggtcttgaaaatgctaaatatatgactgaacataatttaactttagaagaatatttaaaattacttccagcttaa

SEQ ID NO: 2554 - DNA, 240 bp, Artificial Sequence
  Optimized genes for Lactococcus lactis
atgaaagaacaaatttttgacattattgaaacagtttctggaactgatgaatttagagaagatttggatatggatttatttgaagaaggaattttagattcaatgcgtgcaatcatgcttattgttgaacttgaaggtgcttttgatatttcacttccaccatcagaaatggaccgtgaagactggaatacagcaaataaaattgctgctcgtgttcaagaaaaaaaagatgaaaattaa

SEQ ID NO: 2555 - DNA, 1659 bp, Artificial Sequence
  Optimized genes for Lactococcus lactis
atggcttatcaagctctttatagaaaatatcgttcacaacgttttgatgaaatggttggtcaagaagtagttgcaacaactcttaaaaatgctattgttaatcatcaaattagtcatgcttatcttttctcaggtccacgtggtacagggaaaacatcagctgctaaaatttttgcaaaagcaattaactgtcctaatcaagttgatggtgaaccttgtaataattgttttatttgtgattcaattactaaaggttcacttgatgatgtcattgaattggatgctgcctctaataatggtgttgacgaaatccgtgaaattcgtgataaatcaacttatgctgcaagtcaagcaacttataaggtttatattattgatgaagttcatatgctttcaacaggtgcatttaatgcattactaaaaactttggaagaaccaacagaaaatgtcgtttttgttcttgcaactacagaacttcaaaaaataccagctacaatcatttcacgtgtacaaagatttgcttttaaatctatcacaacaggagatattagaacatatttggcaaaaatcatggcagatgaaggacttgaatttgacggtaaagcgttagatgttattgccaaagctgcagaaggtggaatgcgtgacgctttgagtcttcttgaccaagcgctcagtttttcatcaggaaaattagaagaaaacgatgcacttttagttactggttctattgctgctgatgcgcttgttacctatgtcgcagcactctttgaacatgatgaggctaaagcaatgactgaattagacaaaattttcgctgaaggcaaaaatatgttgcgctttacagaagatttactggcctatttaagagatttattgcttgataaaaattctcaatatgatcgtggacaaatcttttcttggattgacgttgctatcgaaagtttaaaaacaattaaagaaactactcaaacaaagattgcagctgatgttatgacaatgagacttgctgagattggtcaaaacaaccttttgacagctagtcaaggagaaattccaaatcaattgactgctgaaatcgctactttaaagactgaaataaaccaattaaaagctcaaatttctgctggtcaaattcaagtaaattcagatagccaaaataatttattaactgagaatgttaaagcttctccaaaaccaattgcttcaaaaaaacgtcaaataaataaagatttgatttataaagccttagcggaagcaacaaatgaagctcgtaaagcagctttaagtgcttggcctgaacttgtagcatcagttacaaaacctgctgaccgtgctttacttaacaatacagcaccagttgccgcttcagaaaattttttagtagtaacttttccacatgaaaatttagcaaaaagagtttctgaaaatgaagagttacaacttttttgtggaaatcttttatcaagtattgtcggttttgctccagaaattatctcattagctgaacaagattggcaagaagttcgtgcagaatatgtttcaaatttgaaaagtgaaaatgttcaagaagatgaagaagacgaaaaagagcctgatgaaacagttaacttggctaaagaattatttggtgaaaaagttgttgaaattaatgattaa

SEQ ID NO: 2556 - DNA, 447 bp, Artificial Sequence
  Optimized genes for Lactococcus lactis
atgtcaaatgaacatactcaagaagtattaaatcaaactgttgcagatttgtcaaaagcttcagctttagttcatcaaattcattggtaccttcgtggtccaggttttctttatcttcatccaaaaatggatgaattaaaagaccaacttgatgagcatttagatgaatttgctgaacgtttgattacaattggtggttcaccagtttcaactttggctgagtttgataaaaattctaaaatcgaaatgactccagctgtttggggaaaatctaattcagaacgtgttaaagaacttattgttgcttataaatatttgacacaattatttaaagatggaattaaaattgctggtgatgacggagatgatgttacagttgatttatatacaacagctttgggcgatattgaaaaaacactttggatgattgaagcagaagttggttaa

SEQ ID NO: 2557 - DNA, 558 bp, Artificial Sequence
  Optimized genes for Lactococcus lactis
atggttcttgctaaagatttgaaatcaggaatgacttttttaaatggtgaaaaattgcttcgtgttatggaagcatcacatcataaaccaggaaaaggtaatacaatcatgcgtatgaaattaaaagatgttcgttcaggttcaacatttgatgatacttatcgtccagaagataaatttgaacaagcagtcattgaaaccgttacagctcaatacctttattcaatggatggaattgctaattttatgaataatgaaacttacgaacaatatgaaattccagttgagcaagttaaagatgaacttttatatgttttagaaaatacagatgtaaaaattcaattttatggtacagaagttattggtatccaacttccaacaactgttgtccttgaagtaactgaaacacaaccatcaattaaaggagcaacagttactggttctggtaaacctgctacaatggaaacaggtttagttgttaatgttccagattttgttgaagctggaactaaacttgagattaatactcaaacaggagaatatcttaaacgtgcttaa

SEQ ID NO: 2558 - DNA, 1302 bp, Artificial Sequence
  Optimized genes for Lactococcus lactis
atgtcaattattactgatatttatgctcgtgaagtacttgatagtcgaggaaatcctactttggaagttgaagtctatacagaagacggtgcttttggtcgtggaatggttccttctggtgcttcaactggtgaacatgaagcagttgaattgcgtgatggagataaatcacgttataatggacttggaacacaaaaagctgtagataatgttaataatatcatcgcagaagccattatcggttatgaagttactgaccaacaagcaattgatcgtgcaatgattgcattagatggaactgaaaataaaggtaaattaggtgcaaatgccattttaggtgtaagtattgctgctgcacgtgctgcagctgatgaacttggtgtgccactttataattatttgggaggttttaatgctaaggttttaccaactccaatgatgaatattattaatggtggaagtcattctgatgcaccaattgcctttcaagaatttatgatcgttccagttggagccccaacatttaaagaagctttgcgctggggagctgaaatttttcatgctttaaagaaaattttaaaagcgcgtggtttagaaacagcagtaggtgacgaaggaggctttgctccaaaatttgatggcaccgaagacggagtagaaacgattcttaaagcaattgaggcagcaggttacaaagcaggagaagatggagttatgattggatttgattgtgcctcatcagaattttatgaaaacggtgtttatgattatactaaatttgaaggtgagggtggtaaaaaactttcagcttctgaacaagttgattacctcgaagaattagtttcaaaatatccaatcattaccattgaagatggtatggatgaaaatgattgggatggttggaaaatcttgactgaacgtttaggaaaaaaagttcaacttgttggtgatgatttttttgttacaaatacaaaatatcttgaaagaggaattagagaaaatgcatcaaatgcgattttgattaaagtaaatcaaattggtactttaacagaaacttttgaagcaatcgaaatggctaaagaagctggatttacagctattgtttctcatcgttcaggtgaaacagaagattcaacaatttcagatatcgctgttgcaactaatgctggtcaaatcaaaacaggttcactttctcgtacagaccgtatggcaaaatacaatcaattgcttcgtattgaagatcaattagctgaagttgctcaatataaaggattaaaagctttctataacttgaaaaaataa

SEQ ID NO: 2559 - DNA, 1284 bp, Artificial Sequence
  Optimized genes for Lactococcus lactis
atgtcaattgaggaagcacttgaatggattcattcacgtttgaaatttaatatccgtccaggattgtctcgtgtttcagctttgcttgagcttttgggacatccagaagaaagtttatcaatgatccatgttgctggtacaaatggtaaaggaagtacagttgcatttacacgttcaatctttatgcaagcaggacttaaagtagcttcatttacttctccatttattacgacttttggtgaacgtatgtctattaatgcattaccaattgctgatgataaattaatttattatgttgaaatgattcaaccacttgtagccgaattagataaagatgctgaattgacaggaattactgagtttgaaatcattactgctatggcttttaaatatttttctgatgaacaagttgatttagctgtcattgaagtaggtcttggtggattacttgattcaacaaacgttatcaaacctgttgtttctggtatcactaccattggtttagaccatattgatattttaggatcaactattgaagaaattgcagctcaaaaagctgggattataaaaccaggtattccagttgtagtaggaaatattgaactcaaagcgcttcgtgtgatttgggaagttgcccgtaaaaatacagctcgtgtttatcaatttccttatgattaccgtacagaagttgaagagcatgaacattttaattttttctcaggtcaagaagctattcttgatatcgaaaaatcacttgttggtcttcatcaaattgaaaatgctggaatggcaattgaattatctcttgtctatgcttctaaagttggaatcgaacttactgaagatgttattcgctcaggaattcgtgaagccttttggccagctcgaatggaaaaacttggagaaaagccattgattttgttggatggtgctcataatgttcatgcaatgaatcgtcttttggaaaatctttcatcagaatttccagataagaaaattacaattattttttcagcaatcacaactaaagatatttcacaaatgattaaaatgcttcaaactgttaaaaattcacatttaatcttaacaacatttgattatccaaaagcattaaatttaggtgattttcaacgtttagaagaagaaggagtagaattggctccatcttgggaacttgctttagttcgtgcacaaaaaaacttagcagaagatgaccttttattggttactggttcattatactttagtagtcaagtaagagaatttttaaaaaaagaaaaataa

SEQ ID NO: 2560 - DNA, 1509 bp, Artificial Sequence
  Optimized genes for Lactococcus lactis
atgaaaatttggacaaaattaggtttattgacacttgttggattatctttgacttcttgtggatctaatacaaaaaataccaaaggtcaatcatcttcaagtcaaaaggttgaaacatcagctggcgcttctaaatcaaacatttatgctgacccaagtactttatcagataaatatgatgtgattattgttggttcaggtggtgcgggaatgacagcagcaatcgaagcaaaagatgctgggatgaatccagttattttagaaaaaatgccaatcgctggtggtaatactagcaaagcttcagccggtttgaatgcatctgaaacatctgtagaaaaggctcaaggtgtcgctgattcaaatgacaaattttatgaagaaacgctcaaagggggaggaggtacaaatgataaagctttacttcgttattttgtagatcatagtgctggtgctgtcgattggttaaatactaatggtatcgttttagataatttaacaactactggcggtatgtcagtttcacgtactcatcgtccacatgatggctcagcagtaggtggatatcttgtgaaaggccttgaagaaaatatcactaaaagaaatattccactttttgttaattctgatgttactaaaattactgaaaaagacggaaaagtttctggtgttaaagtaaaaattgaaggtgaaactaaggatatctcatcaaaagctgtagttgtcacaactggtggttttggtgcaaataagaaaatgattgctaaataccgtcctgatttgaaagattatgttacaacaaacgctgcaggttctacaggtgatgggattacaatgatttcagaacttggtggcgaattggttgatatggataagatccaaattcatccaacagtttttcaaaaaactggttatttagttagtgaatcaattcgtggtgagggagctattttggtaaatcaaaaaggtaaacgtttttttaatgaaatggacacacgtgataaagtttctgctgctgaattaaaacaaccaggtaagtattcttatgtaattttcggagaaggaacaaaagacaaagtcaaagcggttgaacaatatattagtaaagatatggttgttgaagctgattctatcaaaggattggcagataaacttgatattaatgaaaaagcacttacttcaacaattgatggttggaataaagcagtttcaactaaaaaagatgaagattttggacgtacaacaggaatgactacagaagtttcgggtaaatattatgcaattaaagtagctccaggaattcatcatacaatggctggagttaaaatcaatacaaatacacaagttcttaaaaaagatggaagtccaattcaaggactttatgcggctggtgaagtaacagggggtcttcatggtggaaatcgtattggtgggaatgctgttgctgatattgtcatttttggtcgtcaagcaggaactcaatctgcagcttatgccaaaacaagtaattaa

SEQ ID NO: 2561 - DNA, 693 bp, Artificial Sequence
  Optimized genes for Lactococcus lactis
atgtcaattattaagctttctaatgtttctaaaaaatattcaaatggtacaactgctttacgtaatatttcattagaaattgaaccaggagaatttacttatattgttggtccttcaggagctggaaaatcaacttttattaaattactttatcgtgaacttaagattgatcgtggttcaggtactgttgctcaatatgacctttcaaaacttaaacgtcgtgatgttccaatgcttcgtcgctcagttggagttgttttccaagattataaattgttaccaaaaaaaacagtttttgaaaatatttcttatgcaatggaagtaattggtaaatctccaagagaaattaagaaaagagttaatgaagttcttgatttagttggcttgaaacataaaattcgtagttttccaaatgaattatctggtggtgaacaacaacgtgtagcaattgctcgttcaattgcaaatgctcctaaagttttgattgctgatgaacctacaggaaatttagatccagaaaattcttgggaaatcatgaatttgcttgaaaaaattaatcttcaaggaacaacaattttaatggcaactcataatagtcaaattgtcaatacattaaaacaccgtgttattgccattgagaatggacgtatcgttcgtgaccaagaagaaggtgtttatggttatgatgattaa

SEQ ID NO: 2562 - DNA, 2130 bp, Artificial Sequence
  Optimized genes for Lactococcus lactis
atggcacgtgaattctcactagctaacacacgtaatatcggaatcatggctcatgtagatgcgggtaaaacaactacgacagaacgtgttttgtactataccggaaaaattcataaaattggtgaaactcatgaaggtgcttcacaaatggactggatggaacaagagcaagaacgtggaattacaattacttcagcagcaactacagcagaatggaaaggaaatcgtgttaatattattgatacacctggtcacgttgactttactatcgaagtacaacgttcattacgcgttcttgatggagcggtaactgttctagatgctcaatcaggtgtggaacctcaaactgaaacagtttggcgtcaagcaacagaatacggagttccacgtattgtttttgcaaacaaaatggataagattggagccgatttttattattcactttcaactttgggcgaccgtttgggagcaaatgcccatccaattcaaattccaatcggtgctgaagatgattttattgggatcattgaccttgttacaatgaaatcagaaatttatacaaatgatttaggaaccgatatcaaagagacagttgttggctctgatgaatttaacgcagaattagcggcattagattttaatgctgaggaatatactgagcttgcaaatgaatggcgagaaaaattaattgaagcgattgcagattttgacgaagatattatggaaaaatattttgctggcgaagaaatccctgaagctgaattgaaagcggctattcgtaaggcgacaattaatgtcgatttctatccaatgttggcaggttcagcttttaaaaataaaggggttcaaatgatgcttgatgcagtcattgattatcttccaagtccattagatattcctgctatccaaggtgttaacccagatactgatgaagaagacgagcgtccagcatcagatgaagaaccttttgctgctttagctttcaaaatcatgactgacccatttgtgggccgtttatcattttttcgtgtttattctggtacacttgacgcaggaagttatgttttaaatacatcaaaaggcaaacgtgaaagaattggtcgtatcttacaaatgcacgctaatactcgtaaagaaattcaaacagtctatgctggtgacattgctgctgcagttggattaaaaaatacaacaacaggagattctttgacagatgaaaaagcaaaaattattttagaatcaattgaagttcctgagccagttattcaattgatggttgaaccaaaaacaaaagctgaccaagataaaatgggagtagctcttcaaaaattggctgaagaagatccaacttttagagttgaaaccaatccagaaacaggtgaaactgtaatttcaggaatgggagaacttcatttggatgtcttagttgatcgtatgaaaagagaatttaaagttgaagctaatgttggtgcaccacaagttgcttatcgtgaaactttccgtgctggaacttctgctcgtggtttctttaagagacaaagtggtggaaaaggacaatatggtgatgtatggattgagtttacaccaaatgaagaaggagctggttttgaatttgaaaatgcaattgttggtggtgtcgttccaagagaatttgttccagctgttgagaaaggtttagtagaaacaatggccaatggtgtacttgctggttatcctatggttgatattaaagctaaactttatgatggttcttatcatgatgttgattcaagtgaaacagcttttaaagttgcagcttctttagcaatgaaagaagcagcaaaaactgctaaaccagccattcttgaaccaatgatgaaagtaacaatcactgtcccagaagaaaatttaggtgatataatgggtcatgttactgcaagacgtggtcaagtaaattcaatggaagcacatggtaaatctcaaattgtcaatgcatttgtaccacttgccgaaatgtttggttacgctactactttaagaagttcaacacaaggacgtggaacatttatgatggtctttgatcattatagtgatgtgcctaaaagtgttcaagaagagattatcgctaagaatggacgaaatgctgattaa

SEQ ID NO: 2563 - DNA, 1011 bp, Artificial Sequence
  Optimized genes for Lactococcus lactis
atggttgttaaagttggtattaacggttttggtcgtattggccgtttagcttttagaagaattcaaaatgttgaaggagttgaagtggttgctattaatgatttaactgacccagcaatgcttgctcatcttttaaaatatgacacaacacaaggacgttttgacggaaaagtagaagtcaaagatggcggatttgaagttaatggtaaatttgttaaggttacagctgaaagtaatccagctaatataaattgggcagaagtaggtgcagaaattgttcttgaagctactggcttttttgcaacaaaagaaaaagccgaacaacatttacacgcaaatggagccaaaaaagttgtcattactgctccaggtggatctgatgttaaaacaatcgtttttaatacaaatcatgaagttttggatggtacagaaacagttatttctgctggttcttgtacaactaattgtttagcaccaatggctgatactttaaacaaacaatttgggattaaagtaggaacaatgactactgttcatggttatacaggtgaccaaatgacacttgatggaccacatcgtggtggtgattttcgtcgtgctcgtgcagctgctgaaaatattgtaccaaattcaacaggagcagcaaaagcaattggtcttgttttaccagaacttcaagggaaattacaaggtcatgcacaacgtgttccagttcctactggttcattgactgaattagtaacaattttaaataaagaagtaactgttgatgaaatcaatgctgcgatgaaagctgcatcaaacgaatcatttggatataatgaagatcaaattgtttcatcagatattgttggaatttcaaatagttcactttttgatgcaactcaaacagaagttacttcagcagatggtgctcaacttgtaaaaactgtttcttggtatgataatgaaatgtcttatacttctaatttagttcgtacattggcttattttgctaaaattgctaaataa

SEQ ID NO: 2564 - DNA, 1878 bp, Artificial Sequence
  Optimized genes for Lactococcus lactis
atgaattttcaagaaaattacgatgtcgttgtcattggcggtggacatgctggagtagaagcaagtcttgctgcagcacgtatgggatcaaaaacacttttgatgactattaacttgaatatggttgcttttatgccttgtaatccaagtattggtggttcagctaaaggaattgttgtacgtgaaatagatgcacttggtggcgaaatgggtcgtaatattgacaagacatatatccaaatgaaaatgcttaatacagggaaaggaccagctgttcgtgctttgcgagcacaagctgacaaagatgagtatgctgattcaatgaaaaatactgtttcagaccaagagaatttgactttgcgtcaaggaatggttgaagaattaattttagatgaagaaaaaaagaaagtaattgggataaaaacatcaacaggaactaagtatggtgcaaaagctgtgattattacaacaggtacagcattacgtggagaaatcattatcggtgaattgaaatattcaagtggtcctaataattctttaagttcaatcggtttagcagacaatttaagagaaattggatttgaaattggacgtttcaaaactggaacaccaccacgtgttttagcttcttcaattgattatgacaaaaccgaaattcaaccaggtgatgaagctccaaatcatttttctttcatgtcatcagatgaaaattatcttaaggatcaaattccctgctggttaacttatacaactgaaaatagtcatacaattcttcgtggtaatcttcatcgtgcaccacttttttcaggaatcgttaagggagttggacctcgttattgtccttcaatagaagataaaattactcgttttgctgataaaccaagacatcaattatttcttgaaccagaaggtcgaaatacagaagaagtttacatcggaggactttcaacttcaatgcctgaagacgtacaatttgatttggttaaatctattccaggattggaaaacgctcaaatgatgcgtcctggttatgcaattgaatatgatgttgttatgccacaccaacttcgcccaacattagaaacaaaattagtatcaggtttgtttacagctgggcaaacaaatggtacttctggctatgaagaggctgctggtcaaggtcttgtagcaggtatcaatgcagctctaaaagttcaaggaaaatcagaatttatccttaaacgaagtgaagcttatattggtgtcatgattgatgatttagttactaaaggtactttagaaccttatcgattattgacaagtcgtgcagaatatcgtttgattttgcgtcatgataatgctgaccgtcgtcttactgaaattggaagacaagttggtcttgtttctgatgaacaatgggaacattatcaagctaaaatggctcaatttgaccgcgaaatgaaacgtttaaattcagagaaattgaaacctttaccagatactcaagaaaaactcggtaaattaggttttggtccaattaaagatgctttaactggtgctgaatttttaaaacgtccagaagttcactataatgaagtaattgattttattggtcaagcgccagaaaaaatcgatcgtacagttattgaacttatcgaaacagaaatcacttacgaaggatatattaaaaaagcaatggaccaagttgataaaatgcaccgtcttgaagcaaaaagaattcctaaaaatatggattgggataaacttgattctattgcaacagaagctcgtcaaaaatttaaaaaaattaatcctgaaactcttggacaagcatcacgtatttctggtgttaacccagcagatatttcaattttaatggtttatttagagggtaaataa

SEQ ID NO: 2565 - DNA, 369 bp, Artificial Sequence
  Optimized genes for Lactococcus lactis
atggttaaagaacgtgaacttcgtcgttcaatggcagttttaccaattggaactgttatgaaattaactgatttgtcagctcgtcaaattcgttattatgaagaacaagaattaatttttccagaacgttctgatggtaatcgtagaatgtattcattaaatgatattgatgcactttttgatatcgctgatttacttcaagaaggaaataatattgctgacattaaagaaatttatgcaaaacgtgatgctaaaaaagcacaaacactttcaattggtgaagttcatcatgctttagaaagagaatttgctcaacaaggacgttttggtacaccagatccaactcattttactcaaccacgtatgtaa

SEQ ID NO: 2566 - DNA, 1440 bp, Artificial Sequence
  Optimized genes for Lactococcus lactis
atggctgacccaaatggatttttaaattatcctcgtaatgataacccttatcgtgaacttgctgaaagaataaaagactttgctgaattacaagttccactttcaactgaagaacgtcaaaaacaagcagcacgttgcatgcactgtgatgttcctttttgtcatcaaggaattttttatggtggaaaacgtgcagtttctggttgtcctaacgataatcatattccagaatggaatgatttaatttaccgtggacttcaacgtaaagcttatgaacgtcttattttgacaaatccatttccagaatttacaggtcgtgtttgtccagctccatgtgaaaaatcatgtgcagaagcattaaacggagcaggtgttaccattaaagataatgaacgctttttgggagatcttggaaatgatgaaggttgggttgcagagattggtaaagcggcagaaccaactggctataaaattgctatcattggttcaggtcctgctggtttatcagctgcttggcgtttgaatcaactcggacatagtgtgactgtttttgaaaaatctgaccgtttaggaggacttttgatgtatggaattcctaatatgaaattagataaaaaagttgttcaaaaaagaattgatttaatgacagaattgggtgtaacttttgttactaatacagaaatcggaaaaacaatttcatacgaagatttatctgttaattttgatcgtattattttagctataggtgctggaatcccacgtgatcttaatatctcaggacgtgaagctgttggtattcgttttgcaattgacttcttgactgaaacaacaaaaacagttttagaagaaggtgaagacaatattagtcaatcacttaaaggtaaaaaagttgtagttatcggtggtggcgatactggtaatgattgtattggaacagcagttcgtcttggtgcagcttcagtttcacaattggaaattacaccatcattaccaacagatagacttgataataatccttggcctgaatggccaatgactttacgtgctggttatggtcaaaaagaagctgagtttgttgggaatactgacttgattacttatcaaatgactgcaactgcttttcaaacaaatgctgaaggacaattaactggattaaaagtcgctaaagttggaccagattttaaagcacttgaaggaactgagcaagtaattgaagcagatttggttcttttagcaatgggttttgtaggtactgatacaggattgttggataaatttggtattcaagaaatttatgatgattatagaacaaacaatgacaaagtattagttgctggtgatgctcgtcgtggtccaagtcttgttatttgggctattagagaaggcagaaaaactgccgaaattgttgatgaacaacttatcaaagtagcaacagcttaa

SEQ ID NO: 2567 - DNA, 540 bp, Artificial Sequence
  Optimized genes for Lactococcus lactis
atgtcagaagaaacaaaagaagagattaaaaatgaaaaagttgatgaagaagtaactgaagaattaacagaagaagcattagaagatattgtagaagaagaaattaatgaacttgacgaagctcaaaaattagcaacagaatgggaaaataaatttttacgtgtttcagcagaaatgcaaaatgttcaacgtcgtggaaatgaggaacgtcttcaattaatcaaatatcgttcacaagatttagctaaaaaaattttatcatcacttgataatttagagcgtgctcttgctgttgaaggattgactgatgatgttaaaaaaggacttgaaatggttcaagaaagtttaatttcagctttaaaagaagaaggtgttgaagaagtttcttatgaatcatttgatcataatattcatatggcagtacaaacagttccagcagatgatgaacatccagctgattcaattgttcaagtttttcaaaaaggttatcaacttcatgaacgtttgcttcgtccagcaatggtagttgttgcacaataa

SEQ ID NO: 2568 - DNA, 2490 bp, Artificial Sequence
  Optimized genes for Lactococcus lactis
atgcaagataaaaatgtgattaatgtcaatttagttgaagaaatgaaaacttcatttcgtgactatgctatgagtgttattgttgcccgagcacttcctgatgtcagagatggacttaaacctgttcatcgtcgtattctttatggtatgaatgaacttggaaatactcctgacaaaccacataaaaaatcagcaagaatcgtcggtgaagtcatgggtaaatatcatccacacggtgattcatcaatttatgaagcgatggttcgtatggctcaatggtggtcatatcgtcatatgcttgctgacggacatggtaattttggttcaatggatggtgacggtgctgcagccatgcgttatacagaagcacgtttgtcaaaaatagcaatggaaatgcttcgcgacattaacaaaaatacagttgattttatggacaactttgatggaactgaacgcgaaccacttgtccttccagctcgttttccaaatttgcttgttaacggaacaactgggattgctgttggaatggcaactaatattcctcctcataatctcggagaaacaattgatgcggtcgatatgttaatggaaaatccagaagcatcagttactgacttgatgtcagtcattccaggaccagatttcccaacaggagctttagtgatgggaaagtcaggtattcgtcgtgcttatgagactggtaaaggttctatcacacttcgcgctaaaacacatattgaagagatggcaggtggaaaagaaagaattgttgttacagaacttccttatatggtaaataaagcacgcctcgttgaacatattgtccgtttaaatcatgaaaaaagaatagaaggtttgactgctgtacgtgatgaatcaaaccgtgaaggaattcgcgttgtgattgaagttcgacgagatttatcagctcatgttattttaaacaatctttttaaactcacttctcttcaaacgagttttggatttaatatgttggctattgaaaaaggaattccaaaaatcctttctctaaaagaaatcttggtagattatatcgagcatcaaattgaagtggtagaacgtagaacggcttttgataaagctcgcgcagaagctcgtgctcacatcttagagggacttcggattgctttggataatattgaccgtatcattacaattatcagagaaagtcaaactgatgcaatcgcccaaaaaacaatgatggatgaatttttacttagtgaaaaacaatctcaagcaattttagatatgagattgagaagattaacaggtcttgaacgtgataaaattgaggctgaatatcaagaccttgttgctcttattgccgatttagcagatattttggcaaaaccagaacgtgtcaaaaaaattattcgtgaggaattagaagaagtaaaacgtaaatttgctgataagagacgtactgaattattggttggtgaagttttaactttggaagatgaagacttaattgaagaagaagatgttttgattactctttcaaataaaggctatattaaacgcttagctaatgatgagtttagagcacaaaatcgtggaggaagaggagtacaaggaatggggatgtctgatgatgactttgttcaacatttggtaagtacatcaactcatgatcatcttttattttttacaaatctaggacgtgtttatcgaatgaagggttatgaaattcctgaatacggacgaacagctaaaggattaccaattgttaatttattaaaattggacgatggcgaaaagattgcaacaatcatcaatgttgatcgtgaccaagcggcaaaataccttttctttactactcgtaatggaatcgttaaacgtacatcaacaagccaattttctaatataagaacaaatggtttaaaggcattgaaattacgtgatggtgatgaattgataaatgttcttcgtacctcaggagaagatgaagttattattggtactcatttaggatattctgttcgtttcaaaggtgcagtagttagagacatgggccgtgcagcagctggtgttaaaggggtaaacttgcgtgaaggagattatgttgtaggtacaagtcgaattgatgatagtcaagaagtattggtcatttcagaaaatggcttgggaaaacgaactcaagcttctgaatatccaactaaaggtcgtggtggtaaaggaatgaaagtaatgaatgtaactgagcgtacagggaaacttgcaggattgacagcagttaatggggatgaagatttgatggttatcactgatactggtgtaattattagaacaaacgttgcaaatatctcacaaacaggcagagctgctcaaggtgtgaaagttatgcgtcttgatgatgaagctcaaatcgtgacttttgcattagttgacccagttatcgaagacgaagaagttgatgctccagagctgacagacgaaactatttctacagataataatgaagaataa

SEQ ID NO: 2569 - DNA, 1224 bp, Artificial Sequence
  Optimized genes for Lactococcus lactis
atgaaagaacgtcttaaagctccagaattacgctttgatggatttactgatgattgggaagaacgcaaacttttggataatgtagaaaaagtacttgattatcgtggaaaatcaccagctaaattcggtatggaatggggaactgaaggttatcttgttttgtcagctttaaatgttaaaaatggttatattgacaaatctgttgaagctaaatatggtgaccacgaattgtttgatcgttggatgggaaataaccgtttagaaaaaggtgatgttgtttttacaacagaagcaccacttgggaatgtcgctcaagttccagataataatggatatatccttaatcaacgtgcagttgcttttaaaagtcttcaagaaacagatgataacttttttgcacaattgttgcgtagtccaattgttcaaaatactttgaaagcatcaagttcaggaggaacagcaaaaggaattggaatgaaagaattcgcaaaattgaatgctcgtgtaccagaaactcatgaagaacaacgaaaaattggtctttttttcaaacaacttgatgatacaattgttcttcatcaaagaaaattagatttgctaaaagagcaaaaaaaaggctatttacaaaaaatgtttccaaaaaatggaagtaaaattcctgaattacgttttgctgaatttgctgatgactgggaagaacgtaaattaggagaagttgcaacttttctaaatggtcgtgcttataaacaagatgaactcttagattcaggtaaatacaaagtccttcgtgttggtaatttttatacaaatgattcttggtactattcaaatatggaacttggtgataaatattatgttgataagggcgatttagtttatacttggtcagcaacatttggtccacacatctggtctggtgaaaaagttatttatcattaccatatttggaaagttgaactttcaaaatttttagaccgtaatttcacacttcaattacttgaagcagataaagcgcgtttgttatcatcaactaacggttcaacaatgattcatgttactaaaggagatatggaatctaaaatcgtttcaattccaaatattgatgaacaaaagcaaattgggagtttctttaaacaactcgataatacaatcactttacaccaacgtaaacttgaccttttaaaagaacaaaaaaaaggttttttgcaaaaaatgtttatttga

SEQ ID NO: 2570 - DNA, 1065 bp, Artificial Sequence
  Optimized genes for Lactococcus lactis
atgcttatttcaacaatggttgatgtttatgttgtttattatccaatcattttaagttttatctgggcatcaggtgcttttttatctcgttggaaagaacgtgataaaaaagctattgatgaaacaaaagaatttgaaaaaatttcaattgttatttcagcttataatgaagaagaaaccattgaagaagtacttttgtctttgcgaaatttaaattatccttcactagaaatttttattgtagatgacaaatcttctgaccgtacacttgaaaaactttatgaagttaaaaaatcatttgatgattgggaaactttaacaattttggaacaaaaagagaataaaggtaaagcaacagctttgaatgttgctcttcaacaagttaattctaaatatatgttggtcattgacgctgattcttatttatcaaaagatgctttaagctatcttcttgctgaacttacaagttcatcagatattggtgcagttactggtcgtccaattgttagaaatagaacaactttgttaggaaaattacaaacattagaatatttgtcagttattgatgcaattaaaagagctcaatcactttttcttggagcaatcatgacagtttctggagttatcgttatgtatcgtgtagaagcattaaaagaaatcggtggatttaatacagaagtcatgactgaagatatcgatgtaacttggcgtttgcaccgtaatcaatggaaagttaaatacgttcctaaagcgctttcatatattcttgttccagaaaatttgaaaagtttacttaaacaacgtcgtcgctgggctgttggtggtgttgaagttcttatctcaaatctttcttgggtttttaaacgtggtgaatttaaacatcgttttttattaatcgaaatgatttgttcacatatttggtcatggttttttttgattgaaagttatcaatattttttgcaaatgcttttaaaccaagaattcaaagtatctggtcaaattattgtcatctttgttttaatttctttctttgtatttttccttggtccacaaatcgtaaaataa

SEQ ID NO: 2571 - DNA, 2799 bp, Artificial Sequence
  Optimized genes for Lactococcus lactis
atgaaaatcaaagacacacttaatcttggaaaaacagcttttccaatgcgtgctggtttacctaataaagaaccaaactggcaaaaagattgggcagatgcaacattatatgaaaaacgtcaagaattgaatgaaggaaagccaagttttatgttgcatgatggtccaccatatgcaaacggtaatattcatttaggtcactcattaaacaaaatttcaaaagatatcattgtacgttataagagtatggcaggctttagagcaccttatgttcctggatgggatacgcatggacttccaattgaacaacaacttgcaaaagcaggaatgaaaagaaaagaaatggatttacttgactatcttgaagaatgtcgcaaatatgctatgaaacaagttgatatgcaacgttctgattttaaatcacttggtgttcttgctgactgggatcgtccttatttgactttgcttcctgaatacgaagcagcacaaattcgtgtttttggcaaaatggctgaaaaaggctatatctataaaggacaaaaaccaatttattggtcaccttcatcagaatcaagtttagctgaagcagaaatcgaatatcaagatgttcgctcagcttcaatctttgtcgctttcaaagccaaagatacaaaagggaaattaccagaagatgtggagtttgtaatttggacaacaactccttggaccattccatcaaatttaggaatttttgcacatccagattatgattattctgttgttgctgtcaatggacgtaaattcgtcattgcaagtgagatgcttgaagcggttgctgaaaaattagaatgggaaaatccagaagtgcttcaaactattaaaggttctgaattagaatatatggttgcaaaacatccattttacgatagagaaactttaatcatgaatgctgattacgttactcttgattctggaactggtcttgttcatgttgcgccaggacatggtgaagacgattattttgcatcaagaaaatataaattgccagtcctttctccaatagataaccgtggttattatactgatgaggcaccaggtttggaaggcttactctatgacgaagggaataaagttgtttctaaatggttagaagagaaagacgcacttttaaaattggagttctttacacattcttatccacatgactggcgtacaaaaaaacctgtgattttccgtgcaactccacaatggttcgcttctattgatgatttcagacaaaatatcttagatgaagttgaacgtgtggattgggtgataccttggggtaaaactcgtttgttcaatatggttcgtgaccgtggagattgggtaatctcacgtcaaagagcttggggagtaccacttcctattttttatggtgagaatggtgaaccaattatcacacctgaaacaaccgaacatgtagctaaactttttgctgaatttggaagtaaagtatggtttgaacgtgaagcaaaggatttattaccagagggttttactcatcctgctagtccaaatggcgaatttaccaaagaaaaagatattatggacgtttggtttgattcaggttcatcttggaatggggttttaaatgaaagagattacctttcatttccagctgacctttatctagaaggatctgaccaatatcgtggttggtttaactcttcaattactacttcagttgctgttaatggagttgcgccttacaaagcagtattgtcacaaggatttgttttggatggaaaaggtcgtaaaatgtcaaaaagtattggaaatacaatcgttccaaaagatgtaactaaaaaatttggtgctgatattttacgtctttgggttgcctcaattgatactgaaagtgatgtccgtgtatcaatggatattcttagtcaagtaagtgaagtttatcgaaaaattagaaatactttgcgttttttaattgctaatacatcagattttaatcctaaagaggatgctattgactttgctgagcttcgtccagttgacaaatacatgttagtaaaatttaatgaactcgtcaaacaaatcagaactgcttatgataattattcattcatgactgtttataaatctattattaattttattacaaatgatttgagttctttttatctcgactttgctaaagatgttgtctatattgaagctgccaattctcctgagcgtcgttcaatgcaaacagttatgtatgttattctaaaagatttggttaaaattttagtgccaatcttgcctcatacagccgaagaaacttggacttatcttgaacatgaacctgaaaattttgcctatttagcggaaatgccagaagctgcagaaattcctggttcagaagaacttttgggaaattggcaagaatttcttgattttcgtgataaaatacttaaagctttagagtctgctcgtgaagctaaacttattggtaaatcactcgaagccactgtaacaatttatcctaacgaagtagttcgtactttactgacagcaattgatgaaaatgttgctcaattattgattgtttcaaactttgttgtagcaaatgagcctgtaaataatgctccagaatctgcaatgaagtttgatgatttagcagttttagttgagcatgctgctggagaagtttgtgatcgttgtcgaagaacagatgaaaccgttggtcataatgcaaatgaacacttgaaaatgctttgtgaacattgtgctcatattgttgaaacagaattcccagaaattttggaagaaggttttgaagattaa

SEQ ID NO: 2572 - DNA, 1023 bp, Artificial Sequence
  Optimized genes for Lactococcus lactis
atggctgttacaatgtattatgaagacgatgttgaagtttctgctcttgcaggtaaacaaattgctgtcattggctatggtagtcaaggacatgctcacgctcaaaaccttcgtgattcaggtcacaatgttattattggtgttcgtcatggaaaatcatttgataaagccaaagaagatggttttgaaacttttgaggttggagaagcggttgctaaagcagatgtcatcatggtacttgctccagatgaacttcaacaaagtatttatgaagaagatatcaaaccaaatttgaaagctggttcagctttgggctttgctcatggttttaatattcattttggatatattaaagttccagaagatgttgacgtttttatggttgcaccaaaagcgccaggtcatttagtacgtcgtacttatacagaaggattcggaacaccagctttatttgtttcacatcaaaatgcttcaggacatgcaagagaaatcgctatggattgggcaaaaggaattggttgtgctcgtgttggtattatcgaaacaactttcaaagaagaaacagaagaagacctttttggtgaacaagcagtcctttgtggtggacttacagcacttgtagaagcaggatttgaaactttgactgaagctggttatgctggcgaattggcttattttgaagttcttcatgaaatgaaattgattgttgatttaatgtacgaaggtggttttacaaaaatgcgtcaatcaatttcaaatacagctgaatttggtgattatgttactggtccacgtatcattactgatgcagttaaaaaaaatatgaaattagttttagctgatattcaatctggtaaatttgcacaagattttgtagatgactttaaagctggacgtcctaaacttactgcttaccgtgaagctgctaaaaatttagaaattgaaaaaattggagcagaattacgtaaagcaatgccatttactcaaagcggagatgatgatgcttttaaaatctatcaataa

SEQ ID NO: 2573 - DNA, 477 bp, Artificial Sequence
  Optimized genes for Lactococcus lactis
atgcgtcgtatgattattgctaaacttcataatgtcacaggtatcatgaatcgttttactgctgttttaaatagacgtcaagttaatattttatcaattacagctggagtaacagaaagtcaagatttgactcatacaacttttgttatcgaagttgaccatttagatgaagttgaacaaattatcaaacaacttaaccgtttaattgacgttattgaggttgctgatattactgatttaccacatgttgagcgtgaagtagttcttattaaagtttctgctccaccaacaattcgtgctgaaatttttacaatgattgaaccatttcgtgttaacgtcgttgatgtcaatttagaaaatgttactattcaattgacaggagattcagcaaaaattgaagctttgattgatgttgtttcaccttatggaattttgaatatggctcgtactggttcagctggttttgaacgtggttaa

SEQ ID NO: 2574 - DNA, 219 bp, Artificial Sequence
  Optimized genes for Lactococcus lactis
atggctaaagatgatgttattgaagttgatggtaaagtagtagatacaatgccaaatgcaatgtttacagttgaacttgaaaatggtcatcaagttttagcaacaatttcaggaaaaattagaaaaaattatattcgtattttaccaggagataaagttcaagtagaattatctccttatgatttaactcgtggtcgtatcacttatcgttttaaataa

SEQ ID NO: 2575 - DNA, 951 bp, Artificial Sequence
  Optimized genes for Lactococcus lactis
atgactgaatttattactttaggagaaccacttgttgttcttgcttctgaaaatcaagatatttcacttgatgttgcagaacatttttctaaatatttggctggtgctgaattaaatgttgctattggtctttctcgtttgggacataaaggaatttatttatcaaaagtaggtgaagatagttttggaaattttatcatcgaaagtgttaaaaaagccgaaattgaaactacttatctcaccaaagataaaaattattcaacaggtttttatctaaaacaaaaagtttcagaaggagacccaaaagttgattattatcgtaaaaattcagcagctgctaatctttcaattgctgaattgaaagcattagatttatcaggtattaaaatcgctcatttatctggtatctttccagctttgagcgaaacaagtttaaaaacttttcaagcatttaatcaaaaattaaacgaagcagatattttaacaatttttgatccaaatttacgtccagttttatgggataatcaagaaaaaatgattcgtacaatcaatgatttggcaaaacaaagtcaaattattttgccaggaattaatgaaggcgaaatcttgactggttcaagtgaacctgaaaaaattgcaaatttctatcttgaacaatcaccattgacaaaaattgttgttgtaaaacttggagctgatggtgcctttgttaaattgaaaaatggtgagcaatattttgtatcaggatttaaagtcgctaaagtggtagatactgttggagcaggtgatggctttgctgttggtttagaatcagctcttttagagggtaaaacattaaaagaagctgtcaaacgtgcttgtgcagttggggctttagcggttcaatcttctggagattcagaaggttatccaactaaagaagaacttaaagctttttataaagaaatgtaa

SEQ ID NO: 2576 - DNA, 1443 bp, Artificial Sequence
  Optimized genes for Lactococcus lactis
atgatcaaattctttaattcaatgatttttaaaggtgttgttgctcacttgcttttatttgttattttgtttatgtcatcatttgactataactttgctcatttatcaacttttattggttattatttattttcacttgttttcgttttagtttttttaaaccaacaacatcgtatgattgttaatgtatctaaacaaatgaatgatattaaaaatggatatttgaatcgtgataagattcctaaaggaacttctgaaatcaatgaactttatgatgaaattcttaaattaggagaagacattgtccgtactcaaaataatttagaaaatcaacgtaatcaattagattcaatccttgcttatatggttgatggtgtaattgcaacagatagacgtggtaatattatcatggcaaataaatctgctttacattatctcaatacagacaatgatttattgatgcaaaaaaatattgttgaagttttgaaaattactgatcaatataatttctatgaccttcttgaaaaagaaccagaaataacaatcgaaactcatgactcaggaaacgaaagcatttctcttcatattaaatttgcactttttagaagagaatcaggttttatctctggaattattgctgttttgcatgatatgactgagcaagataaagctgaacgcgaacgtcgtttgtttgtatcaaatgtttcacatgaattacgtacaccacttacaagtgtaaaagcatatcttgaagctttggaagatggagcaattgaagataaagaaactgctagttcttttattaacgtttctttgactgaaacaaatagaatgattcgtatgattagtgatttgttgacactttcacgaatggatcaagaccgtattgtacttaataaggaaatgattaatttgattgcttttcttgattatcaaatcaaccgtcttgaccaaattttagaaacagaaagtaatgacttaatttcttctaattttacattggttcgtaaatactcagaacaaccaatttgggttgaaattgatactgacaaaatagctcaagttatcgataatatcattggaaatgctataaaatattcaccaaaaggcggaaccattacaatttcagtagaaaaacgtgaatctgatgttcttatttcaatttcagaccaaggaatgggtattccaaaatcagatttattaaaaatctttgatcgtttttatcgtgtagataacgcttctcgtaactcaaaagttggtggaactggtcttggtttatctattgttcatgatatcgttaaaattcatggtggtactattttcgcttcaagtgaaggtgaaggaaaaggtacaacatttagttttactttaccttattctctagaagcagctgatgattgggatgacggaacagatgaatttgagtttgaagataatgaataa

SEQ ID NO: 2577 - DNA, 963 bp, Artificial Sequence
  Optimized genes for Lactococcus lactis
atgagtaaaaaaattgttactttggctggagatggtattggaccagaaatcatgtcagcaggtttgtcagttcttaaagcggtatcaaaaaagattgattttgaatacgaattagaagcaaaagattttggcgggattgctattgacaaacatggacatccacttccagaagaaacacttcaagcagttaaaaatgcagatgctatcttgcttgcagcaattggtcatcctaaatataataatgctaaagttcgtcctgaacaaggattacttgctttgagaaaagaacttggactttatgctaatgtaagacctttgaaaatctatccagctttaaaaaaattatcacctattcgaaatgttgaaaatgtcgatttcttgatgattagagaattgactggtggaatttattttggtcaacatgaactcgcggatgataaagcacgtgatgtaaatgattattcagctgacgaaattcgtcgtatccttcattttgcttttaaatctgctcaatcacgtccacgtaagcttttgacaagtgttgataaacaaaatgttttggcaacttctaaactttggcgtaaaatggctgatgaaattgctgatgaatatcctgatgtccgtcttgaacatcaacttgttgattcatgtgcaatgttgttgattacaaatcctcaacaatttgatgttatcgttacagaaaatctttttggtgatattttatctgatgaagcttcatcattagcaggaagtcttggtgttatgccaagttcaagtcatggttttaatggtttagctttatatgaaccaattcatggttcagctccagatatcgctggtaaaggaattgcaaatccagtttcaatgattctttcaattgccatgatgcttcgtgaaagttttggacaagaagatggagcaacaatgattgaaaaagctgttactcaaacttttacagattaa

SEQ ID NO: 2578 - DNA, 1383 bp, Artificial Sequence
  Optimized genes for Lactococcus lactis
atgtctggtaaaactatttttgataaattatgggatcaacatgttattgcaggaaatgaaggagaacctcaacttctttatatcgatcttcatgtaattcatgaagtaacaagtccacaagctttccaagggcttcgtgaagctggtcgtcgtgttagacgtaaagatttgacttatggaacacttgaccataatgtaccaactcaagatatttttaatattcaagacttgatttcaaaaaaacaaattgatacttttacaaaaaatgttaaagagtttgatgtgccagctgaaactcacggtggaaaaggtcaaggaattgtccatatggttgctccagaatcaggtcgtacacaaccagggaaaacaattgtttgtggtgatagtcatacagctacaaatggtgcatttggtgctatcgcttttggtattgggacttcagaagttgagcatgtccttgcaacacaaactatttggcaagttaaacctaaaagaatgaaaatagaatttcaaggacatccacaaaaagggatttatagtaaagattttattttagctttaattgctaaatatggtgtagatgcaggtgttggttatgcagttgaatattcaggagatgcgatttctgacctttcaatggaagaacgtatgactatttgtaatatgtcaattgaatttggagcaaaaattggattgatgaaccctgatgaaaaaacatatgattatgttaaaggaagagaacatgcaccaaaaaactttgacgaagctgtttctaaatgggaaaaacttgtttctgattcagatgctcaatatgacaaaattttgagtttagatgtaagtcaattaaaaccaatggtaacttggggaactaatcctggtatgggtcttgaattcggtgaaaaatttccagaaattaataatgatttaaattatgaaagagcttatcaatatatggatttaaagccaggacaaacagcaagtgctattgatttgggatatattttcatcggttcatgtacaaatgctcgtttgggcgatttagaagaagccgctaaaattattggtgaccgtcatattgctgatggacttactggtatcgttgttccaggttctcgtccagtaaaagaagcggcagaagcacaaggccttgataaaatctttaaagaagcaggttttgaatggcgtgaaccaggttgttcagcttgtttaggaatgaatccagatcagattcctgaatacgttcattgtgcatcaacatcaaatcgtaattttgagggacgtcaaggtcacaatgcaagaactcatctttgctcaccagcaatggcagctgctgcagcaattgccggtaaatttgttgatgttcgtactttagttactgattaa

SEQ ID NO: 2579 - DNA, 576 bp, Artificial Sequence
  Optimized genes for Lactococcus lactis
atggaaaaatttacaatttataaaggaacttcagttccagttatgaatgataatattgatactgaccaaattattccaaaacaatttttgaaagcaattgacaaaaaaggttttggaaaaaatcttttttacgaatggcgttatcttaaagactatgatgaaaatcctgattttattttaaatgcacctaaatataagaaagcttcacttttgatttctggagataattttggttcaggaagttcacgtgaacatgctgcttgggcactttctgattatggatttagagcgattattgctggttcttattcagatattttttataataatgctttaaaaaatggacttttacctattaaacaaccaagagaagttttgaatcaattaactaaactttcaagtcaagaagaaatcactattgatttaccacatcaacttatcattacttctcttggtgatttccattttgaaattgacccaatttggaaagataaattaattaatggtcttgatgatatcggaattacacttcaatatgaagaagctatttcagcttatgaacaaaaaaaccaataa

SEQ ID NO: 2580 - DNA, 1158 bp, Artificial Sequence
  Optimized genes for Lactococcus lactis
atgaaaaaagcagttcattttggtgctggaaatatcggtcgtggatttatcggtgaaatactttcaaaaaatggttttgatattcattttgttgacacaaataaatcaattatcgctgaattaaataaccgtcatagttatgaaattggaattgccagttcagaacatgaaaaaatttcagttaaagctgtatcaggtatcaataattctgaaaatccagaagcagtaattgaagctattgcaaaagctgatattttgacaacagcaatcggaccaaatgttttaccttatattgcagaattgattgctaaaggtttacaaaaacgtaaagaagaaaaagtacaatcaccacttgatatcattgcttgtgaaaatatgattggtggaagtgaatttttagaagaaaaggtttctgattatttaagcgaatcagataaattatatctttctaaatttattggtttccctaatgctgctgttgatcgtatcgttccagctcaaaaacataaagatgttctttatgttgaagtagaaccattttcagaatgggttattgatgcatcacatttgaaaaataaggaaattaagcttgaaggtgttcactatacaactgatttagaaccttttattgaaagaaaactttttagtgttaattcaggacatgcagctgtcgcttattcatcagcttacaaaggatataaaacaattcttgaaggattgcaagacgaggaaatccttaatattttaaaagcggttcaaaaagaaactcgtgctttacttttagctaaatgggcacaatattttaaacaagatgaattaattaaatatcacgaacttatcatctctcgtttttctaatcctgaaattattgacgaagtttcacgtgttgctcgtacaccaattcgcaaacttggttatgatgaacgtttcattcgtccaatccgtgaattgaatgaccgtaaattgtcttatcaaaatcatttagatattgttggtaaaatttttgcttatcatgatgaaaatgatgctcaagcaattcaacttcaagaaaaattaaagattactgaacttccaatgcttattgaagaagttactggtttgtcaaatcaaaagttaatcttggaaatcgaaaaagttattaatcattataaaaaataa

SEQ ID NO: 2581 - DNA, 942 bp, Artificial Sequence
  Optimized genes for Lactococcus lactis
atgattgaaaaatataaaaatattttaatcacttttattgctttagctgctattgtttttttagttggttgctcaaataaaaagacagatcaagttactgacaaaaaaattaatgttgttgtaacaaattcaattcttgctgatattactaaaaatattgcagatgataaaatcaatcttcattcaatcgttccagtaggtaaagaccctcatgaatatgaaccacttcctgttgatgttcaaaaaacaagtaaagctgaccttatcttttataatggacttaatcttgaaacaggtggaaatgcttggtttacaaaattggttaataatgcaaataagaaagaaaatattgattattttccagtttctactggtgtagaagttatttatttggaaggaaaaaatactgaaggcaaagaagatccacatgcttggttaaatttagaaaatggtattatttatgctaaaaatatcgaacaacaactttctaaaaaagatcctgtaaataaagatttttacaaacataatttagataaatatgttaaaaaactttcagatttagaccaacaagcaaaatctaaattttctttgattcctgaaaatgaaaaaatgattgtcacttcagaaggttgttttaaatacttttcaaaagcatataacattccatcagcttatatttgggaaattaatacagaagaagaaggaacaccagatcaaattaaaaaccttgttcgtaaattacgtgcaacagaattaaaatcactttttgttgaatcatcagtagataatcgtccaatgaaaactgtttcaaaagatacaggaattccaatttattctacaatttttactgattcagttgctaaaaaaggagaaaacggtgattcttattattcaatgatgaaatggaatttggaccaaatctataaaggtttagcaaaataa

SEQ ID NO: 2582 - DNA, 1314 bp, Artificial Sequence
  Optimized genes for Lactococcus lactis
atgagtttatttcttgatacagctagaattgaagtaaaagctggaaaaggtggggatggagctgttgcttttcgtcgtgaaaaatatgtaccagatggcggaccagctggtggagacggaggtaaaggtggttcagttattttcaaagtagatgaaggaatgtctactttgatggattttagatataaccgtattttccgtggaaaacctggtgagaaaggcatgaataaaggaatgcacggacgtggcgctgaagatttaatcgttcatgttccacaaggaacaactgttaaagataatgaaactggtgatgttttagttgatttgattgaaaaagaccaagaatttgctgtcgctaaagggggccgtggtggaagaggaaatattcgttttgcaacaccacgtaatcctgctccagaagttgcagaaaatggagaaccaggtgaagataagattttattgcttgagcttcgcgttttggctgatgtcggtcttgttggatttccaagtgtaggtaaatcaactttattatctgttgtttcaaatgctcgtccaaaaattggtgcttatcattttacaacaattactccaaatatcggtatggttcaagttggttatggagattcatttgtcatggcagatatgccaggattaattgagggtgctcattcaggagcaggattgggaattcaatttttacgtcatattgaacgtactcgtgttcttcttcatgtattagatatgtcagaacttgaaggtcgtgacccttatgaagattataaaactattaatgatgaattagaatcttataatttaagattaatggaacgtcctcaaattattgttgccaacaaaatggacatgcctgaagcagctgaacgcttggcagaatttaaagaaaaattagctgctgaccttggtcctgataaagaaatgccagaaatttttgaagtttctggtttaactaaaacaggacttcaaggtttgttagcaagaacttctgaattacttgctcaaacacctgaattccttctttatgatgaagacgaattggctgatgaaacagcctattatggttttgaagaagaagaaaaaccatttaaagtttcacgtgatgatgacggtggttggcgtttgtcaggtgataaaatcgaaagactttttatcatgacaaattttgatcatgatgaaagtgttatgaaattcgcacgtcaaatgcgtgcaatgggagttgatgagacacttcgttcaatgggtgcaaaagatggtgactatgttcgtatccaaaaatttgaatttgagtttgttgactaa

SEQ ID NO: 2583 - DNA, 960 bp, Artificial Sequence
  Optimized genes for Lactococcus lactis
atgtggaaagttatcattcgtagaattcttttgatgattccacaattgtttatcctttcaatcttagttttcttttttgctaaattaatgccaggtgacccattttcaggtttgattggtccacatactgaccctcatgaagttgaagctttgcgtcgagctgctggtctttatgatccttggtgggaacaatatttgcgctggcttgggaatgcaattcatggaaatcttggaatgtcttataatttaaaagaaccagttatgactgtcattggacatcgtgctattaatactttttggatgagtttactttctgttattttgacttatttatttgcaatcccaatgtcaattgttgctgcacgtaatgaaggaaaatggcaagaccaattatggttaacttacaattcaattacatttgggattccaccttatgtcttttatcttcttattattttcatttttggctattcattaaattggtttccaacaggtggaactgtttctcctgatgcaatgggtattattcctgtttttttctcaaaaatttatcatatgattttaccagctttttctcttgctgtttttggtacagttggtatctttacatattttcgttcaggaattcttgatgaacaaacacaagattatgttcgtacagctcgtgcaaaaggtgttaaagaaaaagtaattttccgtcgtcatattttaagaaatgcttctttgccaattgcttcaaattttggatttgttatcactggtttattgggaggagcgatttttgctgaaacaatttttggttatccaggacttggtcaactttttattacttctatttctggtcgtgattactcaatgataactgctttaattttgttgaatggttttttaggattattaggtgctcttttatctgatattatcatggctatggttgatccacgtatccgtattcaataa

SEQ ID NO: 2584 - DNA, 1638 bp, Artificial Sequence
  Optimized genes for Lactococcus lactis
atgaaaacttggaaaaaagttactttgggaacagttgctcttggttctgctgctttacttgctgcttgtggtaattcaggaagttcttcatcaagtagttcaaaagatattcaatggaacttgacaagtccaattcaaactcttgactcatctttggcaacagatacttattcaaatattattatcgggaatactaatgctggtttaactcgtgttgataaagatggtaaagctcaacctgaacttgcaaaaagtgttgatgtaagtaaagacggattgacctatacatttcatttacgtgatggcttaaaatggtcaaacggtgatgctttgactgccaaagactttgtttattcttggcaaagagctgttgacccagccactgcttcagaatatggttatcttttaggtccagttaaaaatgcaaatgaaatcaatggtggtaaagctgacaaatctacattgggtgttaaagctactgacgataaaacttttgtagtaacattagcacaaccaacaccatattttgaatttttgacggctaattctgtttattatccacttaaccaaaaagtagttgaaaaatacggaaaacaatatggaacttctagtgaaaaaatggtttactctggtccttataaatttgaaaagtctaaaggttggaatggtagtaatcaaacattttcaattgttaaaaatgatgattattgggataaatcagctgtaaaaacaaaagaaattgatttccaagttgttcaagatcctaaaacttcattcaatttatacaaacaaggaaagattgtacaagcaagtattggtgaccctgatctttttaaagcaaataagaataacaaagatgtcgtttctttggatgaagcaactacagcttatattcagtataatcaatcaggtaaaaataaagccttagccaataaaaatattcgtgaagcttttaatttagctacagaccgtcaacaatatgttgacactgttacacctgcttctaacccagcaacagggttgactccagctggaatggctaaaacaaatacaggtgtagattttgctaaatatgcagcccaaccctataaatatgatgcgacagcagcgaaagcggcttgggcaaaaggattatctgaaattggagaaactaaacttactttaacactgacaaccgatgatacatcagcatcaaaggatagtgcaacttttttaaagcaagcttgggaaaaacaacttccaggacttacacttaatatcaaatcagttccatttaagcaacgtttaaatgattcaacaacaggaaattttgatatggttatttcactttggggaggagattatgccgaaccaagtactttcttagatttatttgtcaaagatggaccaaataataatggaaaaattaataatgttacttacgataaggcaattaaagcagcagaagttactgatgcacttgatccagaaaaacattatgctgattacaaagcagctgaagaaagtctttatactgaatctaatttgaatccattatatttccgtacaactcctgttttaagaaatcctaatcttaaagatgttcgttttggttcaactggtttgatgtatgattttaaaacagcctatttgaaataa

SEQ ID NO: 2585 - DNA, 1050 bp, Artificial Sequence
  Optimized genes for Lactococcus lactis
atggcagaagaaaaagttttagaagtaaaaaatcttcatgttaattttcatacttatgctggtgatgttaaagctattcgtgatgtcagttttgatttggaaaaaggtcaaacacttgcaatcgttggagaatctggttcaggtaaatcagttactacaaaaacattaatgggtttgaatgcaaaaaatgctgttattccacaaggtgaactcctttttaaaggacgtaatttacttgatcttaaagaagaagaatggcaaaaaattagaggaaatgaaatttcaatgattttccaagatccaatgacttcacttgaccctacaatgagaattggaaaacaaattgcagaaccacttttgaaacataataaaggtatgtcaaaagcagatgcaatgaaacgtgcacttgaattgatgcaacaagttggtattccagatgctgaagttcatattaatgattatccacatcaatggtcaggaggaatgcgtcaacgtgctgtcattgccattgctcttgctgctgacccagaaatcttgattgctgatgaaccaacaacagctttagacgttacaattcaagctcaaatcatgcacatgatggctgaacttcaagaacgtatcaattcatcaattgtttttattacacatgatttaggtgttgttgctggatttgctcataaagttgcagttatgtatgcaggagagattgttgaatatggtacagttgaggaaattttttataatcctcaacatccatatacatggggacttttagattctatgccaactgttgattcaagtgttgaccgtttggtttctattcctggaactccacctgatttattaaatccaccaaaaggcgatgcttttgcagcacgtaacaaatttgccttagcaattgattttgaagaagaacctccttattttgaagtttcacctactcattttgctaaaacttggttattggacccacgtgcgcctaaagtaacaccatcagataatattttagctcgttggaaaagatgggaagaattaaaaggagataaataa

SEQ ID NO: 2586 - DNA, 1887 bp, Artificial Sequence
  Optimized genes for Lactococcus lactis
atgaaagaatttatcattaaaaatacagatatttggaaaattttcttgaaatattatcgaagtgatgaagaaatagttttccttcatagttcacaagtcacagaaaatgaacattattcaatacttgctcataaaccttataaaaaagtaagtaagtataaaggtcaagtttttttcaatggagaaaaaaaaaaatttaattttcttgatgctgtagatcttctaaaagatgagcgtgtagaacgtccaaaaaactggccattctatcctgaacttttaggatttgtttcttacgaacaagacccagcttgtttcgctgcttatgatgaagtgttactttttgaccatcgtacaaaacttttgcgtgttgttcaatttgagcaaactgacggacaatattggttaactgaaagtgaagaaattgaagttgatagcgaaattgagtttgatgggcaaaacggtattggagcaatttttattgaccaaacacgtcaagaatatattgcatcaattaagaagttgcaagattatatgaaagcaggagatatttatgttgcaaatttaacacaacaatttgaaatctggtcagatcaaaaaccaatcgaagtattcaaaaaaactcgtaaacaaattcctgctccatttagctcatttcttcaatatccagaatggaaaatgactcaaatctcttcatcagttgagcgttttgtatctattcatgacggtgcacttattagtaaaccaattaaagggacaattgctcgtggagaagacgttggtgctgaccgtttacaaaaagagattttaagtgattcatctaaagaacgttcagaattattgatggttacagaccttcttcgtaatgatatcgttagaatcagtcaaccttttagtttatcagtaccaaagtttgcagaaattgaaactttttcacatgtccatcaattagtaacaagtataaaatcacgtatcaaagaagatttaaccttttctgaatttatgactgctttgtttccaggtggttcaatcactggtactcctaaaaaacgtgcaatggaaattattaaagaagttgaaaagcaaccacgtgggatttatactggaatgcaaggttggctttctcgtgaaatggatttggatatgaatattgttattagaacacttgttcatgatggcgaacactatcaacttggtgttggaggtggaattacttttgaatcaaaagctgaagctgaattctcagaaattttgcttaaagccaaaccctttttagatatcttgggagttaaagatgttccatcaattctttttacaacaggaatcatcaaaaatggtgaattgttaaatcttgaaggacatgttaatcgtttgaaaaaacaatatcatcatccagatttagaagaaaaattacgtatttttgctcaaaatgttactgatggggttttgagaatttcaacagatggtgattctttgagtccaggaattcgtcaattgactcattcaaatgaagcatatcgtgtcaaattgtcaagtattaatgataaaccaagtcttctctcaaactttaaattatctggtcctgatttccaaaaagtttttagacaagaagttttagaggctaagaaagaaggttttcaagatattctctttcatactgatggtttgatttcagagctttcaattggtaatttcgttgctaaaaagggaaatcaatatgaaacaccagcaaaatatgctttaaaaggaacatttttggacttatttgctaaaaatcatacattaatttacaaagacatcgctctttctgatttaaaaacatacgattgtttttatatgacaaatgctgttcgtggtttagttgaaatcaagattgatggaatttcttaa

SEQ ID NO: 2587 - DNA, 2757 bp, Artificial Sequence
  Optimized genes for Lactococcus lactis
atgaagttttatcaaaaatctaaagaagaattgcttcattcttatgatgtcaagattgaccgtggacttagctcaacacaagtaacagataaccgtgaacgttatggagaaaataaattgccagaagaaaaagaagagagttatttgaaagtattttttaaatcattcaaagaaccaattattattgttctattaggagcagttgccctttctttcttctcaagtttctactcttttcaaattgttggcgataaaaaacatggtttggaaagcttatatgaagcaatcgctattgctatcttaattattatcaatgcttttttgggtttttggcaagaaatctcagcaagaaaaaatttgaatagtcttaaagaaatgaataatcgttttgcttcagtccttcgtgatggtgcgcttgaaaaaatttcatctaatgaattagtagttggtgatattgtaaaggtaactgttggagactttgttgaagcggacattcgctggttagaacttgatgaattacaacttattgaaagtcatttaacaggtgaagcagatgcaattattaaaaatatcgaagttattaatgaaaatgtggaaattggcgaccaaacaaatatgggtttctctggttctattgtttcaaatggacaaggaattggtatagttgtcgcaactggtgagaatacagaacttggtaaaataagtcaactgatgaaagacgaaggcatcaaatcaagtccacttcaagaaacagttaagaaactcactaaaactctcatgaaaatttctgctggaattgttttgttaacttttgtctttggtcttattagttctggcgaattttcaataaattcaattacttctgttttcagtacaagtattgctttggctgttgcttctattcctgatgctctaccagttgtactttcaattgttttgaccattggggctgtaaaaatgagtaaaaacaaagggttgatcaaaaccttgtcatcagttgaaacattaggttcaacttcatatatttgttcagataaaactggtactttgactcaaaatgagatgactgttacaaaattttatgcaaatgggcaactttataatgtagatggattgggatatagttcaattggagaaattcatttgattgcaaaaggtgaaaagaatattaactttgcacaatttatgaaaaacattgtcctttgtaatgattcttctgttaaagaagtagaaggtcaagttaaaacatttggaaatccaactgaagtagctttaaccgttttaggaagcaaagctggttattctaaaaataaattacttaagaacaataaaatcatcagaactttaccattttcttcatctcgtaaaatgatgtcagttatcgttcaaaacgatgaaggattctatgtttatacaaaaggagctcctgacgttttgatggaaaaagcatcaggaattttaatcggtgatatcgttgatcaatctgaacaatcaaaagataattttattaaagttgttgatgattatgctgatgaggctttaagaacacttgcggttgcttataaaaaagtcgatgaagaagaagctctttatggtgctactgaagatgttgaaaaagattttatcttgacaggagttgcaggtatcattgatccaccaagagaagaagtcaaagaatcaatccgtcaattgcatgatgccaatattaatgttgttatgattacaggagatcatgaaaaaacagctcgtgcaattgcctatgatttggggattgtgaaagagaaaaatgcaacagttttaaaaggtattgatttagaggaaatgtctgaccaaaaactttacgcagaagttaaaaatgtaaatgtttatgcgcgtgtgactcctgaacataaacaacgtatcgtaaaacaattacaaaatcatcaacaagttgtggcgatgacaggtgacggtgtcaatgatgctccagctttgcgagcagctgatattggtgttgcaatgggaatcactggaacagaagttactaaagattcagctgaccttatccttttggatgacaaatttacaactattgaaaaaagtgtctattcaggtcgtacaatttatgctaacataaaaaatttcatgcgtcatgaactcacaacaaacgttgctgaagtgcttgcactcgttcttggtttggttcttttccgttcatcagtaggtaatgtcgctgctatgactccaacgctgacagcattgatggttctttgggttaatatggtttctgatgcgattccaagttttagtttaggctatgacgtggctgaaactgatttaatgaaagaaaaaccacgtaacccaaatgaatctattcttgctaatcatacttggtcacgtgttttaattcgtggtaccgtaatgggtacaatggtatatcttggatttcttttagcagcacaaaatggtttaaatgcctcagaagctcaaactgtagcatttctaactttagtttacggtcaattatggcatgtttttgatgcacgttctagtcgtactctttttcgtcgtaatccttttgggaatattcgtcttgttggtgcagtattatttgctggtgtaagttcatttttagtgacaatcatacctttctttaattctgtcatgggaactgctcaactcaccttacctgtttatttattagtcatttttattccagcacttccaacattgattttatctggaattaaggaagtttttaaaattaaaatttggtaa

SEQ ID NO: 2588 - DNA, 1242 bp, Artificial Sequence
  Optimized genes for Lactococcus lactis
atgaaatatgaaaaattgctaccaagatttttagaatatgttaaagtaaatactcgttcagatgaaaattcaacaactacaccatcaactcaagcacttgttgaatttgctcataaaatgggagaagatatgaaagccttgggattaaaagatgtccattatttggaatcaaatggttatgtcattggaacaattccagctaatacagataagaaagttagaaaaatcggtcttttggcacatttggatactgcagattttaatgctgaaggtgttaatccacaaattttagaaaactatgatggcgaaagtgttatcaaacttggagatacagaatttactttagacccaaaagattttccaaatttaaagaattataaaggacaaactttggttcacactgatggtacaacacttttaggttctgatgataaatcaggtgtcgctgaaatcatgactcttgctgattatttattaaatattaatcctgattttgaacatggtgaaattcgcgttggttttggtccagatgaagagattggtgtaggtgctgataaatttgatgttgctgactttgatgtagatttcgcttatactgttgatggtggaccattaggagaattacaatacgaaactttttcagctgctggagcagtaattgaattccaaggtaaaaatgttcatccaggaacagctaaaaatacaatggttaacgctcttcaacttgcaattgactatcataatgctttaccagaatttgaccgtccagaaaaaactgaaggacgtgaaggcttttttcatttattgaaattagatggaactcctgaagaagctcgtgctcaatatattattcgtgatcatgaagaaggaaaattcaatgaacgtaaagctttgatgcaagaaattgctgacaaaatgaatgcagaacttggtcaaaatcgtgtaaaaccagttattaaagaccaatattataatatggcacaaatcatcgaaaaagatatgtcaattattgatatcgcaaaaaaagcaatggaaaatcttgatattgttccaatcattgaaccaattagaggaggaactgacggttcaaaaatttcatttatgggtttgccaacacctaatctttttgctggtggtgaaaatatgcacggtcgttttgagtttgtttctgttcaaacaatggaaaaggctgttgacacattacttgaaattatccgtttgaataatgaagttgttaaataa

SEQ ID NO: 2589 - DNA, 477 bp, Artificial Sequence
  Optimized genes for Lactococcus lactis
atgcgtctttttttatttttgattgcttggcttcgttgccttcaacttcttgatttagaaaaacaagttaaatttgaatttaattttttacgtaaagaaatgattaatgaaaatgataataaaggaacaacttatggttcacgtattgcagcaaataatactaaacaacgtttgcgtcgtatcgcttgtcgtacagctcacgaatggttagaccaatcagaagaagttttcgaacaatttcatgaaaaacatcgttgtgatgtttttgttgttatttatcctccaaaacgttttaaatatgatccaccaaattatgaaccaacttcaaaagctttaattgatggtttgactgatgctggaatttggaatgatgataactataatgttattcgtagaacaagttttgaacatggtggactttcaggtgatacaaaaacttggaaagttgaacttgttgtaaaagaattaacagaataa

SEQ ID NO: 2590 - DNA, 363 bp, Artificial Sequence
  Optimized genes for Lactococcus lactis
atggcacgtttagaaaaaatttatgatgtttattttaatggtattaaaatgggaacaggaactaaaaaagaactttcaaaaatgcttttagtttctccacattcagttgctggttgggttaaaaatggaatggctaattcaccaaaaaataatgctgtaaaaattgctgttgttaatgaaaaagcaatgatggaaaaatatccaggatggaaaccttatggtggttctaaatcaaagatttcagatgaaattactgaccgtgatagaagaaaacatgaaacaaaagaagaacgtcgtttgagacgtaatattcgtgctcaaatggcaattgaagctgctcgtaaagaagaattaggactctaa

SEQ ID NO: 2591 - DNA, 210 bp, Artificial Sequence
  Optimized genes for Lactococcus lactis
atgtcatacgttgttaacaaaacaggagatttttcaggttatcatgaagttcataaaggtgcttgtcctaatcgtccaattgttactgattcttatttgattaataaacaatttgaaaatgatttagatgcaatggaatatgttaaagaaatttatccaagtcttcaagttcgtccttgtctttcttgtatggatacttcatcacgttaa

SEQ ID NO: 2592 - DNA, 399 bp, Artificial Sequence
  Optimized genes for Lactococcus lactis
atgaaaaaaattaaaaatattgctatttcaacagttcttggtgcttcagctttaattggtttatctgcttgctcacaagcagataaagtaagtcaaaatgtttcaaatgatgctgataattttaaagttgaacgtcgtgttgtcattatcaatactcgtacagataagattgaatttgttgcaaaaggtttgatttctgttaatacagaagactcaaaaaaattagttattttagctaaagtcggtaaatctcaatataaaaaagatattattaatttaacaaataataatatgtatactgttgaagatttatcaggtgcaaatgtcaattcatacaaatatgaagttacttggttaccagaatcagttgttccagttaaaattgttggtgaaaaataa

SEQ ID NO: 2593 - DNA, 1080 bp, Artificial Sequence
  Optimized genes for Lactococcus lactis
atgtcaatcctcaatccttttgaacgtcgttcatcaattactcctaataactattatccatttatggttcaaaatggaagtattgttccaaatagtttagttgatgcaactgaagcattaaaaaattcagatctttatgctgttacaagtttgatttcaagtgatattgcaggaacacgctttatcggtaatcaagtttttacatcagttttgaataatccgtcacatttaacaaatgccttttcattttggcaaacagctattttgaatttacttttaaatgggaatgttttccttgcaattttaaagggtgataattcattgatgaaagaattacgtttaattccatcaaatgcaatcacaattgatttgactgatgatacacttacttatgaagttaaccaatttgatgactatccttcagctaaatataatgcttcagaaatgattcatgttaaaattatggcttatggtgtagatactcttcataatcttgttggtcatagtccattagaatcattaacttcagaaattggacaacaaaaagaagctaaccgtttgagtctttcaacattgaaaggtgctcttaatccaacttctgttgttaaagttcctcaaggaactttgtcatctgaagccaaagattcaattcgtaaagaatttgaaaaagcaaatggtggaaataattctggtcgtgttatggttcttgaccaatctgctgatttttctactgtttcaattaatgcggatgttgctaattatttaaactcaatgaattggggacgtacacaaattgctaaagcttttggtgtttctgattcttatcttaacggtactggtgaccaacaaagttcacttgatcaaattaaagatttatatgttaatgctttaaatcgttttattgaaccacttattagtgaacttcgtattaagtgtgatagttctattggtgtcgatatgtctccaattacagattattctaattctgtctttaaagcagatatcttgaactgggttaaggaaggaattattgaacctacagaagcaaaaacattacttgaatctaaaggaatcatttga

SEQ ID NO: 2594 - DNA, 570 bp, Artificial Sequence
  Optimized genes for Lactococcus lactis
atggttgttaaagtttttgatgcttatatcgaaggagaaaagaaagcaacaggaacaattgatgaaattgctgattattttgatattagtcgtacttcaatttctctttggattaaaaatggtaaagatccaaaaaaagctaatcctaaatataaacatgctattttaaataaagaaaaaactaaagaacttacagaacaaaaaaaaaaagaggaaagaaaattaccagcttcagtttacgattattatgataaaggtgaatttattattactggtacagctcgtgaaatttcacaatttttaaaaattggaaaacacaatgtttattcttatattcaagttggtaagtatgcttttgactatcgtaaaacacgtaagcatgcgattttgaatgaagctgaaactcgtaaacgttttccacttttatctgtttcttcagaagaagaattgattgaaacaaaggaaaaagaacgtcgcaaacatgaaacaaaagaagaacgtcgtttgagacgtaatattcgtgctcaaatggcaattgaagcagcaagaaaagaagaattaggattatag

SEQ ID NO: 2595 - DNA, 1206 bp, Artificial Sequence
  Optimized genes for Lactococcus lactis
atgaaattttttaataataaacgttctccaacagaagaatcaaaagctaaagatgaaattccaaaagcacctcaagtagttatgactttacctaatttctttaaagaattgatttctgatggttatacaaaattgtcagattcaccagaagttcgaatggctgttgattgtattgcagatttggtatcaaatatgacaattcaattgatgcaaaatggtgaaacaggtgacaaacgaattaaaaatgacttatcacgtgtggttgatattgaaccaaacaaatatctttctcgtaaaacttttatccaatggttagttcgttcaatgcttcttgaaggtaatggaaatgcagttgttaaaccacaagtttctggtgataaaattattggtttgacaccaatttcaccttacaaagtaacatttaatgtttcagatgacgatttagattattctattacttttgataataaggaatatgatccatcaactttgcttcattttgttttgaatccaagtattgaacgtccatttattggaacaggatataaagttgcacttaaagatatcgttgggaatttaaaacaagcaagtgttactaaaaaaggttttatggcatcagaatatatgccaaatcttattgtctcagttgactctgatagtgatgaactttcagacgaagagggtcgtgaaaattttgaagaaatgtatttgaaaagaaaagaagcaggtaaaccttggattattcctgaaggaatggttaacgttcaacagataaaaccacttacactcaatgatttagcaatcaatgatgcagtaactcttgataagaaaacagttgctggtatttttggtgttccagcttttttacttggtgtaggaacttataataaagatgaattcaataactttattaatactaaaatcatgtcaattgctcaagttattcaacaaacttacaataaacttattgttgaagaagatatgtatttttcattaaatcctcgtagtctttataattattcacttactgaaatggtatcagctggagcacaaatgactcaacttaatgctttacgtcgtaatgaatttagaaattgggttggtatgcctccagatgctgaaatggatgatttgcttgttttagaaaactatttacaacaaaaagacttggttaatcaaaaaaaattaattcaagatgaaacttaa

SEQ ID NO: 2596 - DNA, 372 bp, Artificial Sequence
  Optimized genes for Lactococcus lactis
atggcaaataaaatttcaattgatgatttagcaaaaacaattgaatcagaagttcgtaactggacaaaagatgttgttgatgatattgacgatattaaaaaagatatcactaaaaacggtgttaaacaacttcgtgaaagttcacctaaaagaactggtgattatgctaaaaattggacttcacaaaaattaaaaaatggtgaccaagttatttatcaaaaagcaccaacttatcgtttgactcatttacttgaaaatggacatgctaaacgaaatggtggacgtgtttctccaaaagttcatattgctccagttgaagaagaacttgtttcaaattatatttctcgtgtagaaaaacgtttaagtcaataa

SEQ ID NO: 2597 - DNA, 1602 bp, Artificial Sequence
  Optimized genes for Lactococcus lactis
atgactgaacattttattactttgtcaactactgaaccaaataataatgttggaattgttaaattacgtcatgctgatgttaattcacaagcaattgttgctcaaatcgttgaaaacggtcaaccaaaaaattttgaaggtttgcaaccttttttttgtcttatggcacaagaaatcactggacaaggagtatcagaagaatcagttgtttcatttgatgcaaaaaatggaacgctaaaatatattgcaagtgataatgcacttcaaatggttggtcgtaacgaagcttatttcagttttagaaaacaagaagatggaaaatggattgaacaattttctactcgtactttcaattatatcgttgaaaaatcaatttatagtcaaccatttaaagatagtaattattggtggacttttaaagaactttaccgtatttttaataaatatattgaggatggcaaaaattcttgggaagaatttgtaaatcaaaacaaggaaattttagaaagtgttgacccaggtggaaaaatcctttctgaattgcttgctgctcgtaatggtaaacctaatttaaaaacaagaattgatgatcttgaaaataaaactacagctcaattggctgaaaaagttgatatttcagcaactaacaaattcaaaggttattttggaactaatttcgatatgcaaatgtcaaaagattgggatcaaacttacccaattagtaaatttgttacagaaattcaacaactcaaaccttatcaacttgatggtgtctttatcacagtagaaattcaacctttgcgtgagcaacgtttagcttttgaggctaatacattgacaacaaatgatttacaatttacaaccttacctgatttgacttctttagcccaattagttaacctttgtgaaactgagtctattccaatcatgggattgaaaatacataataactggtcaaatactcaatgggctaaatttgataagaccatttggtttagtaagtatcgtgcaacaattgaccaaattattgccattgctccaacagaaaaaattggtgttttaaatgaatctgatactatttggcgtgattctgctagtgaagcaaatattatcgatttaatgaattatcttaaaggaactggtaaaaaagtaacattagagggttcatggagtccattaactttatctaaaccacttcaaaatgctatggattattttgctattcatgcatatccttcattatcatcaaaacgtgaacgtacaactttttcagattgtttgatgggttggtctgtttctaatatgattgataatttacgcaaaattaaatttacttatccagataaagaaatctggataacagaaacaggtgtacaaaatctttgggaagctttaagagctcctgaagactattatacaccagaagataacactccatcagctgacaatttggttcaaacactttattttgattcaatgtttcaatattttggttctgatgaattagtctcaggagtttttatgtggtactttgactcaaactattcacttctttttgaaaaaatgcttcgtaaatacagagaaggaacatttcatgcttaa

SEQ ID NO: 2598 - DNA, 831 bp, Artificial Sequence
  Optimized genes for Lactococcus lactis
atgcttaataattacgtaaaaattaatggtgatattgattgggttaatattgattatgcaactcatgctgctgcactttttcgtgtacgtcttgatgaaaaaaaagctttttatacattccttggttctaaaggagttgttgtagttcgtttacttcgtacaagttcttatgaaaattattataatgatatcatgattcgtttctcatcacttgacccaacaactaaaactccaaatatctcagtttacgatttaaataaagataaaatgtttggttatacttacgcaatcaaagttatgtcagatggctatgcctatttttatgttaaaggttcaaacaaatatgattcatttaaatatcaacttgtttatgcttcaaatccaagttatattgaagctttgggaacttcagctgatgttattactgttgcagattttgattcttctactaatgctgttgcttattataaaccatcaagtcaaacttttaatgttcctacaattacaatgggatatggtcaaaattcaactgatattaaaacacaaccattgactgctatcaatcatggaaattatattcaattggttggttacattttagtttggtcaggtttgacaaatcaaacagtttttacagtaaatagttcaaaacctaatcgtgctcatacattttttgttgatgtcatgggtagtgctgacatttctaatacagctggtactttgcgtgttccaatgactatcgaaaaagatggtacagcatcaattaatttaggaacaaccatttcaacaacacgtttgatttatatcgatactacttatcgttttttatag

SEQ ID NO: 2599 - DNA, 171 bp, Artificial Sequence
  Optimized genes for Lactococcus lactis
atgctttattataaatgtttgcgtttagtttcaagacgtcgttttggttcacttgctcaacttgaagctaatcgttcagttgctggttcttcaccagctcgtacaattaataaatggcgtgttaaaaaacgtggtggaaatttagcaaattcatttattatcatgttttaa

SEQ ID NO: 2600 - DNA, 396 bp, Artificial Sequence
  Optimized genes for Lactococcus lactis
atgaaacgtccagttgaaattgtacaagatattattgctgcttcagattttccacatgatgaaattttccttgattcaattccatcagaaaaattagattcttctaatgaaacacaagttcttttgacagaatctgataatggtccaagtgattatggaaattcagacttcatttcattgatgtatggtgtttatattcaaattttttattcaaatgctgaagatagtggaattaatattgttcaaagtgaaatcaatttaatgaaatcttttattaataatgattggttaattgctcaatcaaaatcacattatattgatccagatactggtcaaatcattaaaaatttgactgttcaacgtatcatgactttatctgaaattgcaaatagttaa

SEQ ID NO: 2601 - DNA, 507 bp, Artificial Sequence
  Optimized genes for Lactococcus lactis
atggtttcattttatgatgctatgcaacttatcgttgatcgtgcagaagaactttcaactaaaatgtcagttgaagataaagcagaagtaacaaaggctggtgctaaagtttttgaacaagcacttgcttatgaagttcgtaatcgtcattatcgtcaccgtgatactggtgaagacccacatttagctgattcaattgttatgaaaaataaaaacattgatggagttaaagatggtcaatctgttgttggttgggaacgttcaacagaaaaaggaactcatacaaaaggttatattgctaatattatcaataatggttcacgttttccacaatttacaactcgttctggtcgtaaatataaaaaaccaggagaagttgctgttcatgctgaccattttattgaagaaacaagaaaaaatccaattgttcaacaaggaattttaaaagctgaagctgaagcaatgcgtaaaattattaatcgaaagaaaaaagaatcaaatttatag

SEQ ID NO: 2602 - DNA, 423 bp, Artificial Sequence
  Optimized genes for Lactococcus lactis
atggctgataaacttgaccgtattatcggtgattatgttaatggtcgtttagaagctcgtatcaaatcaattgaatcacgttatctttataaacaaaaagttgataatttaggaaatcgtacagcttattcaggtggttctgaacaactttcacatgttttaaataaagaagcacttgaaaatgatgaagaatatattaaattaaaagatttaatgtatcaattttcactttggtatgaaccacttataaaagaagaaaaagaaattattaaattgaaacattgtggatatggtggatttacttggtaccgtgttatgatggaacttgataatgaaggaattgagatttcagaaaaaaaagctaaatttatttattatcgttttagaaaagatattaatccacatattggttattttatctaa

SEQ ID NO: 2603 - DNA, 360 bp, Artificial Sequence
  Optimized genes for Lactococcus lactis
atgattactgcaattgctcaaattatgacttctatttcaatcatcattttacttgttttgattgtttttacaaataaaagattagcacaacttgaagtaaaaattgaacgttgccgtgatttatataatggaattgacttagttccacttcgtgttaaaattaattatttggaaggttcaattaaagcactttacaaatataaagttctttttaaacgtggttggtggtcacgtgaaggagaacttcaagaagaatatttttttactaaaaaacaagctgataaatttattgattcaaataatttaaaagaagttgttattattcgtttagaagataatgaaacagaaattgtcaaataa

SEQ ID NO: 2604 - DNA, 360 bp, Artificial Sequence
  Optimized genes for Lactococcus lactis
atgacaaatctttatgatgaaactgttactattttagaatcacatgataaaacaattgctgatattgaatatattggaagttctgaaacaaaaattaatacaaataaagctttggaattaatgaaaaaaactaattatcattcaggttatggtggtcaagaaatcgctgaaaatttgatgattaaaggaaatggttttatcatgactcgtggtgaatacgatggttcagaatggtgggattatatgcaaacagatccaagtttaccacaagttgaacgtgaagttaaatcatttaaagcaaatattggttgggaaagtcttgaagaaattaatggacttgaagatactaaaaatgattaa

SEQ ID NO: 2605 - DNA, 927 bp, Artificial Sequence
  Optimized genes for Lactococcus lactis
atgaaatttaaaaaacttggtttagttatgactactgtttttgctggtgctgctttggtaacactttcaggttgttcatcaagtgattcagcaagcaaagatattattacaatgaaaggtgatacaattcgtgtttcagatttatataaagaagcaaaacaattcccaagtcaaccaacaaatacattattacaaaatttaacttttgataaaatttttacaaaagattttggtaaagaagtaactgacaaagatgtcagtaagaaagtaaaatcaattaaagaccaatatggttcacaattttcatctgctcttcaacaacaaggacttacagaagcttcatttacgccttatatgcgtacacaaatgcttgaacaagcagcaattgatcatgaaattaaggaaacacagtatacagatgctaatcttaagaaggcttgggaatcttatcatccagatgtgactgcttatgttgttagtgaaacttctaaagatgctgcaactaaagctttagatgcggccaaaaaggatgatgcaggaaaagcaagttttgaaaaaactaatgctgaatcaaaagttacttttaattcaacaagtacttcagttccaactgaagttcaaacagcagctttcaaattaaaaaatggtgaattttctgatgttattgaaagtacatcttcttcaactggtgcaacaagctattatattgttgaaatggttaaaacatcagaaaaaggaactgatatgaataaatacaaaaaagaattgcaaaacgttatcaaaacagaaaaagagcaagatactacatttgtttctggtgtaattgctaaatatcttaaaaaaaataatgttacagtcaaagaatcagcttttgcatcactttttagccaatttactcaaactagttctagttcaagtagtaaataa

SEQ ID NO: 2606 - DNA, 789 bp, Artificial Sequence
  Optimized genes for Lactococcus lactis
atgaccaaacgtatttattctgttccttattttttgtggattttattttttgttattgttccacttgcaatgcttctttggcaatcattctttgatttgaatggacattttacattaaacaattatatcctttatttctcatcaggaacttatcttttgatgacttggaattctattttatatgctttaatcattactgttgcaacacttgttatcagttatccagttgcttatgttcttactaaattaaaaatgaaacaattttggttaatgttgattattttgccaacatgggttaaccttttattgaaagcttacgcttttattggaatttttggtaaatatggttcagttaataattttcttcaattccttggtatcggtcgtacacaaattcttttcactgacctttcatttatcttagttgcttcttatatttcaattcctttcatggttttaccaatttttaatgcattaaatgatttagatgataatttagtaaatgcttcagctgatttaggagcatcacgttttcaaacttttactcaagttatttggccattatctcttaatggtgttcgtgctggtgttcaagcagtttttattccaagtttatcactttttatgttaactcgtttaattggtggaaataaagttattacattgggaacagctgttgaagaacattttttaacaactcaaaattggggaatgggatcaacaattgctgttgttttggtagttgcgatgcttttggttatgcgtatgacaaaagaacgtcgtgattaa

SEQ ID NO: 2607 - DNA, 1068 bp, Artificial Sequence
  Optimized genes for Lactococcus lactis
atgaaaaaactttcttatttttttgttggtattttaattattactgcttcacttggattgattacaaatcgtatgaaagctgctgatggtgtaaaaacacaaaataattctttgacaatttttaattggggtgaatatattgatcctgatttgatttcaaaatttcaaaaagaaacaggttacaaagtaaattacatgacttttgattcaaatgaagcaatgtattcaaaagttaaacaaggtggaacagcttacgatttaattgttccatcagattatatgattgaaaaaatggcaaaagaaaatcttttgatcaaattggatcatagtaaaattaaaggacttaaagatgatgaccctaaattacttaatccagcatttgaccaaggaaatcaatattctgttccttacttttggggaactttaggaatcgtttataactctaaaacagttactcgtccacctaaaacttggaatgatatctggtcaccaacttataaaaattcaattttgttgactgatagtgttcgtgatgttatggctatggttctttcaaaacatggttatagtttaaatacaacaaaccaaaaagaacttgatattgcttatcaagatttattaaaactgacaccaaatgttaaagcaattcttggtgatgaaattatgaattatatgattaacaatgaaactccattggctgttgtttactcaggtcaagttgctgaaatgacatcagaaaataaaaacttgaaatatgttattcctgaacgtacaaatatttggtatgataaccttgctattccaaagacagccaaaaatgtcaaagctgcctatgcttttattaattttatgcaagaaccaaaaaatgctgcacaaaacgctcaatggattggatatgcaacacctaatttaaaggctaaagcacttttaccaaaagagattcgtgataataaatcattttatccagatgaagctactataaaagatgatgaggcttataaaaatttgaatccttattggacaggaatttataatgacctttatcttgaatttaaaatgaacaaataa

SEQ ID NO: 2608 - DNA, 591 bp, Artificial Sequence
  Optimized genes for Lactococcus lactis
atgacttatcctcaattagaacttgaaaattataaaggaactacagcaattattaatacaaatcatggtaaaatgacagtaaaactttttgataatcttgctcctaaaacagttaaaaattttatcgaattatcaaaagaaggttattatgatggtgtcatttttcatcgtattattaaagattttatggttcaaggaggtgatccaacaggtacaggaatgggtggaagttcaatttatggtgaaaaatttgaagatgaattttcaatggatttatttaatttacgtggtgcattatctatggcaaatgctggtccaaatactaatggttcacaattttttattgttcaaaataaaaatttgccttatccaaaagattcattgattcaaggtggttggccagaagaagttgctgaaacatatactggtggaggaacaccacatcttgatggacgtcatactgtttttggtcaacttgttgacgaagaaagttacaaagttttagatgaaattgctgctgttcgtgttggtgctcaagataaaccagttgatgatgttgttattgaatcagttgaaatcattgaaccttaa

SEQ ID NO: 2609 - DNA, 1074 bp, Artificial Sequence
  Optimized genes for Lactococcus lactis
atgtttgaccaattagaatcaattgttggtcgttatgaagaattaggagaactcttatctgaccctgaagttgtttcagatactaaacgttttatggaactttcacgtgaagaagctgatttacgtgataaagttgctacttacaatgaatataagaaagttcttgaaacaatttctgatagtgaagagatgcttggtgaaggtggacttgatgatgatatgaaagaaatgttgaaagaggaattgtcatcagctaaaagtcaaaaagaacttttggaagaagaaattaaaattttattacttccaaaagacccaaatgatggtaaaaatattattcttgaaattcgtggagcagctggtggtgatgaggctgctctttttgctggagatttgttgaatatgtatcaacatttttcagaatctcaaggttggaaatttgaaatcatggaagcaaatatcactggtatcggtggttataaagaagtttctgctttgatttcaggaccatcagtttattcaaaattaaaatatgaaagtggtgctcatcgcgttcaacgtgttccagttacagaaactcaaggacgtgtgcatacatcaacagctacagttttagttatgccagaagtagaagaatttgaaatgactattgaccaaaaagatcttcgtgttgatatttatcatgcttcaggtgcaggaggtcaaaatgttaacaaagtagcaacagcagttcgtatggttcatttaccaacaggaattaaggttgaaatgcaagaagaaagaacacaacagaaaaatcgtgacaaagcaatcaaacttcttaatacaaaggtttttgattattatcaacaaattgaattagataaacaaaatgctgaacgtaaatcaactgttggaacaggtgaccgttctgaacgtatccgtacttataattttccacaaaaccgtgtaacagatcatcgtattggtttgactttacaaaaattggattcaatcctttctggaaaaatggatgaagtcattgatgctttaattgtctatgatcaaacaaaaaaactcgaagaattaaataaataa

SEQ ID NO: 2610 - DNA, 1851 bp, Artificial Sequence
  Optimized genes for Lactococcus lactis
atgaaacaaagtaaaatgcttattccaacattgagagaaatgccaagtgatgcacaagttatttcacatgcacttttgatgagagctggctatgtacgtcaagtttcagcaggtatctatgcttatttaccacttgctaatcgcgttttggaaaaactcaaaaatatcatgcgtgaagaatttgatgaaattggggctgttgaattattggctccatcattgttaacagcagatttatggcgtgaatctggtagatatgatacatatggtgaagatctttataaattgaaaaatcgtgataattctgattttattttaggaccaactcatgaagaaacaatgacttcactcgttcgagatgaaattacttcttacaaaaaacttcctttaaacgtttatcaaattgcacctaaattccgtgacgaaaaacgtccacgttacggtttattaagaggacgagaattcttaatgaaagacggttattcttatcatgctgaccaagattcattagatgaaacttataatgactataagaaagcatatgaaaaaatctttgaaagagcaggacttaatttcaaaccaattatcgctgatgctggtgcgatgggaggaaaagatagtcaagaattcatcgcaattacagatgatcgtatcaatttagagaaatggcttgtcctttctaaaaatatcacatcaattgaagaaattcctgaatcagttttatctgaaataaaagaagaattgggaaaatggttaattgctggagaagacacaattgtttacgctgaaggtggagattatgcagcaaatattgaaatggcttcttcacaatttgaaccaaatgttgcttatacagaagagcttgaacttgaaaaagtagcaacaccaggagctaaaactattgacgaagtttctaagtttttagaaattgatgaagaacaaacagttaaaacacttgtttatcacgctgatgatgaactcgttgttgttcttttaaatggaaatgatcaacttaacgaagtcaaactgacaaattatcttggagcaagttttatcgaagcagcttcagaagcagaagttgaagaaaaatttggtgctcattttggttcacttggtcctattggcttagaaaatgttaaaattattgccgatagaaaagttgagcaaattaaaaatgctgtagttggtgcaaatgtagatggttttcattataaaaacgctaattttggaagagattacgaagttgaagaatttgttgacttacgtactgttaatgaaggagaaatcagtccagatggacgtggaactttaaaatttgctcgtggtattgagattggacatatttttaaattaggtactcgttatactgaagctatgaatgcaaatattcttgatgccaatggtcgttctattccaatgttgatgggttgttatggaattggtgtatcacgtttgttgtcagctattttggaacaatttgcacgtatttatgttgaaaagactcctcgtgaggaatttaaattttcttggtcaatcaactttccaaaagaattagcaccatttgatattcatttggttcctgttaacgtaaaagatgaagctgcaatggaattgacaagtgaacttgaagaaaaacttcgtggtaaaggttaccaagtattagttgatgaccgtaatgaacgtgctggtgttaaatttgctgactcagatttgattggtttgccagttcgtgttacaatcggtaaaaaagctgctgaaggcgttgtagaagtaaaaattcgtgcaactggtgaagtggtcgaaattaataaagatgagttagtaaatacaattgaaatcctttcaaaataa

SEQ ID NO: 2611 - DNA, 591 bp, Artificial Sequence
  Optimized genes for Lactococcus lactis
atgactaaaaaaacagaaattaattttggaattgatagtaaacttgaaatccgtgatgcaaataaaaaagctggatttatcggtcaaattgctggttatgcaattgtttttaataagccaagtgttccaaatgctccatttattgaatatattgcaccaacagctttagataatgtagatttatctgatgttcttgctctttataatcatgattatgctaatgtccttggacgtgttgatgctggaactttgaaattatcaattgacaacattggtcttcattttgttttggatatgccagatacaactgttggtcatgacgtttataataatattaaagcaggaaatttaaaaggaatgtcatttggttttgtagttgctgatggtggagattcttggcaacaaggagtttctaaaccaattcgtacaattaatcaacttcaaacacttggtgaaatttcagttgtttcaaaacctgcttatgatgatacttcaatcaatgttacacgttcaataaaacaatttgaagatgaacgtactcgtaaatataaagaaaaagttcgtgcctatcttgatggactttcagattaa

SEQ ID NO: 2612 - DNA, 813 bp, Artificial Sequence
  Optimized genes for Lactococcus lactis
atggaatatggtgtattatcagttatcttggtcatcgttgttgcttttttggctggtttagaaggaatccttgaccaatggcaatttcatcaaccaatcattgcttgtagtttaattggaattgtcactggtcatgcatcagctgggattattcttggtggaagtcttcaacttatcgctttgggttgggcaaatgttggagctgcagttgcacctgatgctgctttagcttctattgctagttcaattttaatggttcaatcaaataattttgatttaactcatattatgggaacaattgttccagctgccattttacttgcaacagctggacttgttttgacaactttggttcgtatgctttcagtagttttagttcatcaagctgaccgtgcagctgaaaatggttcttattcaggtgttgaaatgtggcattttattgcattgatttgtcaaggattacgtattgcgattcctgctggcttattgcttgtcatttctccagatgcaattcaaaaagcattagcagcaattccaccagttattagtggtggtttggcggtaggtggaggaatggtagtagctgttggttatgcaatggttattaatttgatggcaactcgtgaagtttggccatttttctttttaggttttgctcttgctccaatttcagaacttacacttattgccacaggggttcttggagttgtgattgctattgtttatttaaatttacaagcaagtggaggttcaggaaatggaactgcttcatcatctggtgacccaattggtgatattttgaatgattattaa

SEQ ID NO: 2613 - DNA, 267 bp, Artificial Sequence
  Optimized genes for Lactococcus lactis
atggcttctaaagaatttcatattgttgttgaaactggaattcatgctcgtccagcaacacttttagttcatacagcttcaaaatttacttcagaaattactttagaatataaaggtaaatcagttaatttaaaatctatcatgggtgttatgtcacttggagttggtcaaggagcagatgttactatctcagcagaaggtgctgatgctgatgatgcaatttcaacaattgctgaaacaatgactaaagaaggacttgctgaataa

SEQ ID NO: 2614 - DNA, 1509 bp, Artificial Sequence
  Optimized genes for Lactococcus lactis
atgaataaacgtgttaaaattgtttctactttaggaccagctgttgaaattagaggaggaaaaaaatttggtgaatcaggttattggggagaaagccttgacgttgaagcttctgcaaaaaatattgctgcattaatagaagaaggagctaacgtttttcgtttcaatttttcacatggtgatcatcctgaacaaggagcaagaatggcaacagttcaccgtgctgaagagattgccggacataaagttggttttttacttgatacaaagggtccagaaatgagaactgaattatttgctgacggtgcagatgcgatttctgttgttactggagacaaattccgtgtggcgacaaaacaaggtttaaaatcaactcctgaacttatcgctttgaatgttgctggtggtttggatatttttgacgatgttgaaattggtcaaacaattttgattgatgatggcaaattgggattatctttgactggtaaagatgcagcaactcgtgaatttgaggtagaagcacaaaatgatggagtaattggaaagcaaaaaggtgttaatatccctaatactaaaattccttttccagcattggcagaacgtgatgacgctgatatccgttttggacttagtcaaccaggtggaattaactttattgcaattagttttgttcgtacagctaatgatgtcaaagaagttcgaagaatttgtgaagaaacaggtaatccacatgttcaacttcttgctaaaatcgaaaatcaacaagggattgaaaatttagatgaaatcattgaagctgctgatggtatcatgattgctcgtggtgacatgggaattgaagtgccatttgaaatggttcctgtttatcaaaaattaattatttctaaagttaacaaagcaggaaaaatagttgtaacagccactaatatgcttgaatcaatgacttataatcctcgtgcaacacgttcagaaatttcagatgtatttaatgcagttattgacggaactgatgctacaatgctttctggtgaatcagcaaatggtaaatatccaagagaaagtgttagaacaatggctactgtcaataaaaacgctcaaactatgttgaaagaatatggtcgtcttcatccagaacgttatgataaatctactgttacagaagttgtggcagcttcagttaaaaatgctgccgaagcaatggatattaaacttattgttgcacttactgaatctggaaatacagcacgtttgatttcaaaacatcgtccaaatgctgacattttagctattacttttgatgaaaaagtagagcgtggattgatgattaattggggtgtcattccaacaatgacagaaaaaccaagttcaacagatgatatgtttgaagtagctgaaaaagtcgctttagcatcaggcttagttgagtcaggagataatattattatcgttgctggagttccagttggaacaggacgtacaaatacaatgcgtattcgtactgtaaaataa

SEQ ID NO: 2615 - DNA, 399 bp, Artificial Sequence
  Optimized genes for Lactococcus lactis
atgaaaaaagaaggaattttaaattcagaattagctaaaatcgcagatgatttaggacatacagaccaagtttgtattggtgatttgggacttccagttccatcaggtgttaaaaaaattgatttagcacttactcgtggtaaaccaagttttcaagaagttcttgatatttatcttgaaaacattttagtagaaaaagtttatttggctgaagaaattaaagaaaataatccagaacaacttgcaattttgttgactaaactttcagctgatgttgaaattgtttttgtttcacatgaaacattaaaattgatgaatcatgaagtaaaagctgttgttcgtactggtgaaaatacaccttattcaaatattattcttcaatcaggagttgctctctaa

SEQ ID NO: 2616 - DNA, 669 bp, Artificial Sequence
  Optimized genes for Lactococcus lactis
atgactttagataatcatcattgtgttcaacttgttccattatttgaaaaactcgcagaacaagatttaactaaagtagaaaaaatcgttgagcataaaaagatcaaaaaaggtgaaatcattatttctcctgataaagaaccacttttagttattgttgctcaaggagctttgaaaatttcacaattgagtcaatcaggtaaagagcaattattacgtattattgaagctggtgattatgaaggagaaggtgctttacttggtgttacaaatggacaactttatggtcaagctatgattgattctactatttgttttttgagacaatctgattttgagacacttttgacaacttatccaagtttatcacttcaactccttaaattgaatgctaaaaaatatcttgctgctgaacatcaagcaggttttttagcacttgatgatgttgaagcacgtttggctcattatttcttaaatctttcagcaacttcagattcaatttattttgaaattccaatgaaattaaaagaacttgcaaattatattggtacaagtccagaaacaattagtcgtaaaataaaagtttttgaagaaaataaaattatctcacgtcaaggtcgtatgattaaacttcttgacaaagaaaaacttgaagatgactttgcttaa

SEQ ID NO: 2617 - DNA, 597 bp, Artificial Sequence
  Optimized genes for Lactococcus lactis
atgtattatccagaaccaattgcaagattgattgaatcatttagtaaattaccaggaattggtcaaaaaactgcaactcgtcttgctttttatactattggaatggaagatcaagatgtcaatgaatttgctaaaaatcttctttcagcaaaacgtgatttaagtttttgttcaatttgtggaaatttaacagaaagtgacccttgtgcaatctgtactgacccaacacgtgaccgtacaacaattttagttgttgaagaatctaaagatgttttagcgatggaaaaaattcgtgaataccgtggactttatcatgttcttcatggtacaatcagtccaatgaatggtatttcacctgatgaaattaatgttaaaacattaattacaagattgatggattcagaagtaaaagaagttattattgctacaaatgctacttctgatggtgaagcaacagcaatgtatcttgcacgtatgattaaaccagctggtatcaaagttactcgtttggctcgtggtttagctgttggttcagatattgaatatgctgatgaaattactttatcaaaagcagtagaaaatcgtttagaaatctaa

SEQ ID NO: 2618 - DNA, 975 bp, Artificial Sequence
  Optimized genes for Lactococcus lactis
atgcttgataagatttctgttgttgtaacttgtcataatcatgaagcatatattgagcaatgtttgcgttcagtctttgctcaaacttatcgtaacattgaattattagtttttaatgatggttcaactgaccaatcaggtcaagtcattgaaaaaattttaaaggaaagtccattttcagaaactttttattttagtgaagaaaatcgtggaattgtttcaattcgtaatgatgctttgacaaaaataaaaggtgattttttactttttgttgattcagataattatttagatgaccaatatatcgaaatacttcatcaaagtttacaagaacaaaatgttgacattgcttattgtcaactttgggattttgtaaattcacgtcaagttcttcgtgatgatttagaattttctttggataaagaacttgaaggaaatttaattgatatgtcatcacttgttcgtgtatcaaaaatccttaatgtccgttttgatgaacaattaaaccataaagctttagaagattatgacttttggttatcattgattcttattaatcatgcaaaaccaatttttgttaaaggaatcaaattaaattaccgtgttttgaatacaagtcgtacagaacgtggtaattgggataaatattatgattcttatttctatttgcttgagaaacaccaaacacttttgccaaaagaagttttaaaagcaagtcaagcaaatgtaaaaatttggcttaaatcatatcttgaatctgatcaacaattgactgaaaatattttgaaaattaaagaaaaagataaacatatttcaaatcttcaacgtgaaatcgaccttttaaaatctcttcttgctgctaaagaagacgaaattgacaaaactaaagctgaattggaagaaaaaaaacaagaaattgatattattaaaaattctaaaagttataaatttttgcaaaaacttaaagggaattaa

SEQ ID NO: 2619 - DNA, 1644 bp, Artificial Sequence
  Optimized genes for Lactococcus lactis
atgaaattttcagaattaggattatctgaaggaattgttaatacacttactgaaattggttatgaacaaccaacaccaattcaagagcaaacaattaaacttgcacttgaaggccgtgatgtccttggacaagctcaaacgggtactggtaaaacagcagcttttggtttaccaactatcgaaaaaattgatgcttcaaatccagcaatccaagctttggttattgcaccaacacgtgaacttgctgttcaaggtcaagaagaattatttagatttggtaaaagtaaaggattaaaagttcgtactgttttcggtggaagttcaattgagaagcaaattaaaggacttaaagctggtgctcatattgttgttggaactcctggtcgtttagttgatttaattaagcgaaaagcgattaaactcgaccaacttgaaacattgattcttgatgaagctgacgaaatgcttaatatgggttttttagaagatattcattttattattgaaaaaacgccagaagcacgtcaaactttgcttttttctgcaacaatgccaaatgatatcaaaaagattggagtaaaatttatgaaaaatcctgaacatatcaaaattgctgccaaagagatgacagctgataggatagatcaatattttgtcaaaacaaaagaatttgaaaaattcgatgtgttaactcgtcttttagatgttgaacgcccagaattggctatcgtttttggaagaacaaaacgccgtgtagatgaacttattcgtggtttgaaattgcgtggttaccgtgctgaaggaatgcacggtgaccttgaccaaaataaacgtttggcagttcttcgtgattttaaagcaggtcatattgatgttttggttgcaactgatgtagctgctcgtggcttggacgtttcaggtgtaactcatgtttataattatgatattactcaagatcaagaatcttatgttcatcgtatcggacgtacaggtcgtgcaggaaaatctggtcgctcagttacttttgtttcttacaatgaaatgggatatcttcgagcaattgaaaatatgactaaaaaaccaatgaagggattgaagccaccaaccaaagaagaggcttatcaagcatcactttcagtagcaatggatgatgttttacgtgatttgtcagatgattctgctaaagctaaattagcaaaatttgacaaacaagcagcaagtttattggaaaagtttgatgcaaaagaacttgttgctttattacttcaagggcgtgttaaagatccagataatcaagaagaagttaaaatcactgcagaacgtccacttccttataatggtgaaggtaaaggtttcaaaaaaaaagggaaaggtgggggaggacgttataaaggcagaggaaacggtgatcgagatggtaatcgaggtggttatcgtggaaatcgtgatggaaaagatggcgatcgtggtggtgatagaaaacgtaattggaaagaccgtgacgataaccgtggtggctatcgaggcaaaagagatgaccgtcgttttgatgatcgcaaacaaggagaaaaaactccacgtaaacgaacaacaggaacagaaaaatcagctggatttgttatgcgttcacgtggagataaataa

SEQ ID NO: 2620 - DNA, 1038 bp, Artificial Sequence
  Optimized genes for Lactococcus lactis
atgtcattaccactttatcaacaaatttctgatgatttaaagcaaaaaattgttactaaaacatttaaatctggtgaccaacttccaacagaaaaagagttatcagaaacatattcagtatcaagaattacagcaaaaagagctttgactgagcttgagcaattaggacttgtttctcgtacacgtggtaaaggaacttttgttcaagaattaaataaaaatcatacaaaacttttaaaacgtgttttatttatcattccatttgaaggtatgagttttggtgattttactcaaggtttggtaccagctttgaaagttgaaaatactactgtttttattacttatgaatcttatttgaaagaaaatacagctgatgatatcaaagaaaactttgatggtttaatttattatccaatgtatactgaagattatcttgacattttattagaactttcattgcaaaattttccagttgttttgttggataaacaaatctatgatttgggatttccttgtgtttcatcagataattttaatggtggagaacaagcggcacaagctttattgaatcttggtcataaacgaattgcttttgtagcttcaaatgatactcatcatccacaaacgactcgtaatcgttatttaggttatgttaaagtacttaaagaacaaggaattaaatttcatactacattagatgactcactttacactgaaagttcagttcttgaacttattcataatgaaaaagttacaggattgatttgtgaaaatgacttagttgctcttcaaacaatgaaaactttacaagattcacatttttctgttcctaatgatatttcaattattggttttgacgatattcaagcagcaagtttatctaatccaccattgacaactattgctcaagactttattggaatgggtcgtatcgctggtgaattgcttcttgattggattaaatcaggtcaaactccaaaagatgttaaggttccaattaatttaataaaacgtaaaacaacagaagaattaaaataa

SEQ ID NO: 2621 - DNA, 774 bp, Artificial Sequence
  Optimized genes for Lactococcus lactis
atgtcacaagatttaagtcaaaaaaataaaccatatttaactaaagtaaaaaaaatgcgtatcaacaaatatttggctcatgctggagttgcatcacgtcgtaaagctgaagaattaattttagctggtaaagttactgttaataatgttccaatgactaatttaggttatcaagtatcaactggtgatattgttgaagtaaatggtgtagctgtttataatgaagaaccagtctattatcttttaaataaacctcgtggatatatttcatcagtttcagatgataaaggacgtcaaacagttatggatttgatgccacaagtcaaagaacgtatttatccagttggtcgtttagattgggatacttctggtttattacttttgacaaatgatggagaatttacaaatatgatgactcatccacgtcatggtgttgataaagtttatgttgctaaagtagaaggtcaagcaaataaggaaaatcttcgtccacttactttaggaatgacaattgaaggaaaaaaggtaagtccagctcgttatgaaattattaaacaagaaaaaacaaaaaatcattcaattgtcagtttgactattcatgaagggcaaaatcatcaagttaaaaaaatgtttgctgcagcaggacttcctgttcaaaaattatcaagaattcaatatggttcacttacacttgatggtttgccaacaggacaatttagacgtttgtcaaaaaaagaagtttctcaacttattaatgctgctcaaggaaattaa

SEQ ID NO: 2622 - DNA, 465 bp, Artificial Sequence
  Optimized genes for Lactococcus lactis
atggattctaataaagctgctgaagtttttttgacaactgttattaaacgtggtaaagcagaaatgatgcaccgttttaatacttattcacaaggtgaacatttagttcttggttatctttataaagaggctggaaaacaaattgttccatcaaaaattgctaaatttactcatacatcaacagcaagaattgcaacaattttaaataatcttgaatctaaaaatttggttactcgtgaaatttcacgtacagaccgtcgtaaaatccttgttgcaattactgacaaaggtcgtcatgttgctgaggaaattcgtgttgaagcttgttcaaatttagctcgtgtctttgaagaaatgggagaagaacgtactgaatcatttattgaaaattttaaactttttttagaaatcggaatgaaattagcaaaagaagataaagaaaaagaagaagaaaaaaatgcttaa

SEQ ID NO: 2623 - DNA, 405 bp, Artificial Sequence
  Optimized genes for Lactococcus lactis
atgaatatcaaaaaagctgctgaactttcaggaattaaaacagataatattcgttattatgaaagaattggtttgattccaaaaattactcgtacagaatcaggtatccgtaattttactgaagcaaatattagaactttaaaatttgttaaacatatgcgtgatgctggtgttcaagttgaaccacttacaagatatatggcacttgttaatgaaggaaatccagaaactaaagaagaacgtatcgaaattttgaaaaatcaagtagaacaacttcgtactgagattattgaaaaacaatcagctttagattatttgacttttaaaattgaaaattatgatgaagttatgcttccaaatgaaattaatttaaatcaaagttcaaaagaaacaattaaaatctaa

SEQ ID NO: 2624 - DNA, 900 bp, Artificial Sequence
  Optimized genes for Lactococcus lactis
atgattttaattactggtggaaatggtcaacttggaactgaacttcgtcatcttttggatgaacgtggaatggcatatacagcaactgatgcgaaagaacttgatattacagacggtgtagcggttgataaattctttgacgaaaataaaccagaattggtttaccattgtgcagcttatactgctgttgacaaagctgaagatgaaggacgtgaattagatgaaaaaattaatgtagatggtacaaaaaatgttgctgaagccgctgctcgtgttggtgcaacacttgtttatatctcaacagattatgtttttggaggaacattaccaattggacaagaatggccagtcgatgctccaaaagcacctgaatcagaatatggaagaactaaacaccttggtgaagaagcagttgttgcatcaggtgttaaacattatattattcgtacagcttgggttttcggttcttatggtccaaattttgtatttacaatgcaaaatttagcgacacgttttcctgagttgactgttgtaaatgaccaacatggtcgtccaacatggactcgtactttagcagaatttatggtttatcttgtttctgaaaaggctgactttggtttttatcatttaacaaatgatgcagcaccaggtgaagatgttacttggtttgattttgctaaagaaattttgaaagatactgacgttttagttaagccagttgattcatcaaaatttccagctaaagcaaaacgtccttttaattcaactatgtcattagaaaaagccaaagctacaggatttgttattccaacttggcaagaagctcttgcttcaatgcttgaaaaaggtgatttaagagaaaataaagatggagtaaaaggagaaatcaacaaaaaataa

SEQ ID NO: 2625 - DNA, 696 bp, Artificial Sequence
  Optimized genes for Lactococcus lactis
atgcttaaacttcaaaaaaaattgaaaaatgactatggtcttgttttcaatgatgaagatttactaaaaactgcatttactcatagttcatttacaaatgaagagcgtcttccaaaaattgctaataacgaacgtttggaatttttgggagatgttgcactttctcttgtcatttcagattatctttatcgtacttatccagaaaaattagaaggtgaactttcaaaaatgcgttcatcaattgttagaactgaatcacttgcaaatttttcacgttcttgtggttttggtgagtttttacgtttaggacatggtgaagaaaaaatgggaggacgtgatcgtgaaacaacacttgaaaatttatttgaagcttttcttggtgctctttttattgatcaaggaatggatgaagttcgtaaatttattcaacacgttgttattccacatgtaaaaaatgatgattatgttaaagttatcgattacaaaacagaattgcaagaagtattacaaattggtggagaaactacaatttcttataaaattttaaaagaagaaggaccagctcatgatagaagttttgttgctgctgtttttaataatggtaaagaattaggtcgtggtttaggaaaatctaaaaaagtagctgaacaaaaagcagcagaaaatgctattaaaggtcaaaatcatgtttcttag

SEQ ID NO: 2626 - DNA, 879 bp, Artificial Sequence
  Optimized genes for Lactococcus lactis
atgaatatcgttttaaaacttgaaacaaaagaacgtcaacaacttgctgagaaatacaaatcttatgaacaagtttcaaaaaatccttatattactttttttgcaaaagttggaaaaacatcaatctcagtttatacaagtggtaaagtagtttttcaaggtaacgaagctgaaaaattagcatctgattttggtcatattgcccaagtcgttccacaaaaacaaacaaatttaattggaactgatgaagttggtaatggttcatattttggaggattgatggttacagcttcatttgtttctgaagaaaatttgaattttttgaaagaaattggtgtagctgattcaaagaaactgacagatgaaaaaatttgtcaaattgctccaaaattgattgaccgtattccacatgttgctttagttgttgaaccagctaagtacaatgaagtaattgcttctggttataatgctgttagtataaaagtcgctttgcataatcaagcaatttatcttttggaaaaacaattaggacataaaccagaaaatattgttattgatgcttttactacagaagcaaattataaaaaatatgttaataaagagcaaaatcatccattgactaaagttactttacttaccaaagcagaagatcaatttcttgcagttgcagtatcatcaattatttcacgttatttatttttagaaaaccttaaaaaattatctaaagaatcaggttttacacttccatcaggagctggaaatctttcagataaaattgcagcacaaattatcaaatcacaaggagttgatgcattaaatcaattggctaaacttcattttgctaatacacaaaaagctattaaaatcgctcaactctaa

SEQ ID NO: 2627 - DNA, 777 bp, Artificial Sequence
  Optimized genes for Lactococcus lactis
atgggacaaacaattaaggaaattaaagcaactttggctaaattgactgatttatcagcaaaagaattccttgaatacgaagctgatgaacgtgctggtgttcaagcagcattaaaatctagaaaaaaacaaattttagctgagcttgctgaagaagcacgtttggaacaaatgcttgaatttgaaaaagaactttatggtcaagaaattcaacttattgctggaattgatgaagttggtcgtggaccacttgcaggtccagttgttactgctgcagttattcttcctaaaaattgtaaaattcgtggtttaaatgatagtaaaaaagttccaaaatcaaaacatcatgctattttgtcagaaatccaagaaaaagctttggcaattggaattggtatcgttgatgcagaaaagattgacgaagtaaatatttatgaagcaacaaaaatcgcaatgattcaagctgtttctaaattatctgttaaacctgaacaccttttgattgatgcgatggttcttgatttcccaattgctcaaactaaaattattcatggtgatgctcgttcagcttctattgcagctgcttcaattgttgctaaagtaacacgtgatgaaatgatgaaagaatttgctttagagtttccagaatatgattttgaacataatgctggttatggaacagctaagcatttagaagctcttaccaaatatgggattactcgtatccatcgtaaaagttatgaaccaatcaaaacaatggttaattttaaatcgtga

SEQ ID NO: 2628 - DNA, 354 bp, Artificial Sequence
  Optimized genes for Lactococcus lactis
atggcaattaaaaaaacttatcgtgttaaaagaagtaaagattttgatcaaattttttcagctaaacatagttttgctaataaaaaatttgttgtttataaattgaatacaaatcaaccacattttagagttggtttgtcagtttcaaaaaaattaggacatgcagttttacgtaatcgtatcaaacgtttgcttcgtcatgctatcgctgaatttaaaccttatcttacagatgaagatttcgttattattgctcgttcaggtgttgaaacactttcatttgaagaagttaagaaaaatttaaaacacgttttgaaactttctaaaatttatgttgatggtgaaaatgattaa

SEQ ID NO: 2629 - DNA, 381 bp, Artificial Sequence
  Optimized genes for Lactococcus lactis
atgtcaaatagaaaattaggtcgtacttcaagtcaacgtaaagcaatgcttcgtgatttaacaacagatttgattattaatgaaacaattgttacaactgaagctcgtgcaaaagaagttcgtagaacagttgaaaaaatgattactttgggtaaaaaaggagatttatcagcaagacgtgctgcagcagcttatgttagaaatgaaattgctattaaagattttaacgaagaaacagaaacttttccaacagctcttcaaaaactttttaatgatcttgctaaacgttatgaaggacgtaatggtggttatactcgtattttaaaagttgaaccacgtcgtggtgatgctgctccaatggcaatcattgaacttgtttaa

SEQ ID NO: 2630 - DNA, 360 bp, Artificial Sequence
  Optimized genes for Lactococcus lactis
atggcacgtgttaaaggaagtgttgctactcgtaaacgaagaaaaagaattttaaaattagcaaaaggttattatggtgctaaacataaactttttaaaacagcaaaagaacaagttatgaattcatactattatgctttccgtgaccgtcgtcaaaaaaaacgtgattttcgtaagctttggattgctcgtattaatgctgctgcaagaatgaatggtttatcttattcaaaattgatgcacggacttaaattagctgatattgaagttaatcgtaaaatgcttgctgacatcgcaattgcagatgcagcagcttttacagctttggctgaagaagctaaaaaagcacttgccaaataa

SEQ ID NO: 2631 - DNA, 348 bp, Artificial Sequence
  Optimized genes for Lactococcus lactis
atggctgaaattacttctgcaaaagcaactgctaaaactgttcgtgtttcaccaagaaaaacacgtttggttattgatttaattcgtggtaaacgagtagctgatgcaattgctattttaaaatttacaccaactaaagctgctgtagaagttgaaaatgttttaaattcagctatcgctaatgcagaaaataattttggtttagaaaaagcaaatttagttgtttctgaaacttttattaatgaaggaccaacaatgaaacgttttcgtccacgtgctaaaggttcagcaagtccaattaataaaagaacagctcatattacagttgtagttgctgaaaaagaataa

SEQ ID NO: 2632 - DNA, 246 bp, Artificial Sequence
  Optimized genes for Lactococcus lactis
atgaaacaaaatattcatccaaattatcaaccagttgtttttatggatacaacaactggttttaaatttttaacaggttcaacaaaaggttctaaagaaacagttgaatgggaagatggaaatacttatccattgattcgtgtagaaatttcatcagattcacatcctttttatacaggacgtcaaaaattccaagctgctgatggtcgtattgctcgttttgaaaaaaaatatggtaaacaataa

SEQ ID NO: 2633 - DNA, 135 bp, Artificial Sequence
  Optimized genes for Lactococcus lactis
atgaaacgtacttatcaaccacataaaaaatcacgtaaaacaactcatggttttcgttcaagaatggcaacaaaaaatggtcgtcgtgttcttgctgctcgtagaagaaaaggacgtgcttcattgactgtttaa

SEQ ID NO: 2634 - DNA, 117 bp, Artificial Sequence
  Optimized genes for Lactococcus lactis
atgaaagttcgtccaagtgttaaaccaatttgtgaatattgtaaagtaattcgtcgtaatggtcgtgttatggttatctgtcctgctaatccaaaacataaacaacgtcaaggttaa

SEQ ID NO: 2635 - DNA, 939 bp, Artificial Sequence
  Optimized genes for Lactococcus lactis
atgattgagtttgaaaaaccaaaaattactaaatttgatgaatcagaaaactatggaaaatttgtagttgaacctcttgaacgtggttatggtacaactttgggaaattcacttcgtcgtgttttactttcaagtttaccaggtgctgctgttacttctattcaaattgaaggtgttcaacatgaatttgctaccattccaggagttcgtgaagatgttattcaaatcgttcttgctgtgaaaggtattgctatcaaatcatacgttgaaagtgaaaaacaaattgaacttgatgtaacaggaccaatggacgttacagctggtgatattttaacagattctgatatcgaaattgttaacaaagaccattatttattttctatcgctgaaggacattcaatgcgtgcagttatgactgttaagaaaggatacggatatgttccagatgatgaaaataaagtggatggtgcaccaattggaactattgcagtagattcaatttatacaccagtttctaaagttaattatcaagttgaaccagctcgtgttggtggagatagttcttatgataaacttacattagaaatcacaacaaatggaacaattgtttcagatgaggcactttctttgtcagctaaaatcttgactgatcatttaaatctttttgttgatttaagcgaagtagcagcagaagctgaaactttagttgttaaagatgaagtcaaaacagaacgcgttttggacaaaattattgaagaaatggatttttcagttagagcttataatggtttaaaacgtgctggaattaatacagttgctgatattgtcgaaatgtctgaagcagatatgattaaagtaaaaaatttaggtcataaatctgtagaagaagttaaagttaaattaactgaattaggacttagtttgaaaaaaagaaaataa

SEQ ID NO: 2636 - DNA, 564 bp, Artificial Sequence
  Optimized genes for Lactococcus lactis
atgaaaattactgctttagaaggtcaaaaaatctcagaattgtcaatgattgaagtagctcatgctttgttggaacaaaatggtaaagaaatgcaattttctgaaattattcgtgcaattcaagattatcttgaaaaatcagatgacgagattaaagcttcaatttcacgtttttatactgaaattaatactgatggttcatttattccacttggaaataatatttgggcacttcgttcttggtatgctattgatgaaatagatgaagaagtgattgctcttgatgaaatcgaagacgaagaagaggaaaaaccagctaaaaaacgtaaaaaagttaatgcttttggaattgaagatgaaattgacccagaagatgaagaaggaactaaagaaacaacagaagaagatatgtcttatgacacacaagcagaagatgaagataaagatgatgttgctgcttatgatgctgaacttgctgaagttgaattagataatgttgacgaagaagttgatattgatgtagaagacgatgaagatgattctgatgatacagatgaggattaa

SEQ ID NO: 2637 - DNA, 1227 bp, Artificial Sequence
  Optimized genes for Lactococcus lactis
atgaatgaatttgaaacacttttaaattcagttgaagatgttaaagtacgtgatgtggttaaaggtgaaattttatctgttgaaaatggacaagcaactgttgctattgttggaactggtgtagaaggagttttgactttgcgtgaaatcacaaatgataaagatgctgacattaatacttttgtgaaacccggtgatgtccttgatttattagttatcaaacaaatcgttggtaaagaagccgaaggtgcaaatgtttatcttttgagtttgaaaagattggaagcaagaaaagcttggacacaattagaaggaaaagaaggtgaaattgttacagtcaaagtgactaaagacgttaaaggaggattaagtgttgattataatggtgttcgtggttttattccagcttcaatgattgatacttattttgttaaagatacaaaaaaatttgttggcgaagaaattgaggctaaaattattgaagttaatgcttctgaaaaccgttttatcttgtcacgtcgtgctgttgtagaagcagaagcaattgaaatgcgtaaagaagcttttgctcaacttcaagaaggcgatattgtcgaaggaacagtttctcgtgttactaattttggagcatttgtagatttaggtggaattgatggtttggttcacgtttcagaattatcacattcaagaataaaacgaccttcagatgcagttaaaccaggagatgttgttaatgtcaaaatcttaaaacttgacccagaagctggtcgtttgtctctttcattaaaggcaacacaacctggtccttgggaacaagttgaagaaaaagctccagttggttcaacagttgagggtacagtaaaacgtttaactgattttggtgctttcgttgaactttatccaggtgtcgagggacttgttcatgttagtcaaatttcttgggaacgcgttgaaaatccaaaagatgttcttaaagtcggtcaagtagtcaatgtaaaagttttagatgtaaaacctgctgaagaacgtatttcactctcaattaaagcacttgaagaggcaccagctcgtccagcacgtaataatgataatgatggagaaaaacgtgaccgtaagccacgtgcacctcgtaaagcagcaaaaccaagttatgatttgcctgaaactcaagaaggattttcacttgctgattttttaggagaagactttgatatcaatgacctctaa

SEQ ID NO: 2638 - DNA, 294 bp, Artificial Sequence
  Optimized genes for Lactococcus lactis
atgactaaatatgaaattctttatattattcgtccaaatattgatgaagaagctaaagctgctttagttgaacgttttgatggtattttaactgataatggtgcagcaaatttagaatcaaaagattgggaaaaacgtaaacttgcttatgaaatcaatgattttcgtgaaggaatttatcatattgctacttttgaagctgaaacaacttctgaagcactttcagaatttgaccgtttggcaaaaattaatcttgatattttgcgtcatatgattgttaaagttgaggcttaa

SEQ ID NO: 2639 - DNA, 393 bp, Artificial Sequence
  Optimized genes for Lactococcus lactis
atggctcaagttcaatatgctggaactggtcgtcgtaaaaatgctgttgctcgtgttcgtttagttccaggaacaggtaaaattactgttaatggacgtgaagttgaatcttatattccacatgctgatatgcgtttggttattaatcaaccatttgctgctactcaaacagaaggttcatatgatactttagtaaatgttaatggtggtggagtttctggtcaagcaggagcaattcgtcatggaattgctcgtgctttacttcaagttgatccagattttcgttcagctttgaaaagagctggtcttttgactcgtgatgcacgtatggttgaacgtaagaaaccaggtttaaaaaaagctagaaaagcaagtcaattttcaaaacgttaa

SEQ ID NO: 2640 - DNA, 309 bp, Artificial Sequence
  Optimized genes for Lactococcus lactis
atggcaacaaaaaaaatccgtatccgtttaaaagcttatgaacatcgtattttagatgctgctgcagaaaaaattgttgaaacagctaaaagaacaaatgctgaagtttctggtccaattccacttccaactgaccgttcagtttatactgttattcgtgcaactcacaaatataaagattcacgtgaacaatttgaaatgcgtactcataaacgtttgattgatattattgaaccaacacaaaaaacagttgattctttgatgaaacttgatttaccatcaggtgttaatattgaaattaaattatag

SEQ ID NO: 2641 - DNA, 186 bp, Artificial Sequence
  Optimized genes for Lactococcus lactis
atggcaaaaaaatcaatggttgttaaaaatcaacgtcctgctaaattttcaactcaagcatatactcgttgtgaacgttgcggtcgtccacactcagtttatcgtaaatttaaactttgtcgaatttgtttgcgtgaacttgcttataaaggtcaacttccaggtgtaaaaaaagcttcttggtaa

SEQ ID NO: 2642 - DNA, 270 bp, Artificial Sequence
  Optimized genes for Lactococcus lactis
atggcaatttcaaaagaaaaaaaacaagaaattattgctcaatatgctcgtaaagaaggagatactggttcaccagaagttcaaattgcagttttgacttgggaaattaatcatttaaatgatcatattaaatcacataaaaaagaccatgcaacacaacgtggattgatgaaaaaaattggtcatcgtcgtaatttattaggttatcttcgtggtaaagatgttcagcgttatcgtgaattaattgcttcacttggtttaagacgttaa

SEQ ID NO: 2643 - DNA, 261 bp, Artificial Sequence
  Optimized genes for Lactococcus lactis
atggaacgtaaacaaagaaaagtttatcaaggacgtgttgtttctgacaaaatggataaaacaattactgttgtggttgaaacaaaacgtaatcatccagtttatggtaaaagaattaattattcaaaaaaatataaagctcatgatgaaaataattcagctaaaactggtgatattgttcgtatcatggaaactcgtccactttctaaagataaacattttcgtttagttgaaattgtcgaagaagctgttattatttga

SEQ ID NO: 2644 - DNA, 279 bp, Artificial Sequence
  Optimized genes for Lactococcus lactis
atgggacgttctttaaaaaaaggtccatttgttgatgaacatttgatgaaaaaagttgaagctcaagttaatgctgaacgtaaatcagttattaaaacttggtcacgtcgttcaacaatttttccaaattttgttggtttgactattgctgtttatgatggtagaaaacatgttccagtttatgttcaagaagatatggttggacataaacttggtgaatttgctccaacacgtacttatcgtggtcatgctgctgatgataaaaaaacaagaagatga

SEQ ID NO: 2645 - DNA, 177 bp, Artificial Sequence
  Optimized genes for Lactococcus lactis
atgtcaaaaacattagttcgtaaaaatgaatcacttgatgatgctttacgtcgttttaaacgttcagttactaaagctggtacacttcaagaacttcgtaaacgtgaacattatgaaaaaccaagtgttaaacgaaaaagaaaatcagaagctgctcgtaagagaaaaaaatattga

SEQ ID NO: 2646 - DNA, 1197 bp, Artificial Sequence
  Optimized genes for Lactococcus lactis
atgacttaccatattaaaactatcggaaacaatattgaccaaattgctttagatgaaattggagaaggttttttggtaaatcaagttagtgaagcagaatcagatgcttttatttgtcgagctcaaccatttcatgattatgaattttcaaaagccttattagcgattggtcgtgctggtgcaggtttcaataatattccaattgaaaagtgtgcaagtaagggaattgttgtttttaatgcaccaggtggaaatgccaatgctgttaaagaattagttttatcaatgatgatttttggaactcgtaatttaaaaccagcaaataaatggttaacaggacaaaaaggagatgataatactattgatggtgctgttgaacatggtaaaaaagcattttctggatctgaaatttctggtaaaacattgggtgttatcggtttaggtaatatcggttctaaagttgctaatgatgcacaacgtttaggaatgcgtgtgattggttatgatccatatttgtcaattgagcatgcttggaatctttcacaccatgtaaaacgtgtcaatgatttagctgaaatctttgaaaaagctgactatattacagttcatacaccagctactgacgaaacaacaaaaatgcttaactggaaaaatttgagtaaatgtaaaaaaggtgtcattttattgaattatgcacgtgatgagattactgataaagaagctgttttgaaagcaattgatgaaggcatcgttcgtttctttggtacagattttggctcagaaaaattttatcatcatccacaagtctttttaactccacatcttggtggttcaacagctgaggcttctttaaattgtacacgtatggcacttgattctgttcaaacttatcttaaaacaggtgaaattatcaattcagttaattttccacgtgttcttcaagaacttaatacaccttatcgtgttactttaattaacaaaaatgttccaaatgtagtagctcaaatttcattagcagttgcagctgaaaatattaatattgcaaatatagttaaccgtggtcaaggtgattatgcttatacacttttagatttggatgaaaaagatgaaggaaaacttgctgctttggtttctcgttttgaagcagcagataacattattcgtgtacgtttgattgaaaaccaatcacttgtttaa

SEQ ID NO: 2647 - DNA, 651 bp, Artificial Sequence
  Optimized genes for Lactococcus lactis
atggctgctaaaggacttttagttatggatgtcgattcaactttaattgaagaagaagtaattgatttgcttggtgaaaaagcaggaatgggagataagatttcagaaatcactgctgcagcaatgtcaggagaaattgacttcaaagaatcacttcgtgaacgtgttgctttattatctggtttaccaacaacaatttttgatgatgtttataaagagattcatttaactaaaggtgcaacaggtttgattgaaacacttcatgctaagggttggaaagtaggtcttgtttcaggtggttttcatgaaattgttgataaaattgcacgtgatttaaaaatagattatgtttttgctaaccgtttatcagttgaaaatggtcatttgactggtaaaactcatggtactgttgttgataaagattttaaagttgaccgtttgaaacaatgggcaaatgaaaataaattaaatctttctgaagttattgccgttggtgatggtgctaatgatattccaatgcttaatacagctggtattggaattgctttttgtgcaaaaccagctgttaaagctgcagtttcttatcatattgataaacgtaatttattgacagttcttgaatttgttgacaaacttgctgataaagaataa

SEQ ID NO: 2648 - DNA, 1098 bp, Artificial Sequence
  Optimized genes for Lactococcus lactis
atgatttataattttggtgcaggaccatcagttcttccaaaagaagttttaaaaaaagttcaagaagagcttttagactttgaaaaatcaggtatgtctgttatggaaatttcacaccgttcaaaagctttccaaaaagtaattgatgaagcagaaaatgatcttcgtgatttaatgagtattccacaaaattataaaattttgttccttcaaggaggagcaagttcacaattttcaatggttccaatgaatttagctattggtaaaaaagcctattataacatttctggtgcttttggtgaaaaagcatatgatgaagctgttaaattatcacattttcttgatttgatggcaatctcacttggttctacaaaaaaagataattacaatcatttacttaaaattgataaatctaaaatagatgagaaaaatggagcttatcttcatttgacaacaaataatacaattgaaggaacttcaatttttccagaaaatcttcctgaatttgcttctttaccacttgtagctgatatgtcatcaaatattttagcagttgattacgatgtttctaagtttggacttatctatgctggagctcaaaagaatttgggaattgctggtttgactattgttattattcgtgaagatttattaaatgaagccgaaagtttatcttctatgatggattatcaaattcttgttgagaatggttcaatgtataatactccaccaacttttgcaatttatgttgctggtttagtttttaaatgggttaaagcacaaggtggtgtaaagaaacttgaagaaatgaatcaacgtaaagcgcaacttctttatgacttgattgaccaatcagatttttatcaaaatccaattaaaaataaagacgaacgttctatttgtaatgttgtctttacttctccaagtcaagaattagatgaactttttacacaaaaagctgaagaaaaaggattcaaaagtttgaaaggtcatcgtagtgttggtggaatgcgtgcttcaatttacaatgcttttcctttagaaggtgttgttgaattggtaaaatttatgaaagaatttgaagaaggctacaaataa

SEQ ID NO: 2649 - DNA, 648 bp, Artificial Sequence
  Optimized genes for Lactococcus lactis
atgaaaaacaaaattttagatttacgtgcttattttatcgctggtccacaagattttccaaaactttcaattgatgatgcaattgacaaaatttctgtcattattaagtctggtgtaactgtttatcaatttcgtgataaaggaacaatttacaaaaataaaaatcaacgtttggaagtagctaaacgtcttcaagaagttgcacaaaaagcagcagttagttttattgttaatgatgatgttgaacttgctcgtgaattatcagcagatggaattcatgttggtcaagacgatgattctgtttcaaaaatcagagaattgattgggcaagaaatgtgggttggcttgtcagtttctaatgatatggaattagaaagtgctcaaaaatcaggtgctgattatcttggaattggtcctatttatcctacaaattctaaatctgatgctgctgaaccaattggtgttgatcatttaagaaaaatgcttgaacataatcaacttccaacagttggaatcggtggtattactgaaaattcattgactgagctttctaagattggacttggtggagttgctgttatttcattattgacagaatcagaaaattataaaaatatggttcaaaaaattaaacaaaatattcgttaa

SEQ ID NO: 2650 - DNA, 1176 bp, Artificial Sequence
  Optimized genes for Lactococcus lactis
atgactcaatttacaacagaattattgaattttttagctcaaaagcaagatattgatgaatttttccgtacatcacttgaaacagcaatgaatgatttacttcaagcggaactttcagcttttcttggttacgaaccatatgataaggttggttataattctggtaattcaagaaatggttcttattctagacaatttgaaactaaatacggaactgttcaactttctattccacgtgaccgtaatggaaatttttcaccagctttgttacctgcttacggtcgtcgtgatgatcatttagaagaaatggttatcaaactttatcaaacaggtgttacaactcgtgaaatctctgatattattgagcgtatgtatggtcatcattatagtccagcaacaatctcaaatatttctaaagctacacaagaaaatgttgctacttttcatgaacgttcattggaagcaaattattcagttttgtttttggatggtacttatttaccacttcgtcgtggtacagtttcaaaagaatgtattcacatcgctttaggaatcacaccagaaggacaaaaagcagttcttggatatgaaattgcaccaaacgaaaataatgcttcttggtcaactttgcttgataaattacaaaatcaaggaattcaacaagtttctcttgttgttactgatggatttaaaggacttgagcaaatcatttcacaagcttatccattggctaaacaacaacgttgtttgattcatatttcacgtaaccttgctagtaaagtaaaaagagctgatcgtgctgttattttagaacaattcaaaacaatttatcgtgcagaaaatttggaaatggcagtacaagcacttgaaaactttattgctgaatggaaaccaaaatatagaaaagttatggaatcattagagaatacagataatcttttgacattttatcagtttccttatcaaatttggcattcaatttactcaacaaatttaattgaatctttaaataaagaaattaaacgtcaaactaagaaaaaagttttatttccaaatgaagaagctcttgaacgttatcttgtaacactttttgaagattataactttaaacaaagtcaaagaattcataaaggttttggtcaatgtgctgacacattagaaagtctctttgattaa

SEQ ID NO: 2651 - DNA, 1029 bp, Artificial Sequence
  Optimized genes for Lactococcus lactis
atgaaaacacgtagtcatcaaatgaaaaatgaattggaaaaagttatgtcaggtcgtgatatgactgaaaacgaaatgaatatgcttgctaattcaattattcaaggagaattatcagaagttcagattgcttcttttttagttgctcttaaaatgaaaggtgaagctgcaagtgaacttacaggacttgcacgtgcattacaaaaagcagcaattccaattccaacaaatttgactaatgcaatggataattgtggaactggtggagatagaagtttttcatttaatatttcaacaactgcagcttttgttttggctgctggtggtgttaatatggctaaacatggaaatcgttcaatcacttcaaaatcaggttcagcagatgttcttgaagcacttggtattaatctttatcttccagctgaaaaattagcacaagtttttgataaggttggtcttgttttcctttttgctcaaaatctccatccagcgatgaaatattttacaccagttcgtcgtcaacttgaaatcccaactatcatgaatttaacaggtccacttatcaatcctattcctttagatactcaattacttggaacaagtcgtccagatttgttagagctgacagccaatgttttaaaaggattaggacgtaaacgtgctttggttattactggagaaggaggaatggatgaagcaactccatttggtttaaatcattatgctttattagaaaatgataaagtaactttgcacgaatttagagcttcagaagtaggaatttctgaagttcaattgaatgatattcgtggtggcgaagctccagaaaatgccgaaattttgaaaaatgtattagaaaatcaaccatcagctttcttggaaacaacagttcttaatgctggattgggtttttatgcaaatggtaaagttgattctattaaatctggtgtagatttagctcgtgaagtgatttcaactggtgctgccttgacaaaacttcatgaacttcaagcagaacaaattggttaa

SEQ ID NO: 2652 - DNA, 1188 bp, Artificial Sequence
  Optimized genes for Lactococcus lactis
atggctaaagaggtttatgatcgttcaaaaccacatgtaaatattggtacaattggacatgttgaccatggtaaaactactttatcagctgcgatttcaaaagttctttctgataaaggttattctaaagcaactgattttgcttcaattgatgcagcaccagaagaacgtgaacgcggaattaccattaatacagctcatatcgaatatgaaacagaaaaacgtcattatgctcacattgatgctcctggtcatgctgattatgttaaaaatatgattactggagctgctcaaatggacggtgcaattttggtagttgctgcaacagatggtccaatgcctcaaacacgtgaacatattttactttcacgtcaagttggagttaaatatttaattgtctttttaaataaagctgaccttgtagatgatgaagagttgatggaacttgttgaaatggaagttcgtgatttattgtcagaatacgactttccaggtgacgatattccagttattgctggttctgctttaggagcacttaatggtgaaccacaatgggttgcaaaagtagaagaattaatggatatcgttgatgaatatattcctactcctgaacgtgatactgacaaacctttacttttacctgttgaagatgttttttcaatcacaggtcgaggaactgttgcttctggtagaattgagcgtggtactgtcaaagttggtgatgaagtagaaattgttgggattaaagaagaaactaaaaaagcagttgttactggtattgaaatgtttagaaaaacattaactgaaggacttgctggagataacgtaggtgctttgcttcgtggaattcaacgtgacgaaattgaaagaggacaagtcattgcaaagccaggttcaattacacctcataaattatttgaaggagaagtttacgttttaagtaaagaagaaggtggacgtcatacaccattttttgataattatcgtccacaattttattttcatactacagatgtaacaggaagtgtaaaacttccagaaggcacagagatggttatgccaggagataatgttcatattgacgttgaattgattcatccagtagctattgaacaaggaacaactttttctattagagaaggtggtcgtacagttggctcaggaatcgtcgctgaaatcaaagcttaa

SEQ ID NO: 2653 - DNA, 1371 bp, Artificial Sequence
  Optimized genes for Lactococcus lactis
atgaaaaaaaaaattatttctgcgattttgatgtcaacagttgttttatcagcagcggcaccactttcaggtgtttatgcagatacaaattctgatattgcaaaacaagacgcaaccatttcatcagcacaaagtgctaaagctcaagcgcaagcccaagttgattcacttcaatcaaaagtcgattctttgcaacaaaaacaagcatcaactaaagcacaaatcgctaagattgaatctgaagcaaaagctttaaatgctcaaattgcaactttgaatgaatcaattgctgagcgtacaaaaacacttgaagctcaagctcgttcagcccaagtaaattcttctgcaactaattatatggatgctgtcgttaatagtaaatctttaactgatgttattcaaaaagtaactgctattgccactgtatcatctgctaataaacaaatgcttgagcaacaagaaaaagaacaaaaagaattaagtcaaaaaagtgaaactgttaagaaaaattataatcaatttgtttctctttctcaatcattagatagtcaagcacaagaattgacttcacagcaagctgaacttaaagttgctactttaaactatcaagctacgattgcgacagcacaagataaaaagcaaagcttacttgatgaaaaagccgcagcagaaaaagcagcccaagaagctgccaaaaaacaagcagcttatgaagcgcaacaaaaggaagccgctaaagcgcaagcagcaagtacagctgcaacaactaaggctgttgaagaagcaacatcaaccgtttcaagtagtcaggcttcacaatctagttcatcttcaagtaatacaagtagcaataatacttcttcaaactcaagcagttctagctctaactcttcatcatccaattcatcatcgtcatcaaatagttctaatgggggtggttcaacaaacactggtaacaataatgcagctggtacaggaaatacaggtggaagttcaagttcaggaattaatagcacaccaattgcaaatccttatgctggaggaggttgtacagattatgtttggcaatattttgctgctcaaggtatttatattcgtaatattatgcctggtaatggtggtcaatgggcaacaaatggtccagctcaaggagttcttcatgtagttggtgctgctccaggagtaattgctagtagtttttcagctgattttgtaggatatgccaattcaccatatggtcatgttgcaattgttaaatcagtcaattcaaatggaacaattactattaaagaaggaggttatggaactacttggtggggacatgaacgtactgtctcagcttctggtgtgacttttttaatgccaaattaa

SEQ ID NO: 2654 - DNA, 468 bp, Artificial Sequence
  Optimized genes for Lactococcus lactis
atggcaaaatttggttttttagatgttcttgaagaagtattagaaaaaggatttacttatgattttgaaatgaattgggataaacgtaattttgcagttgaagtttcatttttgcttgaggctgagaattcatcaggtgctttattgacagatgcagaaggagtagaatctgctgaaaatattgtttatgaagatgctgttttattttataatccagctaaatcacgttttgatgaaaatgattatcttgcaacaattccttatggtgaaaaaggtttatctcgtgaattccttgcttattttgctcaatttcttcaagaatcagctgaccaaggacttgatgatttgatggattttttagcagatgaagcagctgaagaattttcagttaactgggataaagaagcttttgaaaatggaattgctgatttatcagaaactgatttctataaatatccacgttattga

SEQ ID NO: 2655 - DNA, 300 bp, Artificial Sequence
  Optimized genes for Lactococcus lactis
atgatgaatatgcaatcaatgatgaaacaagctcaaaaattacaaaagcaaatgcaagtttctcaagaagaaattgctaatacaacttttgttggtaaatctgcacaagatttagtaacagttgaattttcaggtgaccgtacattaaaatcacttgatattaaaccagatgttattgatcctgaagatccagaaacacttcaagatatggttactgatgcagttaatgatgctttaagtcaaattgaaaaagttacagaacaaaaacttggaaaatttacaaaaggtttaccattttaa

SEQ ID NO: 2656 - DNA, 5952 bp, Artificial Sequence
  Optimized genes for Lactococcus lactis
atgaaaagtcgaaaaaaagttatctctattattcttggtcttatgcttttacttcaatatgttatcacacctgttggagctattgccggagcaatcaatgaagaaacaaatgattcagatataacactttctcaatttaagattgacgaatcagaatctaatgctgacttaatgacatttgatttatcacttaaaataaatcaaagtattttgaaatcaaaaacaaccatcattgaattggataagtctatcaaaattaatgaacctaatgaagctaatcgtcaaaaatcaacagccagttatactgcagatgaaaaccgtttaacaattgatttgaatagtttaaatacaggagaagttaaagtcaatttttcaattagtaaagaattattaaaaaattttgaacgtttgacagctaaattaaacgacagccaagtcgatgtacttttgcctaagacttcttcaacttcagaaacgcctagtcaatctacaagcacagtaacacaaaacactgttacaccagaaattaaagaaaaagaaagttcaacaactaaacatagtgaacaagcaataaaaaccgttgaatcacaagacattagaaaactcttagaggattctggaatttctcctgcaacaattatcgacagtgccaaagtcatttatttagacaaagagggaaaaccttatccagaccaaacagatgttccaattgatgctgaagttcaaattgattacacttggtcaattccagaagatattctaccactaaaatctggagattattttgattttaaattaccagatggtgttaccattgaacaagctacgtcttctttgggagactacggaacatataccattaatgcagacggtaccgtacgttttgtttttaacgaaaaagttgaaacctatcatgatattaaaggaacttttcattatgatgctcactttgacaaaactattgttcctggtgaagtggttgtggatactcctactgaagaaaattttccaccaagtgaaattcatgttcgtccaacttacgatcaagcaattgataaatctggtcattttgacaagacaccaaatccgtcagaagtaatttgggaaattaatattaatcgacctttgaacacaatggaaaatgcaacattaaccgacccaatgccagaggggactacttatgaatctgtagaaatttatcctgaaacagttggtaaaaatggagagattatttcaattgataaggaacatccattagtcaaaggaacagattatacagttgattctaacggaaaaattacctttattggtaaatatgctacaactgaccaagcttttaatgttgtttatacaacaacaatagatgagagtagttttcctgaaaaagaaggtgctgtatcattcaaaaatacagcaactctaaatgatggaaaaactgataccaacgaaagcgcaagcgttaccgcacaatataaaggtccaataaaaaaaaatggaccatttactacagggaatgaccaaatttacaactggaatatcgaatataattacaatgaaaagaatcataaagccggttctttcatagaagacacaatgtctgatgcaattgaactcgttaatggtagtgttaaactttacaaaattacttttgattctaatggaaaagaaataaaaggcgctcaattgaaagaaggagaagattataagttagtacaagaccctgataatccacaaaaatttaaaattgagtttattacagatattgattatgcagttaaagttgaatatcaaacaaaagtaaaagatattgttgacggaaatgtcacaattgataatagtgtgactacggatacaggtgataattcggaaagtggtggtaatgccactcaacaaggaattgttaaaaatattgacggcgatattgactatgaaaatcgtgaaattccttggaaaattgacataaatagcccaggatattggatggaaaattggtctcttgaagataaaatgtcagagggtttaactttcttagaaaatacttttcaaatcatcgacaaaacagctggaaataaggtccttagtccaacagaatacacattgattaaaacaacggcaggtttttctgtcagcttcaattctccacttaaagaaggaactgaccacaaataccaaattaaatataaaacaaaatttgatacatcagtcattgataatggttcaggacatgaaggtgacatcaaatttgttaatgatgcgtcaatgacttggaaggataaaaatggtggagatcatacaaataatgaccataaagaatttaaaccgattccacctttccaatataatggtcagaaatcgggaagctataacgcgacaagtaaaaaaatcacatggactattgcagcaaattttaatcaacaagaattaagcaatgcttcgattactgatcctatttcagatgatcaaaattatgtttcagggtctgctaaagtttacgaagcaaccatcaacaaaaatggaacttatactttaggagcagaagttacttcggatatgggtatcaaaattgtcgagtcaaaagggtcagttaaagttgaacttccagatggaagtactaaagcttacgttttaatttttgaaacttctttagaaggtaatttgattaaccaaaaagaatataaaaacaaagcaacttttacaaataaagatatcagtcatgaccttagtgcttctgttactccagctcatcaaggtgaattcgttactaaagatggttcacaatcaagtacagattcaaactatgtgaattggaaattaactgtaaacgcttctcagtcaactttaaagaacgtagaagtcactgacaatccttcatcaaatcaatacatcgttgcaaaagatattttaatctatggtacttcaatcgatgcctcaggaaacattacagaaaataaaaacatcattttggaacaagggaaagactattcagttgatatccaaactgataattcaactggtgcccaaacggtcaaaatcaaattccttagcgaaatcaatacggcttatgtcgttgagtatcgtgctttaattacgagtgacaaagctaacgatgtcgtaaccaatcaggcacatattactggtgataatgagaaaattatcgagcaagatgttgaaaaagacgttccagtaacaaatcataacggaagtgcaaacggtagcaaaggttctgtgaccttagaaaaagtaggacctggtaaagcaaaacttgctggcgcccatttacaactttggagtatcggtacagacggtaaaaaagataaactgattcgtgagggtgatactgataaaaatggcgacctcaaacttggaaatttacgtgttaccgattatcttcttatcgaaacgaaagctcctacaggatatactcttgatgaagaattagttaagggaaagaaaatcactgttgctaaagatggagaagtaagtaatttcccaattcaagatgtggagaatgaaccaacaaaagttattttaaaaaaggtgggactgacaattgaaaacgggaaagaggtaaaaaatcctttacagggagctgaatttaaagtgcttgactcaaatgggcaagttgtttctggctatgaaaaattgacttctgactctagtggaaatgttacgattgaaaaactaactccgggtaaatatagcttagttgaaaccaaagcgcctgctggttatattttagatccaacgccaatcgactttgagcttaaggctaatgaagaagggattattcctgatatcaatcttgaaaaagttaactaccagggttcagcacagttaataaaacataattcaaatggtcaagcgctttcaggagccattttcaaggttattgataaagatggtaacacaattcaaactaacttaagttctgataaggacggaaaagtaactgctactggcttgtcacctggagattatagttttgtggaaacaaaggcaccaacaggctatattcttaatacaattccagttcacttcactatctcagctgaagaggaaggtcaaccgcaaatggttattgcttcagacaatttcattaattatcaaggctcagccgaacttataaaacaagataatgaaggacaaccactctcaggtgctgtttttaaaatagttgataaagctggtaaaacaattcaagccaatttaacatcaggcaaagatggcaaggttgttgtagatggtttggctccaggcgaatactcatttgtagaaacaaaagccccaaccggttatatccttaatactaatccagttcattttactatttcagataaagaagaagggcaacccaaaactataattgctagcgatagctttgtcaattatcaaggatctgctcaacttatcaaacgtgatagtcaaggacagccattgttaggtgctatctttaaagtagttgataatactggtaaattggtaaaagaaggattgacctctgataaagctggtaaagttaatgtaactggattagctccaggggattattcttttattgaaacacaggctccgacaggttatatcttgaataccataccaactccttttacgattttagcagagtctgaaggccaacctcaattagtggtagctagtgataatttcatcaattatcaaggttcagctgaactcattaagcatgatattaacggtcaagcattatctggtgcaatttttaaagtgattgatgctgatggcaaaacgattaaagaaggcctaacaagtgatgaaacaggaaaagttcttattgaaggacttgttcccggcgattacagttttgttgaaacaaaagcacctgagggatacattcttaacactttgccagtcaactttagtatatctggtgaagaagaaggaaaagtgaaagttgtcatggcaagtgacaactttatcaattaccaaggttctgcagaattgattaaacatgatagtcagggtcaagcacttgaaggagcgattttcaaagttgttgactctaaaggtaagattattaaagaagatttagcgagtgataaaacaggtaaagttttgatagataaccttgcaccaggtgactattcttttgttgaaactaaagcaccctcaggttatattttaaatacatctaaagtagatttcacaatttctactaaagaagaaggacaaccaaaagtagtgatggcttcagataactttattaattatcaaggttcagctgagttaattaaacacgattcgcaaggacaagctttggaaggcgcagtctttaaggtaattgattcaaaaggaaaatcaattaaggagaacttggtttctgataaagaaggtaaagttctaattgagaatcttgtaccaggtgattattcatttgttgaaactaagcctccatcatcttatattctcaatactagtaaggttgattttacaatctcaaccaaggaagaaaataaacctaaaattgttatggcatctgaaaattttatcaactatcaagggtcggctgaacttattaaagtcgatgaaaatggcaagagtctttcaggtgcggtattcaacgttacaaactctgagactcatgaggtggtgattaaaggtattaaaacagatgcaaatggtgtcatcaaggccaaccatttgaaaccaggaaagtatacattcgtcgaaactgaagcgccagcaggatatcagttgagtcaagaaactcgtgcatttgaaatcaaagcatcagcagaaaataaaccacaagtagtaaatacagggaagtttgtaaataaaagattacctatcactccaaaaaaaccagaacttcctaaaactggtgaagagcgtaatacatttttaccaattgtaggtgtaggcttattgatggttggtgcaacactttatgttttctttaaacgtcgtaaaatgtaa

SEQ ID NO: 2657 - DNA, 291 bp, Artificial Sequence
  Optimized genes for Lactococcus lactis
atgcttaaaaatatttgggaatggtttttatggtttactggtgtaacagatgctggttggtcagcttggtggggaggttttttttcttgtttaccactttttggtgtttttgctgttgtttggcgtcgtttgaagtgtcatgctccaggttgccatcaaattggtcttcatcgtacagctgatggactttatgttctttgtcgtaaacatcatccagatgttccaaataatttaactttaaaacatattcaaaaatcacatgttaatgctaaagcaaaaaaagataaataa

SEQ ID NO: 2658 - DNA, 642 bp, Artificial Sequence
  Optimized genes for Lactococcus lactis
atgtcatcacctaaaattgattataaaaaatcagataaaaattattatttaccaaaaggaattagtttaattgaacttcctgctttaaattatttgatgattgacggaaaaggtgctccaacaagtccagctttccaagaagctatccaatatctttatgcaactgcttatatgatttcaatgtcttatcgtaatccagatttcattattgaaaattttcaaccatttgttgttccaccacttgaaggtctttggacttctaaaaatgaaccacgtgctggtaaacttgataagaatgattttatttggcgtttaatgattcgtatgcctgattttgttgattcagaaattgttgaaaaagcaaaaaaattagttgaaagtaaaaagggttttgatttgtcaaaagttaaatttgaagcaattcaagatggactttgtcttcaaacaattcatttaggaagttttgatgatgaaggagaatcatttgagaaattatttgaatatgctaaagaacatgatttaaaagctgttcataaagaatttcatcatcgtgaaatttatatttctgatttccgtaaaactgcaacagaaaaattgaaaacaactttaagaatttttgtagaacgtggtcaagaaaaataa

SEQ ID NO: 2659 - DNA, 1074 bp, Artificial Sequence
  Optimized genes for Lactococcus lactis
atgcctttaaagcttaaattgaaaccaagtgttccaaaatggcgtatcaaacgtatgattaaaaaattaaatatcgcttatgttggttttggtaaatcaacaaatcgttatcatattccttatgtcaaagaacgtgaaaatattgttatcaagagaattgtcaatagaactttaggaaaaagaccagaacaagcagaattggaagcaaatggaacattattttcaactgatattgctgatatcatcaatgacgattcaattgatttggttgttattgtaacaccagcttttgctcattatgactatgcaaaagaacttctttcagctggtaaaaatgttctttgtgataaacctttggttgaaacacttgaacaagctaaagaattagtagctcttgctaaagaaaaaaatttattctttatgccatttcaaaatcgtcgttttgactcagattttttaactgtaaaaaaagtaattgaacaaggatatcttggagaccttgtagatattactgttaatatggatcattttcgtccaaatgatgcttcacaaggtggaaattttgatggagcttggtacggacatggtgttcatttagttgaccaaatggtttcactttttggagcacctaaagaggttcaatatgatattcgtgctacacgtgattatgattctgttgatgattatttctcagttaacttactttatcctaatcttcgtgcaacagttgcagcaactgaagttgctgctttaccacatccaaaatggttagtttatggtactcgtggaacttttattaaaatggatgttgatcaacaagaaaatgatttaaaagttggaatgtttccaggtgatgaaggattcggacaagatagtccagcagatttcggtcaacttacttattttaatcaaaacggtgaccgtattgttaaacatattccaacagtcgctggagattacggtcgtgtttacgattcagcatatgaaagtattattaatggtgctgacaaacttgtttctgatgagcaaattttagctgttataaaaacattagaaaacggattttctaaataa

SEQ ID NO: 2660 - DNA, 867 bp, Artificial Sequence
  Optimized genes for Lactococcus lactis
atgattaaatttgaaaaagttaattatacttatcaaccaaattcaccttttgcttcacgtgcattgtttgatattgatttagaagttaaaaaaggttcttatacagctttgattggtcatacaggttcaggaaaatcaactttacttcaacatttaaatggtttattgcaacctactcaaggaacagtacgtgttggagatattgttgtaacttcaacaagtaaacaaaaagaaattaaaccagttcgtaaaaaagtaggtgtagtttttcaatttccagaaagtcaactttttgaagaaacagttttgaaagatgttgcttttggaccacaaaattttggtatttcaaaagaagaagcagaaaaaattgcagctgaaaaacttgaaatggttggtctttctaaagaattttgggaaaaatctccatttgaattgtctggtggtcaaatgcgtcgtgtggcaattgctggaattttagcaatggaacctgaagtattggttcttgatgaaccaactgctggtttggaccctaaagccagaattgaaatgatgaaattatttgaatcaattcatcaaacaggacaaactgttgttttagttactcatttgatggatgatgtagctgattatgctgactatgtttatcttttggaaaaaggacatattatttcttgtggaactccatcagatgtcttccaagaagttgattttttaaaagctcatgaacttggtgttccaaaagcaacacattttgcagaccaattacaaaaaacaggggtttacacttttgagaaattgccaattactcgtgctgaattagttaaccttttaacatcactttcagtaaaatcaggtggagaaaattaa

SEQ ID NO: 2661 - DNA, 348 bp, Artificial Sequence
  Optimized genes for Lactococcus lactis
atgaaaaaaatttataacattggagttgaagcaacaatggatgttattggtggtaaatggaaaccaattatcctttgtaatttacgtcataatccttcacgtccaggtgaattgcgtcgtcaaattccaggaatttcacaaaaaatgcttactcaacaacttcgtgaacttgaaattgataatattattgttcgtaaagtttataatcaagttccaccaaaagtagaatattcactttcaccttatggtgaaacattaaatggtttacttgatattttatgttcttggggagaaggacatgttcaaactttgaaatcaatgggagaagaagttcaggttttagaataa

SEQ ID NO: 2662 - DNA, 1380 bp, Artificial Sequence
  Optimized genes for Lactococcus lactis
atggaaaatttacaagaaaaacatgaagcacaacgtggtttgcaaaatcgtcatattcaacttatcgctattgcaggaacaattggtactggtctttttttaggagctggtaaaactattcaaatgactggaccatcagttatttttgcttatattttaataggaattgctatgtttttcttccttcgtactatcggagaaatgttgtacaatgatccaagtcaacactcatttttaaattttgttactaaatattcaggtgttcgtacaggttattttactcaatggtcatattggttagttatcgtttttgtttgtatttctgaattaactgcaattggaacttacatccaattttggcttcctcaagttccactttggctcattgaaattgttatgcttgcattgctttttggacttaatacattgaattcacgtttttttggtgaaacagaattttggtttgcaatgattaaagttgcagcgattatcggtatgattgttacagctattattcttgttgctggaaatttccactattcaacagttttatcaggaaaaacagttcatgattctgcatcactttcaaatatttttgatggttttcaattatttccacatggtgcttggaattttgtaggtgcacttcaaatggtcatgttcgctttcacttcaatggaatttattggaatgacagccgctgaaactgtaaatcctaaaaaaagtcttccaaaagctataaatcaaatccctgttagaattttgttattctatgttggtgctcttttagcaatcatggctatcttcaattggcattacattcctgctgacaaatctccttttgtgatggttttccaattgattggtatcaaatgggcagcagctttaatcaatttcgttgttttgacatcagctgcaagtgctctaaatagttcactcttttcagcaactcgtaatatgtattctttagctcaacaacatgataaaggtcgtttaacaccatttacaaaattatctaaagcaggtattccaattaatgcactctatatggcaacagcattaagtttacttgctccagttcttactttaattccacaaattaaaaatgcttttgattttgctgcttcatgtacaacaaatttgtttcttgtagtttatttcatcacactttatacttattggcaatatcgtaaatcagaagattataatccaaaaggatttttgactcctaaaccacaaattactgttcctttcattgtagcaattttcgcaattgtctttgcttctcttttctttaatgctgatactttttatccagctttgggagccattgtttggacaatcttttttggtttatatagtcattataaaaaaatttga

SEQ ID NO: 2663 - DNA, 813 bp, Artificial Sequence
  Optimized genes for Lactococcus lactis
atgaaatttattgctattgttggaactaatgcttcattttcttataatcgtaaacttctttggtatatgaaaaaacattttacaaaagaggcacaaattgagatcgttgaaatcacagatttaccactttttagtgaagatatcagagaaattccagaaggtgttcaaaaaattgcagaagcaattcgtgaagaagatggtttgattttttcaacacctgaatatgatcatgcgattactgctgcacttaaatctttaattgaatggctttcttggattaaacctcaaccattaaattctttgccagttatgattgttggtgtaagtttaggaaatatgggaacagtttttgctcaagaaaatcttcgtcaaattttatcaagtccaggtcttgatgcatttgttcttccatcaaatcaatttttacttggtcgtgctgctgaagcttttaaccaacaagatgaacttattgatgaacgtacaatttcatggttagaacattgttttaataattttatgatttattctaaaacattgaaaccaatgcgtttgccttcattaaaaaaagaaaacaataaagaaattattgaaagtgaggaatcaaaaaatagtacagaaactgacgaagtttggtggactaaagaaacaaatcaaggacttcctgttttatctgatgctgatactggtgcttctgaatatgaagaagtaattgaaccagaaaattcagcttatcttcaattccttgaagaaggagaaacttggaaatttgatgatattggtgaattacgtggtaaatcagaagaagaagactaa

SEQ ID NO: 2664 - DNA, 606 bp, Artificial Sequence
  Optimized genes for Lactococcus lactis
atgtctaaattacttgttgttaaaggtcacccattgactgctgattattcactttctttaaaaggacttgatgcttttgttaaagcatataaagctgctcatccagaagatgaaattgaagaattagatgttttttcagcagatattccaacattaaatacagaattagtttctgcaatgtttgctggtgaaaatgctgaattgacagcttcacaaaaagataaacttgctcgttttgcaggttttacagaacaatttttatcagctgacaaagtggttattgcaaatccaatgtataatttaatgattcctgctgagttgaaatcttgggttgatactgttaatgttgctggaaaaacatttaaatatacagcagaaggtccagttggtttagctaacggtaaaaaagtacttcatttacaagctaatggtggtgtttatggtgcacaagatccagcaacaatttatatgtcagcaatttttaattttattggttcagattttcgtcaaattgctgtagaaggacatgcttatgatcctgaaaaaactgaagaacttctttcagaatttatcaataaagttgaacttgaagctcaaactttttaa

SEQ ID NO: 2665 - DNA, 192 bp, Artificial Sequence
  Optimized genes for Lactococcus lactis
atgattcatgaattaactgaccgtgctcgtcaacatttttcaactcgtaaaattgatgctttttggatttttgaagaaccaacaactggtgctctttttgagggtggacttgtttcagaaaataaagcaattacttttgaaattaatgctaaaacacttgaagtttttgaaaaaaatgaaaaaattttatag

SEQ ID NO: 2666 - DNA, 879 bp, Artificial Sequence
  Optimized genes for Lactococcus lactis
atgacagattttaaccaattctttaatcttgaattttggcaaaaaatctttgaacttaatgaaagtccattacgtattgccattgcaattcttgatatcgcgattatctcattttttctttatcaagcaatccgttttgtacaaggaactaaattgatgactttagttcgtggtgttattatttttatcttcattagaatcattgcaggattgattggacttacaacagttgaatggttattgaatcaagttattacttatggtgtaattgctggtgtgattattttccaaccagaaattcgtcgtgcattagaatcacttggtcgtacaactacactttttactccaacaagaaaatcatcacctgatggacatatttcagcttatgaaaaaagttttgcttatatgtcagaacgtaaaattggggctttgatcgcaattgaacaaggtcaaaatttaaatgaatttgtttcaactggtatccgtttagatgcagatattacaagtgaattacttattaatatttttattccaaatacaccacttcatgatggtgctgtcattgttcaaggaaataaaattgctgttacttcagcatatcttccattgacagaaaaatctggtatttctaaacaatttggtactcgtcatcgtgctgctattggtttatctgaagtttctgatgctttaattttagttgttagcgaagaaacaggaggaatttcaattgctcataatggtgaattcttcgctgatatttcaaaagaaaaatttcatgacatccttgttgctattttggttccaaaagttgagaaaaacgaaaaaggaacaggtaaaaatcgtaagaacaaagctggagggaaaaaaaatggaaaataa

SEQ ID NO: 2667 - DNA, 3543 bp, Artificial Sequence
  Optimized genes for Lactococcus lactis
atgtatcgttcaaaacatcaaaaaggttatacaacttcacatgaagtaaaaacaacacgttttcgtacctggaaatctgggaaaaaatggctttacggagcaacagttcttacgctgactgcttcaactttgcttccaatcggtaatcttgcttttcaaccaaaaacagaaaaagctcaagcagcgtcagtcagctcaggaactttagtaccaggaaatacatcttatgataccggcggacatacgtattcagggactgaatttgctaacagttcaaattatgctttatatggaaaagcagttgtagcttcaaactggattaacttggtttcaagtacagctaatagtgtgggattaggcatctttaatggttctgtatcagcaatctcagcaactactggctttaccttaaaatctactattaaagtagattctggttcatctttaacggattttactaaatcaggcgatgcgattggtgtaattttgaccggtgcatctaaagcgcaacttgctgcaaacgcacaatcttctcaagcgacgaacgacggtcttggtatccgtggtttgccaaatacggtttttttaggtcgtgatctttattctaatctaagcaatgtcagtactggtagtctgacagggattgatggttctgcgactgttaacggttggacagatggaccaggtgttgttatggcaattcgtaatacagatagttctggaacactccaagctgcaaattatccaagtcttggatcagctgctccttatagtccagttacaaatactcaaaacggaacggcttatacatttgcgacagacacaagctatgctttaggggttgcatcacctattacttcttcagtacaagaaccaattactgttacttggactcctgacgctacaaatacagcctcaactggttatacctcaggaactttaactttcaatttaattgctcaaacgacgtcaaatggcgctctaattggtgcttctgctgtcaatggtggtacaggtggatatactttgacaacacatacaaacttacaaaattcactgacagtaggatttgttggaggaacaggtggaaattatggtaatttgtcagttagtttaaatggagccaccattacgggaagtaaaggaactgaacctgttccaataaattatttaaataaagttacgggacaacctatcccatcaatggctcaatcatcaatcactgcaaatgtaaatgatacaattggagcagcattgacagctccgtcatcaacaagtcctgataataatacctatacttacgttgttcctgccgcaccaacaggttaccaagcaaattctgcaacaaccacgacagttttagcggccaatcctgcttccactacaaatacaagtgccactacagtctcaaactttatcgttggtactactaatcctaacgctcttaatgtttcatacacaccttcacaacaaactgtcctttttaattgggcaaaagcaagtggtaccacactggctaatttaccaaatcaaattgcctatggtgctacaggaattaccgatgcctctgttgtgactgataatcctttttctaacacaacacttttatcaagttatgcgacagcgctttcaaatgctgttccaacgggttataatatcactcaaatctctaatgggacaacaactgtttctggagctactaccgcagcaactttggcggcatttacatcgcaaaatccaactgtaggtgccacatcaacattgaatacttatacggtaacccttacagcagtaagccaaacagctacttatacttatggctatacatcaactgctttgaatacaccagctattccagccattttaacatcaacaggaacaactggtggttcagtaacaacgcctacaggatataacacttcaccacaaattccttccggctactatattagtgctatttatgctggtacttctgcttctggtacgcttatttctagtagtacaaccaatggtacaaatgcagcttggccaagtggacaggtttatgcaccgacagggaatcaatattatattcaattagcacctaatactgtaaacgtaacttggtttatttcaattgacccaaacccagataatgaccctttaaatgttgctcaaggaggtttcactccaacagttggttcaattttaggaggctctacaactacgaattatcaaagtcaagttattgataatatgaattcattgactggaaatacattatctacgactgacaatgtgacttacactgacggggctaccggaatcaaatatattgttactggttatcaatatcaagaaggaactacaacaacagcaacaaattcagctccaattacaacttataaaactttttcagatttacttgcagctcatccatatgttctagctggaacaaaaagtaaccgtacacaacttgttcatttattaatgactgttgaccaaacaacgattacaagtaatagcacctctggtcaacatgttaatccagcaacaaactacattcctagttcagaaattacttctagcacagatatcgatggcgcagatgatgacggactttcttatgcaattaatggatacaatgcgattgttaatattactggagggcaaactgattattggggagatgctactaactctttgcaattgagtattgggacatatactgagaattactacgcattaaactatcttggcgttcaagcttatacaaactggttacctagtcattcaggtggaaccgtaagtcaatttcttcaaacacttgatgctacgagtttggctaatgatactgtcacttcacaaactactcttgaagttcaagatgcaactgctatcacaactaataatcatcatattattccacgtgctgcttcatataatcccagtagtgatttggtcggtgctagtaatgctgatggtagcagtgttgaaaatattgaaacaaatccaattgtcaatggtgacgcaatcggagttttgattactgattcatcaggtaacattctttgggttaacaattctgatatttcacttcctaccaataaacttcaagaagttacctatatcgaaaattattatgccttgactgcccaaggtttagttgattacactaattggcaaaccactacggcatcaggtggtcatacagttggtgatttcatcaattcgggtcaagcaacaacttctgactatgttaaatcaacaacagaattaactgttacaaattttgtattgccatttgcaggtggggcaggaaaccaatttttgtatttgatgattggcttagctgcctttggtgcacttggtttttattttagtcaacgtcgtaaggctgaaatggatttagaagtgattaataaagaaatcttgggtaaaaatgataacaaacgttctaatatttaccttacttcacgtcatactcgtccatacgctaaaatttttcataccaaaaatcgtactcatttggcacaagcccagcgtaaaggcacaaatgaataa

SEQ ID NO: 2668 - DNA, 240 bp, Artificial Sequence
  Optimized genes for Lactococcus lactis
atggctttaaatgataaacttgatgcaacaaaagataaagtttctggtaaagtcaaagaaacaactggtaaagtaacaggagatgaaaaattagaagcaaaaggaaaaacagaaggtttgatgggaaaagctaaagaaggacttgaaaatattaaagacaaagcatcagatttagcagaagatgttgctgaaaaatttaatgatactgttgattcagttaaacataaaaatgaaaaataa

SEQ ID NO: 2669 - DNA, 255 bp, Artificial Sequence
  Optimized genes for Lactococcus lactis
atgaaaaaatatgataagaaaatgaaaaatcgtttgaaacgtgcaactggtcaacttacaggaattttaaaaatgatggaatcaggtgaagaatgtattgatgttgttactcaattaacagctgttcgttcaagtcttgattcacttattggtttaattgttgctgaaaatcttaaagaacttttattagataaagaagttacagataaagaagaaaaacttgaacaagcaatcaaattgattattaaaaaataa

SEQ ID NO: 2670 - DNA, 939 bp, Artificial Sequence
  Optimized genes for Lactococcus lactis
atggtacaagcatataaaaaattttggttaggagcttttacttttaacaaaaagacttcacgtaaagatttttggtcagctttgttaactcatattattatctttgttattttatttaaagcttatcatttttttaatttgcttgatttctaccaacttactactctttggcaaacatttgctagttttttccaacttattttcaacctttatttctttggaagtttattgtcatttattgctcttacagttcgtcgtttaaatgatgctgatttaccttggggattaatttttcttaatttcattcttggtttaggtacacttgttcttttgattttgaatctttttccttcatcaccacgtgctttaaaattcaaagaatatgaaattaattcaagtcaagaatttaataatttaccagaaactaaaactttatctggtatttttaaagattattttaaaaattattttgagtttcgtggtcgtacaacacgtcgtaacttttggtgggttcaactcttttggggtttgactgttatcctttttttatttttgatttatcttttcaatcaatttgaacaaattatgtttggttataattttattggttcaatggttttgcgtttgttcttcttcttgtttatccttggaactttctttccacaattgacaattcatgttagacgtcttcgtgatgcaggactttcaaatctcggtctttctttgttacttggtggaacatcaggaattttaattttttatcaaatgtttacaaaaacattgaaaatcacttatacaactggacattatcaattagttcaatatttattattccttttagtcatgattgcagttttatcacttatcttggttgaagttatggcaactggtgaacttaaaacaaataaaaaaaattctctttttgaaaaaattgattaa

SEQ ID NO: 2671 - DNA, 684 bp, Artificial Sequence
  Optimized genes for Lactococcus lactis
atgcctggttcagataaaactgttgattctggtgcaatttatatttctaatacagaacctgaatataaagcttacgttccttatctttcaggtaatccaaaacaacttatcaatggtgaacaagctttagtttttgctcgtgaccgtgatactttggccaatggaaattacggacgtgctgctcatcaacgtgaagttatgactgaattaatgaataaaatgctttctttgaattctgttttcaaatatcaatcatttttaaatgatattagttctgattttaaaacaaatatttcaattaatttagctaacttgactgctttgatggcttataaagattgtcttaataaagttgtttctattcaataccaaggtgtaagtcaaatggttgatggtggttcttatgaatttattccagaaaacgtagatttagcaatccaaaatatcatgcgtcaagcaaatgatgaatcagttaatgacaaacttgaccaaagtgttattacttacgaaaattattttggttcagaaacagatcaatattatatgccatcagcaacagttacaattaaaggagaaaaatctgaaacttatggtgttgacacaaaaggtagtttggttaaaattaacaaagaaaatgctcaagattatgtttcatcacaaggaggagcacttgttgctaattaa

SEQ ID NO: 2672 - DNA, 447 bp, Artificial Sequence
  Optimized genes for Lactococcus lactis
atgacttatgaagactttattaaagaagctggtttagctcgtgaaaatttccgttgggcttgggcattttgtaatgaagttgacggtccaattactgaaccagaacttgctgataaacttttggatttggttttagaaggcaaaaaatcagcaacagcttcagctgttgctgaatatggtgaagatgaaccttttccaagtgttgatggtaaatttgatattttacttgatggaaaaggtcaaccacgtgctgctattacaacttcaaaagtatatgttcgtaatttttttgatgtttctgcagaacatgcttttaaagaaggagaaggtgaccaatcattagattattggcgtaaagttcatcaagatttttggtcagatttaaaagtttattcaccaaatatggaagttctttgtgaagaatttgaagtactttatcaaaattaa

SEQ ID NO: 2673 - DNA, 558 bp, Artificial Sequence
  Optimized genes for Lactococcus lactis
atgaatcaaacagaaaaaaaaaaaaaggctattcttgaaacaactttccatttattaaaccaaaaaacaattcgtgaaatcactgttgatgaaattgctcataaagctgatgtttctaaagttacactttttaaatattttcattcaaaaaatcagttaattaatcaagttattcgtcaaaatttaaatcaactttctttagagattaaaactttgattgaatcaaatcttgatttcaatcaaacttatcaagcaattttacaattgaaaattcaacaattagaacattatcaaccaattttctcagaaaatatgatgactcaatatacaaattcaccagaacttttagatgatgatgctttatcacttcaaaaacaaatttatcttttgttatttcaaaaaggtcaagctgaaggaaaaatttcatcagattattcacaagaagattttttacttattttgtcaatttttaattctggtgttaaaggactttcaatgaatttgcttatcgaaaaagcagaaattgtttcacgtttttttttgaatggttggaaataa

SEQ ID NO: 2674 - DNA, 450 bp, Artificial Sequence
  Optimized genes for Lactococcus lactis
atgactgcaatttggaaagaaaaatcttttaatcaacttactttagatgaaatgtatcaattattaagtttacgtacagctgtttttgtagtagaacaaaattgtccttatcaagaacttgatggtaaagatcaagttgctaaacatctttggcttgaaaatgaaaatggtcaattgatggcactttgtcgtttgcttccaaaaggaatttcatttgctgaagcttcaattggtcgtgttttagtaaatccagaatttcgtggacaaaatttaggacgtggtttgattgaaaaagctttagaagttttgaaagaagacggtgaagaagcagttacaattgaggctcaatattatcttcgtgatttttatgctagttttggttttgttgaaaattcagaaccattttatgaagatgatattaaacacgttaatatgattttaaaattttaa

SEQ ID NO: 2675 - DNA, 657 bp, Artificial Sequence
  Optimized genes for Lactococcus lactis
atgaataaaaaaatttattatatttcaggagctattacaacacttgctttcttgattttagctttatttgttaaaattgattttactcatggtccttttccatttgatcgtccaattcaaacttgggcatttcatttacaaagttcatctggtttgacttattttttctcacatatgactaatatttttggtgataaaggtggaatcattgttgctgttcttttagcacttgttctttatcttctttttaaacaaaaagaagcaacaatttggtttgctgcaactgttgttttaagtttagctttgaatacagttattaaagcaattattggtcgtgaacgtcctgatattcatcgtttggctgcttttgctaatgaagctggtaaatcatttccttcaggtcattcaatctttgcaaccattattttcggttcaattttctttatttgtttaggaaaattaaaaaatcgttcatcaaaaatcttacttggtattctttgtattatcttaattgctcttatcatgttttcacgtatttttgttggtgttcattatccttctgatacaatcggtggttttttagaaggaatttctattttgcttttgacatatccaacatatatcaaatatcaagaaaaatctaaaaaaacaaattaa

SEQ ID NO: 2676 - DNA, 336 bp, Artificial Sequence
  Optimized genes for Lactococcus lactis
atgattgaagcttgtattcgtacaaaacgtgataaaattgtttcatacgaaatttcaggacatgctgaatcaggtgaatatggtcatgatgttgtttgtgcagcagtttctgttctttcaattacaacagcaaataatatttatgaaatggctcatattaaaccagttactcaaatggaagatggttatctttatgttgagattcctttaagtattccagaaaaacaaggagttttagctcaaacattacttgaagcatttgctaattcaatgaaagctgttgaaaaatcttatggacaatatattactttaaaatttgaaaatggtggtcaataa

SEQ ID NO: 2677 - DNA, 375 bp, Artificial Sequence
  Optimized genes for Lactococcus lactis
atggttcttattggcttttcatcagtttttttaatttcatttaatgcttttgttttctttggtttgatgcttttttttgaagttttacttggttttattacaattttagttaatgttccaatgacttcttttttccaaagtcaagttcctttaaatattcaatcacgtttttttgcacttttaagtttttctgcaaatttgattgtaccacttggaattctttatacaggatttcttgcttcagcaattggtgctgatgttacttatattattaataatatccttgttattgttatcgtttgttttgctttttggaaagaaattggacgtggtttccgtgcatttttgttaaaaaaatggaaaatgtcaaaataa

SEQ ID NO: 2678 - DNA, 321 bp, Artificial Sequence
  Optimized genes for Lactococcus lactis
atggttgaaaaaaatgaaattattaaatcaggtgaaattgttatttcaaatccaattggtggtaaattagttatgaaacgtacttcaacaagtaagaaaggaatgaaatttaaagaagtttttgcttcagaagcttctttgattgctggaaatttaactcaaggaagtcttcaaattgcaaatcaagcaatgtcagttgctcaaatttttaaacaagctccaaatggtctttttacagcaacagttgatccagctaaactttcaaaattcaaaaaatggaatatttattatcatggttcacgttggcgtaaaaaagcttaa

SEQ ID NO: 2679 - DNA, 564 bp, Artificial Sequence
  Optimized genes for Lactococcus lactis
atgtcatcaccacgtaaaaaagaaggtaaaggaattcaaaatgtttttattcatacaatcgcacttcgtatcgctgaaaatgatacaccagttcatagtgaattgattggtggtgatgttaaaatcggtcaagaaaatcttcataatcaagtttcaatggcaattcgtaatccacaagctaaattgatgagtcaacttaatggagatttcattattacaaaaaaaggtgaaactaaaccattagttaatattcaaaaacaaaacctttcaattgctccaaattcagcttttgaacttccagtaagtttgaatgaccattttaaacctggaacatatacttataaaattgttttaaaaaatgatcatgaagattggcaatttcttaaagattttacaattaaagaatcagaagcaaatatgtataatcaaacatcagttgattatacaaagaaaacaaatttaaattggattcactatatgcttgttggtattactctttttttacttttaattttattttatttttggggaaaacgttcaaatgatgtcattttgaaaagttaa

SEQ ID NO: 2680 - DNA, 834 bp, Artificial Sequence
  Optimized genes for Lactococcus lactis
atgaaaaaacaaagtcaattgacaaataaaaaaataaataaatcagaacctaaaatgactattattaacttaaaaaatatcaatttaactcgtaacaaaaaagagattttaaaagatattacttggaaagtaaatccaggagaaaactgggttatccttggtttgaatggctcaggaaaaagttcattattgaaattgattcttgcagaagaatggaaaacatctggtgaaattacagttttaaatacacaatttggaaatggtgaaattccaaaacttcgtaaacgtatttcagttgttggttcatttattgctgaacgtttccaaccaaatattaaagctgaaaatcttgtttatactggtaaatttaattcatcaatgctttataaaccttatacagaccaagaacttgatgaagcaagacaacttttgcgtcaaatgggtgctaaatctttaattggtcgtaattatgcttcactttcacaaggagagaaacaagttttgttaatcgctcgttcattgattctaaaaccagaattattaattttagatgaagctactaatggacttgacctttttgcaaaagaaaaattattaaagcaattacaacaaattaatcaacttaaaactgctccaacacttatttatattagtcatcatccagatgaaatcactgacatttttactcatttacttcttttacgtgaaggaaaagtcattcaatcaggtaagaaagaaaatttgcttaatgaaaaaattttgactgatttttatcaagaaaaagttgaagttcatcgttttgaacaaaaatattttgttattcctgctaattaa

SEQ ID NO: 2681 - DNA, 303 bp, Artificial Sequence
  Optimized genes for Lactococcus lactis
atggaacatgaatatctttttgtttattcacgtttgaaacttttgattaaagatgctcataaatcattcaatcaagttgaacgtgaacttggttatccacgtaatacattaaaaaattacaaatataaaaaaaaaccaagtgttggtcgtgtttttgaaatggcaaattattttaatgtttcaattgaatttttattaggaattgaagaaaaagataataaaaattcacttgcttatcgtttagaaaaattagatagagaaaagaaagaattggaaattttaattcttgaaggacaaaaataa

SEQ ID NO: 2682 - DNA, 171 bp, Artificial Sequence
  Optimized genes for Lactococcus lactis
atgaatcgtacttttattaaaggttttttagctggaaatgctttattgattgctggtcttgctgcaacagcaattggaattaaagctaaagttattaatccaattaagaaaaaagaagaacaaattgaaatgggacgtaaaagagctgctagaaaacgtattgcaccataa

SEQ ID NO: 2683 - DNA, 948 bp, Artificial Sequence
  Optimized genes for Lactococcus lactis
atgaaaaaagtatcaatcattattccttttaaaggtcaaacagaagctgaattgatgcttccactttcaagtatttacaatcaaattggtgtagatttaagtcaacttgatattcatttagttaatgatggtggtaaaacaattgacttatcaaaatttgatgttttggctgaccgtcttgaaatccattatcatgaaattccaaatggtggaccaggtgttgctcgtcaatatggtattgataattctatttcagaatatatcatgtttattgatgctgatgatgtcctttattatgttggtgctctttggccattttataatgcttcaaatcaaggacatcaaatgattcgtgcttcttattgggaacaaattgctggaaatccttatacttatacagttcatggtaatggagatcgtaaagcagcttatggaaaatggtataaacgttcatatattgaaatgttgggtttacgttttatgccagatttgccaatttatgaagacacatattttgttggacttgcttgtgaattagcaactgatacttgttttttagaagaaaaagtttatatgtggttagctaatcctaattcaattacacgtactgttgaaaataaatttaattatcaagctcatatttatgcacgtgaaaatcgttattggtttgaaatgattagaaaatggaaaccagaatgtttggttacagattttgaaaactatcttacaaatatgtatttaaaatcacaaaaatatccaccagttgatgaaaaagcttggtgggaagaacaacataaattaattacttcagtttctgatattttttcaggttggactcaagaacttcaaaaacaagttgaagataaatctgcaaatccacaaaatgaatggcatggaattgaaactgacggtttcaaagaatgggcaacacaatcacttccttggtaa

SEQ ID NO: 2684 - DNA, 2154 bp, Artificial Sequence
  Optimized genes for Lactococcus lactis
atgaaaataaataaaattgatacacgtcatggtacagcaaatcaatcaacatttagtcatggaaattgtttaccttatactgggtttccatggggaatgaattatttttcaccttcaactggtgcagcacgtggtgcttggtggtttcatccagaagaccgtacttttgagggttaccgtatcactcatcagccaagtccttggatgggagatttttcacatttaacaatgactccagtagctggaccacttccagaaacgagtctttggcatacagtttcttcatatcgtcctgaagaatctactttcaatccaacacaacttaaaattactcaattacgttatcaaattacatcacaactcatcccatcaatgtatggtggtattttatctatgaattaccaaaacttatcattaaaagataatggattaatgttgcatttgccaggatcttatgaattgcaacaattggatgattactcacttgaactttcaattattaactttgctggttgtgaagatgaaaattttactttttatctcaaatttacagctgaccaaccatttgtattgtcaggtaacttgtctgatgaagatagttcagttcgtcttgattttaaagcagccaaacaagttcaaattcattttgcaacttcatttatttctaaagagcaagcagctttaaatcttgagcgtgaacaagataattctgctgaaacttatttggaaaatgcagagtctgcttggaataatttattctcaagaattgaaatcgaacatcataatcagcaagaagtttcaaccttttatcataacctttatagaagttttctttttcctcaaacgttctacgaatttgatcaagagcatcaaaaaatccattatgatacctcatcaaaaacagttaaaaagggtccactttacactaataacggtttttgggatacttttagaactgtttatcctttatattctcttattgctgttgatgaatatggcgatatgcttgaaggctttttgaatagttatcgagcgacaggtttcttaccaaaatggttaagtccagatgaacgtggacttatgcctggtactttgattgacgcagttattgcagatgcagcaagtaaaaatattcgtcctgatttgatgccagagtttttagaagcaatgaaaaaaggagctacaagtcaaagtgaaaattcaaattatggtcgtcgtggaacaaaagattatcttaaacttggttatgttcctttaactcaccacgaaagtgttaatcatactcttgactatgctttttctgactactgtattagccaagtagcaaaacaaacaggtgataaagaaatttcagatttttacgctcatcaagctaaagattatcaaaatatctttgattcagaaacaggatttatgcgtgctaaggatgctgatggtaatttccgtgcagactttttagatattcgctggggacgtgattatgcagaaggttcagcttggcaaacttcttggtctgttcttcatgatttcgcaggattgattaaattgcacggaagtcgtgagaattttgaaaacaaattaattgagctttgtaatcaacgtccaaactttaatgttgaaggatatggatttgaaattcatgaaatgtctgaaatggccgcaattgaatttggtcaagttgctattagtaatcaacctagtttccactatccatatttatttagctatattggtaaaccttggatggcaacaccattgatcaaaaatttgttgacagaaacatttaatgattctcctaaaggctacccaggtgacgaagacaatggtacaatggctgcatggtacattttttctagtttaggtttttatccagttactgctgcttctaatcaatatgttttagggattccattatgggataaagctcgtattaatttaagctcaggacaacaactgacaattcttgctgaacctaatgctccacaacaggtttttgttaaccaaatcacattcactgacaaaaaagtaaatgacacttttataaaacatgaagaattaattaaaggtggaactttaaaattcgatttaggaattgttccaaatcctttgaaatatacaaatgaacaacttccttattcattgactgaaaattaa

SEQ ID NO: 2685 - DNA, 402 bp, Artificial Sequence
  Optimized genes for Lactococcus lactis
atgaataaaaaagaacttgaaaatgctttgatttttccacaaggtgaaaaaaatccttatggtgcttattttactggtcaatcttatttggaaggaatgattgctgataaagatttaccatttggtgttggaaatgttacttttgaaccaggttgtcgaaatcattggcatattcataaagatggttatcaagttcttttagttacagctggagaaggttggtaccaagaagaaggtaaagaagctcaacttcttcatgctggtgatacaattgttactcatgcaggagttaaacactggcacggtgcaacaaaagactcttggttttcacatgttgctattactgctggcgaagcagtttggttagaagaagtttctgatgaacaatatgaaaatttatag

SEQ ID NO: 2686 - DNA, 753 bp, Artificial Sequence
  Optimized genes for Lactococcus lactis
atgtcaaataatattgaaaataaagttgttttgattacaggtgcttcatctggtattggacaagctacagctgaacttttagcaaaaaaaggagctaagattgttttggcagcacgtcgtgaaaaccgtttgcaagaacttgctgacaaaattaaaaaagcaggtggtcaagcaatttatcaagttactgacgttacaaatcctgaagaatcaaaaaaattagttcaatatgctaaagaaaattttggtaaaattgatgcgatttttttaaatgctggtatcatgccaagttcaccactttcagctcttcatgttgaagaatgggaaaatatggttgatattaatttaaaaggtgttcttaatggacttgcagctgttttaccagaatttactgctcaaaaatcaggtcacgttattactacttcatcagttgcaggattgaaagcttatccaaatggtggagtttatggtgcaactaaatgggcagttcgtgaattaatggaagttcttcgtatggaatctgcacaagaaggtactcatattcgtacagcaacaatttacccagctgctatcaatacagaattgttgaatactatcactgataaagatgctgcagaaggaatgactgcactttatgaacaatatggaatttcacctgaagctattgctcgtatcgttgcttttgctttagaacaaccagaagatgttaatgtttcagaatttacagttggtccaacaactcaaccttggtaa

SEQ ID NO: 2687 - DNA, 1047 bp, Artificial Sequence
  Optimized genes for Lactococcus lactis
atgaaatctgtttattttgttgaaaaaaataaaatgcaagttcgtgaatttccaaaagctcaattggttaaagaaactgacgctattattaaaattgtcagagcttgcgtttgtgggtctgatttatggtggtttcgtggaatttcagaacgtcaacctggtccagttggtcatgaagcaattggtttgattgaagaagtaggaacaggagttaaaaattttaaagttggtgactttgtaattgttccatttactcatggttgtggacattgtccaatttgtttggctggatttgaagctaattgtcctaatgctaaagatggcgttaatggaggatatcaaggagagttttatcgtgcaatcaatactgatggagcacttgtaaaaattccaggtcaaccaagtgactattcagatgatcaacttgcttctttgactgctttagctgacgttatgccaacaggttttcatgctgcaaaagcagctgatgttcacgaaggtgatactgttgttgtctttggagatggtgctgttggactttgtgcagttatttcagcaaaacttttaggagctaaacgtatcattgcaatgtcacgtcatgaagatagagcagcactagctcgtgattttggtgcaacagatattattgacgaacgtggtgaagaagcaattcaaaaaatcatgtctttaacaaatggttatggtgcagatgctgctcttgaatgtgttggaactaaacaagctatcgaatcagcttttcaagcagtacgtgctggtggtcgcgttggtcgtgtaggtgtaccacatgatgttgattataatgaatggattgattcacttttttggaaaaatattcaattaggtggaggtgttgcttcagttgcacgttgggataaagaaattttattagaagcggttctttcaggagaaattaatccaggacgtgtttttacagctgaattttctcttgatgaaatccaaaaagcttatgaagctatggaccaacgtacagcaataaaatcattacttcgtatttctgaagtttaa

SEQ ID NO: 2688 - DNA, 165 bp, Artificial Sequence
  Optimized genes for Lactococcus lactis
atgacaagtcaaaatgaaggagttgttgaagctgaaattaaaaattttggtcgtcaaatgattattgaaggtgaaattcatgaatgtgaattaaattggaataaaacttggttaattgaaaattgtatgactcaagctggtgctttttcacttggttttttttaa

SEQ ID NO: 2689 - DNA, 600 bp, Artificial Sequence
  Optimized genes for Lactococcus lactis
atgaaattatcaaaagttgccatttcaacaggtttagttgcttcatttatgtttattggtggtgggattgctcatgctgatacaccaaaatcaactcatgaagtagcaattgaagttattaatgggaattacggaaatggagatactcgtgttacaaatttacaaagtaaaggttttgatgttaaagcaatccaaacagaagttaataatattttaacaggaacaacaacccaggtttctgcaacaactaaaacagcagaagaacaaccaacaaaagtaacttcagtagctccaacacaagcaactcaatcagtttcaggaggattaaatatgtcacaaacttctggtcaagttgatattcaagctttagcaaattatatggcttctaatacagctaatgctgctggttattcagcatcagaatgggcatatattattactcacgaatcaaatggtggaattgattcagtcaattcatcaagtggagcttatggtgcttttcaacttttaggacatggtgaatatgctggaatgactttggctgaacaaattgcaatggcatctaaacttccagcaggttcttgggttgtttataattaa

SEQ ID NO: 2690 - DNA, 1539 bp, Artificial Sequence
  Optimized genes for Lactococcus lactis
atgaaattaaaagatattgagaaatctacaaataaaaatctttaccttctctttttgtctgttcttgttggattgacagcaggttttttagcaagtctttatcgtttggcattagaaaaagctgaaacttggggattatctatttaccgttttgtaagttcacatctcatctttattcctttacttattcttggtttagctttcttggcctttgttgtgactttttttatgaaaaagtatccaatgtcatcaggaagtgggattccacaagttaaaggacaacttcaaggttattttaaaaataattggtttactactgcttttgctaaatttatcgcaggaacattggctatgtttgctggattaagtttaggacgtgaaggacctagtgttcaattgggagctagtatgggtcaaatggtttcttcacgtcttgcagaaacagaacgtcataaacgtattttgattgcttctggcgcatcagctggtttgagtgctgcttttaatgctccattgtctggagttatgttcacacttgaagaagtattcaaatatttctcacctttgattctcttaacttgcatgacttcagcgatggttgctgatatggtagcacgtatcatgtttggtagtggtccagtttttcattttcaaattgttggttcaattgaactttcaaattattggttactcattattttaggtatcattttgggtttctttggagcattttataactggactttgttgactagtcaaaatttaatgaaaaaaattaaatcaccatttcttcgtgttttgctgacatttttagttgtaggtgcaactggtcttctttttccaaatattattggttctggtcatcgcttgatggatagtttttcacttggaatgggacttgctttcctttgtttaatattaattggaaaatatttgatttcaatggtttcttatgcttcaggtgttccaggtggaatttttttcccacttttggttttaggagcctctcttggtgctgtctttgcaacaattgtcatctcactcttccatttaccaagtcatttatttgcaaatttggtcattttagcaatggcaggaacttttacagctattgttcgtgcaccaatgactggaattctattattagttgaaatgacaggttcatttgaccatcttttacctcttgctttagtttcattaatcgcttatgttgttgcagatttattgcaatctgaaccaatttatgattctttgcttgataatatgcttaaagaaaaagaaattgatgttgatgattcagataaacaaatgatgtttgaaaccattgtacaatttgatagcgtagctgaccgtaaaaaactttcagaaattcatttgccagaaggttgtcttttagtatcagttcatcgttcaggtaaagatatcatcccacatggaaatactgaattacaagctggtgattatcttactttcttaattcgtcgtgaagatgaagttattgctcgtgaacaattacgtcaagtattaaatgaaaaataa

SEQ ID NO: 2691 - DNA, 270 bp, Artificial Sequence
  Optimized genes for Lactococcus lactis
atgcttttatctattgctattttactgattatttggggagcttatcttattggtaaaaaatataaagatagtttttttatttcttatggtcgttctaaacgtggtttgattatcattgtttcttcacttttgttactttcatttttcgtttttgttaaaaatgatagcttatttccagttgttcttttttcaatttttttaattggacttggaatttattatttgattcatgattcaaaacgtgattctgaaggaaaaaaagaaaattaa

SEQ ID NO: 2692 - DNA, 267 bp, Artificial Sequence
  Optimized genes for Lactococcus lactis
atgaaaaaagttcttgttaaagctgttcatggttatcaacgttggatttcaccagcacttccaccagcttgtcgttattatccaacttgctcaaattatatggttcaagcaattgaaaaacatggacctgctaaaggtttagcaatgggaactgctcgtattttacgttgccatccattttgtcaaccaggatatgatttagttccagatcatttttcacttcgtcgtaattgggctgaaccagaaaaagaagaagattctaattaa

SEQ ID NO: 2693 - DNA, 714 bp, Artificial Sequence
  Optimized genes for Lactococcus lactis
atgaaaaatatgaatgataataatgttatttttgatcaacgttctgatggattaaatgctttcttttcaaaaatttatgcattgatgggtgctggagttttagtatcagctttagtctcttggatcatgattactttttttttagataacatgactgcaattttacaatcaggttcactcttttttctcgttctttggattattccattagttatggttgtttctcttcaaggacttgcaatgaaaaattctaaaatggcacttccaatttttattggttatgctgcttttatgggatttttaatttcatttactttattaatgtatacagctactgatattacacttgcttttgttacagcagcagctatgttctttggcctttcagtttatggtcgttttacaaaacgtaatttatctgcgatgggtaaagcatttggtgttgctgtttggggattgatcattgccatgtttttgaattttttcttcgcttcaactggtttgacaattttgatttctcttgttggtgtagttatctttgctggtcttattgcttgggataatcaaaaaatcactcaagtctataatgcaaataatggtcaagtttcagatggttgggcaatctcaatggctttgtcactttatcttgattttatcaatatgtttctttttttacttcgtttatttggaattgcaggtggaaatcgtgattaa

SEQ ID NO: 2694 - DNA, 933 bp, Artificial Sequence
  Optimized genes for Lactococcus lactis
atgactttgaaaattgataaagttcgtaaatcatttggtgataagattgctgttgataatttaaatatggttgttaaaccaggtgaagttatgggtttaattggtcaaaatggagctggtaaaacaacaacttttcgtatgattttgaattttatttctgctgaccaaggaaaaatcacttggcaagatggaccaattactcaagaaataaaacaaaagatcggttttttacctgaagaacgtggtctttatcaaaaaatgacagttgaagatcaaattttatattttgctgaacttcatggaatgaaacgagctgatgcacgtatcaaacttcaagactggatgaaacgtttagaagtagttggtaaacctacagataaagtacaaactttatcaaaaggaaatgctcaaaaaattcaatttatcgcaacacttattcatgaaccagaatttttgattttagatgaaccttttacaggacttgacccagttaatacagaattgcttcgtaatgaaattaaacgctcacgtgataaaggtgctgctgtcattttttcaaatcataatatgtcagatgttgaattactttctgaccatttattgatgcttaaaggtggacaaacaattcttaatggtacagtagaagcaattcgtgcttcttatggtcgtacacgtatttatcttgaatctgatttaccaaatgaagagttgtcagttattacaggtgttgaaagtattgaaaaaagaggttcaggtcgttcaattaaaatttcagaagccgaagttggacgtgaaattttccaaaaagttgctaaagatggttatgttcaagcttttgttcaatcaccaccaagtcttgatgaaatttttagaatggaagctgcagaaaataatcaagaaaatctttcagctcgttctgaagaaatcaaataa

SEQ ID NO: 2695 - DNA, 399 bp, Artificial Sequence
  Optimized genes for Lactococcus lactis
atgaataaatttatctggtcaatttttattccagttttgattttcgctggacttttaactgttattggtttttcacttgaaagtcaacatttttattggcttcaatcagttgaacttatttatctttttggttcattgatttttacttttgctgctttttggatttggcatttaggaattaaatcacgtaaaatgaaatctttaaaagttctttggctcattttaagtttagtttttttaattgatttaattaatacaggtgtttatttggctcaaggacaaggttggttatggggaatgtcaagtttttcttcagctggtccagctttctttgcatcaatgcttttgctttctctttcatttcttggtttccgtggtcaaatgaaaaaagaaaattaa

SEQ ID NO: 2696 - DNA, 909 bp, Artificial Sequence
  Optimized genes for Lactococcus lactis
atgacttattatttacttgctaatccaaattctggtgctggtaaaggagctcgtactttagaaacattaattccttatcttgaaaaaaataactatgaataccgtctttttaaaacaaaagcagctggagaagaaggtgcattagttcgtcaaattcttgatttaaaaaatcctgatgatcatcttgttatcattggtggagatggaactatttctttggttattaacgaattaccagaagaagaagcattttcttatatcccttcaggttcaggaaatgattttgctagaagtttgaaacttaaacttgacccaattgaatcatttgaagctgcaagacgtgggattaatcatgaaatttttatcatgaattatcaatcaaaaggtctttcaggttatgctttaaataatattggaattggcttagatgcaacaattgttaaatcagcaaatgaaggaaaattgaaacaagttcttaacaaactcaaattaggaagttttagttatattttaacagctttgcatgttttgattactaaaaaaccatttccagctcttattgaagttgaaaatcaagaaatctcattggaaaacgcttttttgatgacttttacaaaacatccatattttggtggtggggtaaaaattagtcctgaagcgacaaatgaaaatgctgatattcatttagtagaatataataaacatcatttgcttcgtacattttcacttattccaagtgttttacgtggaatgcacttaaaacacccacttttccttcatcgtgtttctccacaattttctgttgaattggctgaaagtcaaccagttcaaattgatggtgaaattcacgaacttgttgctgctgaccgtttgtcaatttcaacagaacgtcgtatgattatttattaa

SEQ ID NO: 2697 - DNA, 588 bp, Artificial Sequence
  Optimized genes for Lactococcus lactis
atgactatcaatacaaataatttaactattacaatttcagctgcttcaaaaaaacaatatccagaaaatgattggcctgaaattgctcttgctggtcgttcaaatgttggtaaatcaagttttattaatactttattaaatcgtaaaaattttgctcgtacttctggtcaaccaggtaaaacacaattacttaacttttataatattgatgaccaacttcattttgttgatgttccaggatatggttatgcacgtgtttctaaaaaagaacgtgaaaaatggggaaaaatgattgaagaatatcttacaacaagagaaaatttgaaagcagttgtttcacttgtagatattcgtcatgaaccatcagaagatgatttaatgatgtatgaatttttaaaatattatcatattccagttattttagttgcaacaaaagctgataaagttcctcgtggtaaatggaataaacatgaatcaattattaaaaaggcaatgaaatttgattcaacagatgattttatcattttttcatcaactgacaaaactggttttgaagaagcttgggaagcaattttgcgttatctctaa

SEQ ID NO: 2698 - DNA, 183 bp, Artificial Sequence
  Optimized genes for Lactococcus lactis
atgggtttgacttttagaaaacgtgatgattttgataaaatgatggatgatttgggtgtttcaacagttgatttagttactgatgatgacaaaaaatcagttccaagtccagaaaaaaaagaagatccttttgctaaatttttaacaccaaaagaaaataataaagaaaaagatccaaattaa

SEQ ID NO: 2699 - DNA, 927 bp, Artificial Sequence
  Optimized genes for Lactococcus lactis
atgacacttaattcacttgatgttcaaaataaaacttttaatcctcaatttcgtggtttttcaaaacatgaagttgatgaatttttggatattgttgttcgtgattatgatgagtttgctcaaacaattaaagaccaagaacgcgaacttaaagctttaagagaacgtgttaaatattttgatgatatgaaagatagtttaaacaaaagtattgtcgttgcacaagatgctgctgataatcttcgtgaacaagcaaaatcagaagctgatactttacgtatcaattctgaaaaagaatcagcagatatcattgccaatgctggtcaaaaatcttctttgattattgaagccgctaaaaaagaagcaggatttattttaaatgcagcttctgatgatgcaagaaaattagtacgtgacacagacgatttgaaacgtaaaatgcgtctttatcatcaacgtatgacttcaatcatcgaaaatcaacttgcttcaattcaatcagatgattgggcagaaattttccgtccaactcaagactatgcaattaatccagaagaaaaacttcaatctattattgaagaacatttagaaaatgccgaatctactttggctaaaacacaagcaatcaaaccacttactgatgaagatattgctcaagctaatgaaacaagtgatgaaacagaaacaatcgtttcagaagaaattgtttttgaaactgaagttccagatgaagtaaaagaggaagttgaaatcactgacgaagcaaatacaacagatgattcaaatgaagaaagtgaagttgaagctccaaaagctgacgactcagagatttttcctgaattagattctaaagcaccagctgaaactgctgaagtggtagaaaaagataaccaagaaacgattgatttatctgagttaaaaaattaa

SEQ ID NO: 2700 - DNA, 678 bp, Artificial Sequence
  Optimized genes for Lactococcus lactis
atgactatcaaagaaaacgtaaaacgtatcttgagtaatgttgacgcagctaaagctgcttcatcttattcaaatcaatcagtttctgttgttgctgttactaaatcagtcgatgctaatcttgctcgtgaagtttttgaaaatggtgtttcacatttagcagaaaatcgtactgaactttttttagaaaaatatgaagctttgaaagatttagagattacttggcatttgattggtaatttacaacgtcgtaaagttaaacaagtcattaattatgttgattattttcatgcacttgattcacttaaattagctcaagaaatcaataaaagagctgaacatacaattaagtgttttattgaattaaatatttctggtgaagaatcaaaacatggtttttcagtaaatgaattgatggaaattttaccagaattttctgaacttgaaaatatcgaaattgttggtttaatgacaatggcaccatttgatgcaacagaaagtgaatgtaatgatatttttggtcgtatgaaaaaacttcaagttgaaatttcagaaatgaatttgtctcgtattccatgtacagagctttcaatgggaatgtcacgtgattacgaaattgctattaaaaatggagcaacttttgttagaattggaacagaattctttaaaaatctctaa

SEQ ID NO: 2701 - DNA, 522 bp, Artificial Sequence
  Optimized genes for Lactococcus lactis
atgtttgaaaaatttgatttattgaaacattttggtgtttatggagttgcaattgataatgaaaaacttttggttattgaaaaaaactctggtccttatcaaaatcgttatgatttgccaggtggaagtcaagaagttggtgaatcaatggttgacacacttgaacgtgaagtattagaagaaactggttttacagttcttgcttcaacaaataatagactttattcagcttggatttatgaaaatgaccgtcgtgttgttggacatcatatttttaatttatttgatgttaaattgaattctgttgctaaaaaattaccacaaattgttgctgatggtaaaaatgattcagatcgtgctgtttggaaatcaattaaaaatctttcagttgaaaattcaagtccacttgttttaaaagtaattgcagaaattaataactatccacatgttgataaagctgaaatctatcgtgattggaaagttaattatggttcaaaaaattatcctaaaccattagtttaa

SEQ ID NO: 2702 - DNA, 714 bp, Artificial Sequence
  Optimized genes for Lactococcus lactis
atgaaaaaaattattactaaagattatgcaacaatgtctgaacttgctgcagcaattgttcttgataaaatgatgctttctaaacgtgttaatttgtcacttacagcaggaaatacaccattaggaatgtatgaaattttgattgacaaacttcaaaaaatgaatttcgaccgttcaaatattcattattataattttgatgaagttccacttgctggagaacgttatggtttgacaatgtcagctttgaaaacagctttttatgatagagttcatattgatgatgggaatcttcatgaattaaatgctcaaaataatcaagtttttgaccaaaaaatcttgcaagatggtggaattgatttaatcgttatgggtattggtgaagatggacatttttgtgcaaatatgccaggtcatacaagttttgagcgtgaaatttttgcagttccttttgaagaaggagatgagatttatcaatcaattaaaaatttaactgataaagaaccagcttcaccttatgttacttttggaccacgtacagttttagcatcaaaacaacttttagtctttgctgacggtaaaaagaaagctgaaatcatgaaaaaagttttggaaggtccaattacagaagaaattcctgcttctattcttcgtactcatccaaatgttacatttattttagatgaagaagcagctgctttacttgaaaattaa

SEQ ID NO: 2703 - DNA, 507 bp, Artificial Sequence
  Optimized genes for Lactococcus lactis
atggttcaagaaaatacaaaaacagaagtgactgaagtaaaaggaagtttgacttatgaagataaagtgattcaaaaaattgttggacttgctcttgaatcagtaaatggtttactttcagttgatggtggttttttttcaaatttaactggtaaattagtcaatactgacgatgtaacagctggtgttggtgtagaagtcggtaaaaaacaagttgctgttgacttaaaagtagttactgaatataaaaaaaatgttccagatatttatcgtaagattaaagatgttattcgtaaagaagtttctgatatgactgatttagaagttgttgaagttaatgtaactgttgtagatatcaaaactaaagaacaacaaaaagatgatgaaaaatcacttcaagatcgtgtggttggtgctgctcaaacaacaggaaaatttacttctgaccaagtagacaaagttaaagaaaaagttgatgacatgggtgatgatgctcgtgttaaataa

SEQ ID NO: 2704 - DNA, 1005 bp, Artificial Sequence
  Optimized genes for Lactococcus lactis
atgattttatcagttttaccaagtaatcttcttggtgttactaaagtaaatgctgaatcaagtcaaacagaagttaatcaagaacttacaaattttcaaactgaattagattcaaaattagcacaagcaaataaaatttattcacaagctcaagaagctcaagagaaagtcaagcaaagtaaatctaaaatcacagaatatgaaagtaagattgccgaaactgaaaatgatattgttcaattaaaagcatcagtagctaaacaaatgcgtgctgtacaatcaaatggaggagcaactttttcttatattgatgtcgttgcaagttcaaaaaatttaagtgaaatgattactcgtttgactaatttgaacgttgttcttactgctgaagctgaccaagccaaatcattgattgaaaaagaagcctctttgaaaacaatgaaagttaaacttgaagaaacacaagaatctcttgtaaaaaatcaaaatgattatcaaggacaagttgacagtcttcaatcttcaatttcatcacttaaagataaaatttcttctaacaaacaacttttgtcagaaatgcaagaaaaagctgctgcagaacaaaaagctcgtgatgaagcacttgcaaaaagtgttgctgaagtcaaagctaaagcagaaaccgttaaaaatacaagttctaatcctccaactgttccagacccaccaaaacaaacaactcctacaacaccatcaggtggaagaactttgaatgttgaagcaacagcttatgctcttaatggtatcactgcgacaggaattgatttatctaaaaatccaatttgtattgctgttgatccatctgttattccattaaattcattagtagaagttcctggttatggtattgcaatcgctggtgatactggtggtgctattattggaaatattatcgatgttcattttccaacaaacgatcaagcaattgcttggggacgtaaaaacattcaaattacagttttgagttaa

SEQ ID NO: 2705 - DNA, 576 bp, Artificial Sequence
  Optimized genes for Lactococcus lactis
atgaaatcaaaaaaaacattgattggtttaatgacttctgttacttttttagtttttgctactcctttgatggttaatgcagatacagatagttcaactcaatctaacaatcaagttccacaaattgtcattgaaaatgttgataattctcttgttagtacagtagatgttttagattcttcagaatcagctgtctttgatccaacaattttaccagtttctggtgcagttcaaacaattaaagataaaaatggtgctgttagtaacatttctttgactccactttttaatccacgtactcgtgtttcaaacggttcttatactattaatgcttggggaattggatggaatgtaacttattatatcaatatttcatcaaataaaattacttcagcaaataatcttgattatattattgcaatgccagtcaattcagccactgttacagttgattcatctaaacaagcaactgctcgtttttctttttcaacaccaatttataatatcctttcttggactggttgggttcgtgcaacaatcaactcttctaataatattgttattacaacaaattaa

SEQ ID NO: 2706 - DNA, 1233 bp, Artificial Sequence
  Optimized genes for Lactococcus lactis
atgccaaatggtttgactgtttattatcttccaaaagctgactataaccgtacttatggtttattcacaacaaattttggttcactagatacttcatttgtaccacttggcgaatcagaattccaaacttttccagaaggaatagctcatttccttgaacataaactttttgaaaaagaagaaggtgatgttatgtacaaattcggtgctttaggagctcaaaccaatgcttttacttctttttctcgtacctcttatttgttctcaactcgtgaaaactcttacgaatgtactgaattattacttgactttgttcaaaaaccatactttacaaaagaaaatgttgaaaaagaacaaggaattattcaacaagaaattcaaatgtatcaagatgactcagattggcgtttgtttgctggacttttagagaaaatgtatccagattctcctttagctgctgatatcgctggtacaccagcaacaattaatgcaattactgcagatgatttatataaaaattatgaagttttttatcatccaaaaaatatgaatttatttttaactggtccatttgatattgagatgatgtctgattttgttcgttcaaatcaagctaaaaaagattttgccgatttatctgaaatccaaagaaaagaaataaaagcaagcgaaccaatttcaggtgaaagtttagaattggaagtagcaatgcctaaatttgcgcttggtcttcgtggagaagatcaactttcaagtgattcaaaaacattatttaaatataaattagcaaatcagctctttttggatttgctttttggtcgtacaagtcaacgttatgaagaactttataattcaggattgattgatgatagttttggatttagctttgaccttgataaacgttttcattttgcagttttaacagctgatacagaaaatccacaaattttgggtcaaacacttcaagaagctattaaatcatacaaaattgaccgtgatttcagtgaagagcatttagatttattgaaaagagaaatgcttggagattattttagttcattaaattctcttgaatatattgctaatcaattttcatcagaaatttatggagacttgacattttttgattttcctgaaattttaaaagagttatcactttctgagattgaaaaatttgctgaccaatttatttctgaaatgaaaaaagtagaatttaccattcttcctaaataa

SEQ ID NO: 2707 - DNA, 282 bp, Artificial Sequence
  Optimized genes for Lactococcus lactis
atggaacttaaaaatttaaaagatttttatgaaaaacaagaatatgttgattataatgaatcaaaaaattttgaacaacgtcaagttaataaacgtattgaagaattatcatttttcacaaatattgcagttttttctatttttttagtctttacaacttatattttagtttctttacttgcttcttggattgccattccagtttcaattgttctttcacttgcactttatatttcagttaaaaaaggaattgctaaagcaattaaatttatgatgaaataa

SEQ ID NO: 2708 - DNA, 594 bp, Artificial Sequence
  Optimized genes for Lactococcus lactis
atggttgaaagacgcgttgtttttccagttattggtgatgatgaagcattacaaaaagatacacgtgttatctttacaaatcaacaacttttgactcgtaatccttcacttcaagatgaagcttcaattgaaaataataaacctaaaacagatgcaaaacgtccagaatcatttaaaccttataaagctaaaacaagtttttcaacacaacatcgtcctttgaattcaaatcatgatggtgttagttcttatgataaaatgccaaagaaaacttcagttgatgaatctaaagaacgtgctaaaagagcggcagcaactttaccaaaaccaccaaaacaatatgtttcacctttagaacgtgacaaagaagatattactgttcgtcgttcaacttctgcaattttaaataaacgaccatcagctaatgataatccaattcgtgatatgaaaaatcaaggaatgaatgtttctgatgctgttgctaagggtggtatgaaaaaagcagttccacatggtgctgctgcaaatgatactcaaaaaggttcatattttgaaaacaaacgtaaaaatatttttgatcgtggaattgtttaa

SEQ ID NO: 2709 - DNA, 4353 bp, Artificial Sequence
  Optimized genes for Lactococcus lactis
atgattaaaaaatggactgtttgtttgtcaattattattttagttttaaattttgttcctaatcttcttcaaggacatcaagtttttgctgagaaccaaaagaattacaaagataaagttgaactcattaacgatgaatcatttaacatctcatattcaatgcaagcacttgaaaaccaatatgaatgggaaattgattatcgtattaataaaactgaaaatgataaagaacttaaattaaaatttagttttgaaggaaatcagccgattgaaatcgaagaaaatgaaagctggacacttaaggagaaaaacacaattatctctgattttgaaaaagaaaatgaaggcaaaatagttttgagagctaataatagtatcagtttactgaatttggaaattcaagctgatgctaaattaattgaaaatgaccaagaagtgatttcagaagatattcttgctaaaaaagaatctacaattttctctctttatattccagagaataataaggctgactcaaaagaaaaagacaataaaaatactgaagaagtattgaataatgaaagttcacaagaggaaactgtcagtcaactcaaaaaagattcacagttggctttttcttatccaagtaattttggaattaaggcaagctttaatgatttagctcaaaattatgaaaatattagtcctgaatatagacaagatgaaactggaattagtcccaatcactcatggattcctacaggaaataccaccgttgttaatcatcaaggttggaattcattctcatcacaatgggatggagttaattcttggaacggagaagcaacaaatctggaaaactcttatattgagtatgctggagtaaacaacccagttgattttgctttaagaaaatacgcaaaagagaccgaaactccaggcctttatgatgtttatctaaatgttcgtggaaacgtacaaaatcctattaaaccagtagatatcgttttagtaattgatatgtcaggttcaatgcaaggtgctaaagaaacagcagttcgtcaaggagtgtcagattttttatcaactattcaaaacactgcttacgctgattatgttaacgttggaattgttggttactcaagtccagggaattatgttacaggtgcaagtggttatatcacagtacccattgataaagtttcaagtgaatcacatgttaaatcgattaatcaagcactagctccacaattttcaggaggaacttttacacaacttggtcttcgcaaaggaacagaaatgcttgagcaagatagtagtgataatcaaaaaatgatgattttgatgactgatggtgtcccaacattcagttataaagtcaattcagcttcaaaagttgacaacgtcatttatggtcaatcatttgcagaaagtagagatgaaccaggaaatacttctaaaatccaatctccttattatgtcaaagatatcaatggtgggtctaatattgaaattcgtgatacttgggcagctactttgggtgaagctgaaatcagcaaacaggaaatttcagaaattcatacactcggtattcaattaggtaatgatgggagctatcttagtcaagaagaagttaaatcacgtacttcacttattgccactactggcttgtatcaagacgctaacagtgctaatgatattactgactatttgaaaaatcaagcgaatgtcgttctaagtcgttttaatacaatcaccaatggattgattcttgacccattgggagctcaattcgaatacaaagatacaaaatttgaaataacaagtgttggcgaggattcaatcgataacttgccaacagggaaaattaatgaaaaaggacttgaaatttcaaatttaaatatcggtaaaaatcaagaagttcaaattcactatcaagtacgtcttaatacagaaacggatgacttcaaaacaaattattggtaccaaatgaatggtgaaacaactttaactcctaatggctctaatccagataacaaagtaaatttcggtgttccatctgctaagagttctggaatcaatttgacactagaaaaacaatggttagcaaattctgaaaacattccagaaaatgttgaacttttgattggtcgtcgttcagcacaaatttcttctgattggaccaaaacagttactttgaaagaagatgatgagtggcgttctcaattggaaaatcttccaaaatattctatccttggtgaagagtttatttacgaaataaaggatgaaattgttcttaattcagaaatttatgactggattacaattggagaagataagacaaccattgcaaatattgaaaaatttagattacagttaatcaaaacctcaaatcatgataatgaacctttatctgaagtcgaattcgttttaaaaaatagccaaggggaagagattgacaaagcagtaacaaacgaaaaaggcgaaattttatttgataaaactcgtttgaactatggagaagaatatcagcttcatgaaatcaaatcacctggtcatagtcttgaaggtccttggaaaattaaaactgaatttgaaaatgggcaaccaattattaaagtggatggcgaacaaattgctttggatgaacattataacaagtttatgatttctttaaatatcactaatgatataaatgtagaagaattccgtaactcagtaacgattgacaaacgtgctgttgatagtgaagaaaagcttgatggcgctgtcttcaacctctatcaaatcgaatctgttgatgatgaactgacacaacttaaacctttggaaattaccaacaatttattaccaggtttatatgctttgcaagaatcagtttctccaaatggatattaccgtgacgatgaagttcatttttttcgtgttaaattcaatggaagtattgttgctattggaagcgaaggaatagatattccttttcttgatgaaaatgaatctggcaagaacggtttggttttgaatgaagaagaaaatggtgatttgcatttaaccttaattttttataatcaagctgtaccaccattacaacttgaagttgataaaattgatgatgatttcacatcaccacttgcaggtgtaagttttgaattaacacgtttaggacgtaaatcaaccgatagcgattctgtgaaaagaatcaactcctttgatagaattttgaaaacatttaataatgaatttactggtgaaacaatcgctctaaaatctaacttagatggaaaattgactgttattgataatgagaataacggacaagaaagtacaagcccaatttcattagaatacgatactcaatataaacttgttaagaaatcttcaattggcctttttccaaactttggtgaaaccagtcaatggataattacaacaccaaatatggatgaattaaaggaacacgaagaagataataatattgaaattgacggtggagatttacttgaaacacctgatgagtctattttagagagtattaatcaaacaccatcaactcttggggttgtatcactcatcaagactaaaaatcctgaatttaaagctttagaatcaacagattctcaggttgaaaaagtaaaaagtgacagcagtttccaagaaaaaatttctgaatatttaatatcttttgagattcattcaaatattactcatagcttcactataaaaaaggtcgatggtgagtcaaaccgtccaatggatacgcaatttgcgcttcgttgggttgagaaatttgaaccaactcaagattttgacagtctcgaacgtctcaatttagacacattggacctttctggtaacgacatttccacttctagtaaaacatcaattgatgcaaaagctggtgcgacactttcaacagaaaaaggttctcgtacattagagcatatggcaagaggaaacctttacatcatctcggaagaagaagtacctactggttatcaaaaaacaaatacagttatcgtagcttatatggacaaagcccaaggctatgcagataaagcaactatccatattcgcttagccaaacgaagtgcaacacatccagaaatcttggaatttggtagcttagaagactttaaagaatataaaggtgacttagaagacgaaattgggattgtctttgccaattataagattgctgaaggtggttcagaggaaaaagaaaaagaaaaagaagaaaataacgaaatgcgtaataaacaagaaactaacaaaccaaatatagaattgccagctcttggagcaattggtgttggtggtgtgggattattgcttatcatttcagcttatctcttaaaaaaatatcgtggtaaataa

SEQ ID NO: 2710 - DNA, 780 bp, Artificial Sequence
  Optimized genes for Lactococcus lactis
atgtcagaaattatcaatcatattactgcttttcaaccagtttaccgtgttttgaatagagaagaaaatttagatttctatcgtgaagtacttggtttcaaagtattagttgaagaaggtgctatggtttggttaggtggacatgaagcaaaaaaagaccgtttccaacttgaagaatctccaggattccgtccagtagaaggacttaaaaaacatggtcaaacagttattaaagcaaattcatcagagatcgaacaattgattgttcgtaatcttgataaaatttcaaaagtttataaaggtaaaaatggttttgcatttagtgctttaagtccagaagctgaactttttttggttacttctgatttattaactgatttgagttcacttacagaaattgataaatctgaaattgaattagaagaagacaaaacttttaaaggattatctgactttgaaatcattgcaatggatttaaatgttgctgaccaatcaattattgagttttatgaatcagtttttggtttaaaagctattaataatcaaattgaatttccatttgtaactttgactttctctgttgaggaaagtgaagatttagctgctggtacagatgaagttcttgaccttgaatttttagtctttatgattgacaaagattttgatttgaaagattttgctcatcaattttcagatgttgatggaacttatttagatggttcagctaaaacattttctttggaagttccagatcatgttgaactttggtttgttaaataa

SEQ ID NO: 2711 - DNA, 843 bp, Artificial Sequence
  Optimized genes for Lactococcus lactis
atgaaaaaaatcaaattattgactttagcaactgttggtattgcctcaattggtttacttgcagcctgtagttcaaaagataactcttcaagtaaatcaacagataaagtaacaactgtaaccgttgcaacaagtgcagcatcagttccatacgaatattcagagaatggtaaaatgactggttttgaatacgatattttaaaagcagctgataaggatatgaaagattataaatttgatttcaaagtttatgaagattctgcgattttggctgctttggatggtggacgtgctcaaattgctgctaataattttggaaaaactaaagctcgttcagaaaaataccttttttcttatccagttcgtcaaggaattgatgctattttttcaacttctaaagaaaatattacaaaaatttcacaacttgctggtaaaacaacagaaattccagcaggtacaaattatggtgatatgtttgaatcttggaataaaaatcatccagataaaaaaattaatgttaaatattctcaacgtccattagctgaccgtttgtcagcaatctcatcaggtcaaatcgattttttatttgcttcaaaggctccagctgaaaatttaattaaagaacatgcaattactggacttgttgatacagttcctactgatttagataaacaaccagaatttaaaacttatgactattttattcttgataatagtcaatcaaaattgcaaaaagacttaaatgttgaattgaaaaaactttatgataatggaacacttaaaaagctttctgaacaatatttccatgattcacatattcctgctgcagaccaatttaaataa

SEQ ID NO: 2712 - DNA, 495 bp, Artificial Sequence
  Optimized genes for Lactococcus lactis
atgaatgaaattacttatactcaaattatgccaaatgatattgatgatgttattcgtattgaacgtgcaactttttcagaaaatgaagcactttcagttgaatcaatgattgaaagaattaatttgattcctgattcatttattgctgctcgtaattctgaaggtactgttgttggttatgtttctggtccagttactgaaggacgttatcttgatgatgaatcttttgaacgtacagaagcaaatccaaaaacaggtggatttcaaaaaattatttctttgacagttgatccagattatcaaggacttggtattgcaacaaatttattacttttgcttgaaaaagaagctaaatcaaaaaaacgtttaggaatttcattgacttgtcatgattaccttgttccttattatgaaaaacatggttttactaatgagggtttaagtgaaagtaaatttggtggtgaaacttggtataatatggttatggaattttaa

SEQ ID NO: 2713 - DNA, 1086 bp, Artificial Sequence
  Optimized genes for Lactococcus lactis
atgcgtcgttggattattcatttagtcatgactgttattggagcttcacttggagtagcggttgtaccaagtattttaaaggtttttggttgggatacagggattcttcaaaatgaagcagtagatgctgttattggtgcaattatctttataatactttcatttattttcgctggttcaatgcttaatggtttaaaaaaaattgattctcgtatttcaaaaatgaatatgtcaaaaatggttttcaatatcatcggaattgtacttggtttgcttgtcggtgtgattgggtcgattccattacgttttttaaatgttccaattttatcaaatattattagttttatcttggttttagttatgatttatttaggttatgttttatttgatcgtcgcggtgatgaaattgctcgtgttctttttagaaaaagaagagaagctatggcaacagaaccagctgaagttgcagaagaagtagttggtgaaagtaaatcagataattcaattttgttagatacttcttctattattgatggtcgtatccttgatgtaattaaaacaggttttattagtgataaaatcattgttcctaattttgttatccttgaattacaattaatttctgattcatcagacccattgaaacgtgctaaaggtagacgtggtcttgaccttgttaatgaacttacaaaatttgaccaagttgaaatcagtcaagtcgattttgcagatgttcgtgaagttgatactaaattacttaaatatgcttcttcaactggttctaaacttgtaacaaatgactttaatttaaataaagtagctgaaattcaaggagttcaagtattgaatattaatgatttagcaaatgcagttaaaacacaacttgttgttggagaacatattaacgtacaaattattcgtgcaggatcagaacgtcaacaaggtgttgcttatcttccagatggaacaatgattgtcattgaagatacagctaaattgattgacaaaactgttacagttgaagtggcaaaagttttgcaaacatcagctggacgtatgatttttgctgatttggtaaaaaaataa

SEQ ID NO: 2714 - DNA, 210 bp, Artificial Sequence
  Optimized genes for Lactococcus lactis
atgaaatataaattaaatccactttttactttgcgtaaaacagataaagcagtttttaatttttcacgtgctgaacttactcaatttaatgatactggttttgatattttacttgctgttcttgaacaagaatcagaccgtgaatggactgatgatgaagatgaatttttaaaagaattaattaaagaaaaaattgttgaagaaagttaa

SEQ ID NO: 2715 - DNA, 474 bp, Artificial Sequence
  Optimized genes for Lactococcus lactis
atgaataaaaaatcatcagctttactgacaatgggaacattaactttacttgctgatggaggagtagttttgacaaatttaccagattcatttaaaattcaacgtgtttatgctgcaacaagtcgtgatattactgtttattcaaaagattttttaacctattttcaaagaaatggttcagcagctggatttgattatgatttggcaacttatactcaaacattgactcctgatttaggaaatcaagcaggtaatgttactttgaaaacaaaagttgatatgtcacaaaattttacttttacaggtcaaattaatcttggtaacaaaagtcaacaaaacggtggtgcagatggtgttggttttctttttcatccaggagatacttcagttgttggagcaccaggtggagctgctggtcttgttgtattgatggaacatttagttttatcttggattttaacaatcatggaataa

SEQ ID NO: 2716 - DNA, 309 bp, Artificial Sequence
  Optimized genes for Lactococcus lactis
atggcattttcaaatacaagacgtcgttatgctagttttgatactgttgcttcaattccaggtgaagttattgatgctttttggtttattattgaccatcatttaaaaggtgtttttccattagaaactatcattaattttgatttagttaattcaggaaatttactttctattcgttttagtcaagataactctccaacaacaattttagtagattttggttatccatttaatccagaatggccacttcattatcgtgctgttgataatatgggtcgtgaaacaatcatgactgctcgtgaaatgtaa

SEQ ID NO: 2717 - DNA, 441 bp, Artificial Sequence
  Optimized genes for Lactococcus lactis
atgaatcatattccagtttttggtgagaaaaatgaagaaaaaaattatcaagctcgttatggtgtttattcaattgttgctagagaaaataaagaaatttgtttagttcaagcaccaaatggtgcttactttttaccaggtggagaaattgaagctggtgaagaccaagaaaaagcacttcatcgtgaattgatggaagaacttggtgcaacagctgaaatcggtgaatttttgggtcaagctgatgaatatttttattcttcacaccgtgataaatattattacaatccagcttatatttataatacaaaaaatgttcgttttgattctaaaccacttgaagattttaatcatatttcttggtttgacccagaaacagcaatttcaaaacttaaacgtggttcacataaatggggagtacaagaatggttaaaaaaataa

SEQ ID NO: 2718 - DNA, 1320 bp, Artificial Sequence
  Optimized genes for Lactococcus lactis
atgccagtatcgcgaatcaaagtcaaaaatcgtcatcttaaaaaaaaagctaaaaaaccattagccttttataaacctgccactaaatttgcaggcgctgttcttattgcaggtacattaactacaacacacgaactgctactgcaacaaacttcacctatggttcaagcagcgacgaattcaactgaagcttttatcgaatcgatcgctgcttccgcaaaacctgttgctgatagcaacgggctctacccatccgtgatgattgcacaagcaattcttgaatctaactggggttcaagtcaactttctagagccccctattataatttattcggaatccaaggtacctatcaaggcaaatctgtcgttttcaaaactcaagagtacttaaatggcaaatgggtcacaaaagatatgccatttagagtttatcctagttttaaccaaagcttccaagataatgcgtacgttttaaaaactacaaattttggaaatggaccatactatgcgaaagcatggcgcgcaaacgctgcaacatatcaagccgcaacggcggcccttactggaaagtatgctacagatcctaattacggagctagtttgaatcgtattatttctcaatataatttgactcgttttgacggagcaagctcagctggtacatcaaatagtggtggttcaactgctacaaatactaataataattctaataccagttcaacaacttatacagttaaatcaggagacacattatggggaatttcacaaaaatatgggatctctgtagctcagattcaatcagctaacaatttaaaaagtaccgtaatttatattggtcagaaattggttttgacgacatcatcttcttcttctaacactaatagctctacaagttcaggaaattcagctggcactacaacaccaacaaccagtgtaactccagcaaaaccggcaagccaaacaactataaaggtaaaaagtggtgatacactatggggtctttcagttaagtataaaactactattgctcaattgaaatcatggaaccatcttaacagtgacacaatttttattggtcaaaatttgattgtgtcacaatctgctgggtcttcatcatctagcactggttcttcaagtgcttcaacatccagtacgtcaaattcttcggcagcttcaaatactagtattcataaggttgttaaaggtgataccttatggggactctctcagaagagcggaagtccaatagcttcaattaaagcgtggaatcatttgtcatcagatactatcttaataggtcaatatcttcgtattaaataa

SEQ ID NO: 2719 - DNA, 1428 bp, Artificial Sequence
  Optimized genes for Lactococcus lactis
atgacaactttcggtgtcgctggtcacgctgatggcgtgaccgttgggtcaagctcagatgcatcatcatctacaggatccagttcttcaagttcagggacgggaggatcttcatcatcatccagtactggttcttcaagttcatcaagtaattctaatgcatctagcagtagttctagcactggtaacagctcaagttcatccaaaccatcaacttcaggttcaacatctaaacctagtaatccatcatcatcaacaaacaataattcaacaagtaattcatctactactactcaggcaccatcaacttcagtttctacaatcgcgcctagcgcatcaacttctacagttgcacctagtaattattcacaagataatgcttactaccaaacaagcactgctgctcagattccgaattcttcggcagattctgcaccttctatatatgcaggacctgttcttaagactattgaggctgccaaatcaatcgataaaatagacacatcttcaacagaagcttttattaaatctattgccgatcgtgtgcgtatcttagctggtaaaaataacttatatgctagcattattctcgcacaagcgatccttgaaagcggttcaggtcaatcgaatatgagtcaacaatattttaatatttttaacattaccggtgcataccttggcaagtcgatctcattcaaaactgaagaattttctggtaataatccctactatattgaacaaagttttcgagtttattctaattatgaccaagcacttgatgattatattaacctgatgattaaaggtacgacttggaatagtgaaatttacgctggcgcatggaaaagtcatgctaaaacatatcaagaagctgctcaggccttacaaggaatttttgctacagacccagcatatgcgcaaaaattaattgaaatcattcaagagtacaagttggatgcttatgataacgtggactcgaccactcaagtagtcgactctaaaattccagaaagtccattggcagcttcaaaattagataatagcgcatatccagaatacaatggagttgagtatcctggagccgatagttatgcgttcggaaattgtacacaatatgtttataatcgcattatccaattgggaggtttggttggaacacatatgggtaacggtggggaatggggtattaatgcacaagcgcaaggatattttacaactacggtaccaacagaaggttatgctgtttcctttccacctggagttgctgggtcatcatctgaatatggacatgttgcttttgtagaaaaagtttattctgataattctattcttgtaagtgaaatgaacgttaaaggaaataatatagtcagtgaaagacatatttctgctggcgtagccgctctagccacctacattcaaccaaaataa

SEQ ID NO: 2720 - DNA, 1086 bp, Artificial Sequence
  Optimized genes for Lactococcus lactis
atgaaacagaaacataaattggctttaggggcttccattgttgctctagcatctcttggaggtattaaagcacaagcagcttcagttcaagaaattattaacgctgctgttccagtagctaatgattatggcttataccctagcgttatgattgcacaaggaatacttgaatctagtggtggacaaagtgccttagcgtcaaactataataacatctttggtgttaaatatacaagtggtactccagtttatcttccaacacaagagtatcttaatggtacaatgactaatgtagtagaaccttttcaggcatatagttctgtatatgatgcttgtgttgcgcaggctaagatgttgcgtgcatcatcttactatagcggtgcttggcgagaaaataccagtagttaccttgatgcaactgcgtggcttgaagggagatatgcaactgatcccacctacgcatctaaattgaattcagttatatcagagcttggtttatctgtttacgatcaaggaggagaaatttctggtggtacagctgttacaacgtcatcttcagcttcaacaaattcagcaggcacttataaagtacaagaaggtgactcattaagcgctattgctgctcaatacgggacaacagttgatgccctggtttctgctaatagcttggaaaacgcaaatgatattcacgttggagaagtcctccaagtcgccggagcatcaactaccactacttcaactaatacaacatctaatgtctcttcgtcaagtacatatacggtgaaaagtggagattcattgtattctattgcggaacaatatggtatgacggtatcgagtttgatgagtgccaacggtatctatgacgttaattccatgctccaagttggccaagtgctacaagtcaccgtgagtactagcgccactacatcaaatacaactacttcaaattcatatactatccaaaacggcgactcaatttattctattgctacagctaatggtatgacagcagaccaattagcagctttaaatggattcggaatcaatgatatgatccatccaggacaaacaattcgtatttaa

SEQ ID NO: 2721 - DNA, 222 bp, Artificial Sequence
  Optimized genes for Lactococcus lactis
atggctgtttttgaaaaagttcaagatatcattgttgatgaattgggtaaagaaaaagaagaagttacactcgagacttcatttgaagaattagacgctgattctttagatcttttccaaattattaatgatatagaagacgaatttgacgtagaagtagatactgaagcagatatgaaaacagtcgccgatcttgtgaaatatgttgagaataacaagtaa

SEQ ID NO: 2722 - DNA, 2712 bp, Artificial Sequence
  Optimized genes for Lactococcus lactis
atggcaactaaaaaagctgctccagcagcgaagaaagttttgtcagctgaagagaaagctgcaaaatttcaagaagccgtagcttatactgataaacttgtaaaaaaagcccaagccgcagttctaaaatttgaagggtatacacaaactcaggtggatactatcgtggctgccatggctttagctgcgtcgaaacattcgctcgaattggcacatgaagctgttaacgagactggtcgtggagtcgttgaagataaagatactaaaaatcattttgcgtcagaaagtgtttataacgctattaaaaatgacaagactgttggtgtcattagcgaaaataaagtagctggttcggttgaaatcgctagtcctctcggtgtcctagcaggtattgttcctacaacaaatccaacaagtacggctatatttaaatcattactcactgctaaaacccgaaatgcaattgtatttgcattccatccacaagcacaaaaatttagttctcatgctgctaaaattgtatatgatgctgccattgaagcaggtgctccggaagattttatccaatggattgaagttccaagcttggatatgactacagctttaattcagaaccgtggtcttgctacaatccttgccacaggcggacctggtatggttaatgccgctttgaaatctggaaacccttcattaggagttggtgctggtaatggtgcagtttacgtcgacgcaacagcaaatattgaaagggccgttgaagatcttttattatctaaacgttttgacaatggaatgatttgcgcaaccgaaaatagtgctgttattgatgcatctgtatatgacgaatttattgcaaaaatgcaagaacaaggagcgtacatggttcctaagaaagactataaagctatagaatcatttgtctttgtagaacgtgcgggagaaggatttggtgttactgggccagttgcaggaagaagcggtcagtggatcgctgaacaagcaggagttaaggttccaaaagataaagatgtgttattgttcgaattggataaaaagaacattggtgaagcattgtcaagtgaaaaactaagtcctctactttctatttataaagctgaaacccgagaagaaggtattgagattgtacgtagtttacttgcatatcaaggggctgggcataacgcagctattcaaattggcgctatggatgatccattcgttaaagagtatggtgaaaaagtcgaagcgtcccgtattttggttaaccaacctgacagcataggtggtgtcggcgatatttatactgacgcaatgcggccttctcttactcttggcacaggatcatggggaaaaaattctttgtctcacaatttatctacgtatgatttacttaatgttaaaacagtagcgaaacgacgcaatcgtcctcaatgggttagacttcccaaagaaatctactatgaaaaaaatgccatttcatacttgcaagaactacctcacgtgcataaggcttttatcgttgcagacccagggatggtgaaatttggatttgttgataaagtactggaacaactcgctattcgccctacgcaggtagaaacatcaatttatggaagtgtacaacctgatccaacccttagcgaggctattgcaatagctcgtcaaatgaagcaattcgagccagatactgtaatctgtttagggggtggctcagcattagatgcaggtaaaattggacggttgatctatgaatatgacgctcgtggagaagccgatcttagtgacgatgcgtcattgaaagagctttttcaagaattggcccaaaaattcgttgatatccgtaaaagaattattaaattctaccatcctcataaagctcaaatggttgcaatcccaacaactagtggcacaggttcagaagttacacccttcgcagtaattacagatgatgaaacccacgtcaagtatcccttggctgattaccaacttacaccacaagttgctattgttgacccagaatttgttatgacagttccaaaacgtacagtttcttggtcaggaattgatgcaatgagtcatgctttagaatcatacgtttctgttatgtcatcagattatactaagccaatttctttacaggctattaaacttatattcgaaaatcttacggagtcatatcattatgatccagctcatccaacaaaggaaggccaaaaagcacgagaaaatatgcacaacgccgccacattagctggaatggcttttgctaatgcttttttaggcattaatcactccttagcacacaaaattggaggagaatttggattgccgcatgggcttgctatagcaatcgcgatgcctcatgtaatcaaatttaatgctgtgactggtaatgtgaaacgtactccatatccaagatacgagacttatagagcacaagaagattatgcagaaatttcacgctttatgggttttgcgggtaaagatgattctgacgaaaaagctgtgcaagcactcgtcgcagaattaaaaaaacttacagattcaatcgatattaatattaccctgtcaggaaatggtgttgacaaagctcatctggaacgtgaattagataaattagccgatctggtctatgacgatcaatgtactccagcgaatccgagacaaccacgtattgatgaaattaaacaattgttacttgaccaatattaa

SEQ ID NO: 2723 - DNA, 564 bp, Artificial Sequence
  Optimized genes for Lactococcus lactis
atgagtttagtgggcaaaaaaattgaagaattctcaactgatgcttaccttggtggaaaatttatcaaagtatctgataaagatttttatgggaaatggtccgttttatgcttttatcctgctgacttttcatttgtttgtccaacagaactagaagatttggaagaaacatatcctacgctgaagagtcttggagtcgaagtttattctgcgtcaacagacactcattttgtccatgcggcttggcatgaacattcggacgcaatatcaaaaattacttaccctatgttagccgatccatctcaaaaaatttcacgtgctttcgatgttttggatgaagaggcaggcctcgcacaacgtggaacatttattattgatccagacggtgtaattcaggcccttgagatcaccgcagacggtattggaagagatgctagtcaattggttgataaaattaaagcagctcaatatgttcgaaatcacccaggagaagtatgtcccgctaaatggaaagaagatggtgcaagccttcacgtgggtattgatttagttggtaagatctaa

SEQ ID NO: 2724 - DNA, 711 bp, Artificial Sequence
  Optimized genes for Lactococcus lactis
atgactgaaattacacaactttttcagtataatactcttggtgcacttatggctggcttatatgaaggtacaatgacgattggtgaattattgaaacacggggatttgggaatcggaaccttagactcagtagatggagaactcattgttttagatggaaaagcttaccaagccaaaggagataaaacaatcgttgagctcactgatgacattaaagtaccatatgcagcagtcgttcctcatcaagccgaggttgttttcaaacaaaagttcactgctagtgacaaagaactagaagatcgtattgaaagctacttcgatggccaaaatttatttcgatctattaaaataactggtgaatttcctaaaatgcatgttcgtatgattccacgcgcaaaatctggtacaagatttgtggaagtatcgcaaaatcaaccagagtatacagaagaaaatgtcaagggaaccattgttggtatctggacacccgaaatgtttcatggtgtaagtgtcgcaggttatcatcttcattttatctcagaagatttcacttttggtggacacgttctggattttataattgataacggaacagttgaaattggggctattgatcaacttaatcaatcatttccagtgcaagaccgtaaatttttgtttgctgatttggacattgaagctttaaaaaaagatattgatgttgcggaataa

SEQ ID NO: 2725 - DNA, 1665 bp, Artificial Sequence
  Optimized genes for Lactococcus lactis
atgtcagaaaaacagtttggagctaatttagttgtagattctcttattaatcataaagtaaaatacgtttttgggatccccggcgctaaaatcgatcgtgtgttcgacctcttagaaaacgaggaaggaccacaaatggttgtgactcgacacgaacagggagctgcatttatggctcaagctgtaggtcgtcttaccggtgaaccaggtgtggttgtagtaaccagcggaccgggagtctcaaatttagcaacaccattacttacggcgacttctgaaggtgatgctatacttgctattggtggtcaagtgaagagatcagacagattgaaacgtgcacatcaatctatggacaacgctggtatgatgcaatctgcaactaaatactccgctgaagtcttagatcctaatacactatctgaatcaattgcaaatgcgtatcgtatcgctaaatcaggacacccaggtgctacattcttatcgattcctcaagacgttactgatgcggaagtttctattaaagcgattcagccactgagtgaccctaaaatgggaaatgctagtattgatgatattaattatcttgctcaagcaattaaaaatgcagttttacctgttattttagtcggtgctggtgcatcagatgcaaaggttgcttcttcattgcgaaatctccttactcatgttaacatcccagtagttgaaacatttcaaggtgcaggcgttatctcacatgaccttgaacatactttttacggtcggattggtctttttcgtaaccaaccaggggatatgctcttgaaacgcagcgatcttgttatagcggttggttacgatcctatcgaatatgaagctagaaattggaatgctgaaattgacagtcgtataattgttattgataatgcaattgctgagatcgatacttattatcaaccagaacgtgaattgattggggatattgcagcaacattagacaatctgttaccagcagttcgtggctataaaatccctaaagggacaaaggattatcttgatggtttacatgaagtcgccgagcaacacgaattcgatacagaaaatactgaagaaggaagaatgcatccattggatttagtgagcacttttcaagaaattgttaaagacgatgaaacagttaccgtcgatgttggttcactttatatttggatggctcgtcactttaaatcatatgaaccaagacatttgttgttttctaatggtatgcaaactttaggagtagccttgccttgggctattactgccgccctcttacgtcccggtaaaaaagtttattcacattcaggagatggagggtttttatttacaggccaagaattggaaacggccgttcgcctaaatctacctattgtccaaataatctggaacgatggccattatgatatggtcaaatttcaagaggaaatgaaatatggacgtagtgcagcagttgattttggatatgttgactatgtaaaatacgccgaagcaatgcgagctaaaggatatcgcgctcatagtaaagaagagttggctgagattcttaaaagtattccagatacaacaggacctgtagttattgatgtaccacttgattatagtgacaatattaaattggccgaaaagctgcttccggaagaattctactaa

SEQ ID NO: 2726 - DNA, 1476 bp, Artificial Sequence
  Optimized genes for Lactococcus lactis
atgaaaacaatcttgcaagctttcgaatggtatcttccatcagattcacaacattggaataatattaaagagaacattccagatcttggaaaacttggattttctggtttatggcttccgcctgcatcaaaagcagcatccggtgttgaagatgttggctatggtacatacgatcttttcgacctgggtgaatttgatcaaaaaggaacaataccaacaaaatatggtactaaagatgaatatttggacttgattaataccttacatcataataatattgaagtttatgccgacatcgtatttaatcatatgatgggagctgatgaaactgagactattgaagctgatatcaaagctgaagataatcacttgcacaatattgaaaataacaaaacagtcgaggtttggacaaaatttacctttccaggacgtcaaggtaagtacgacaattacatttggacatggcacaattttactggaattgattatgatgaaagaaaaaatcaagaagaaatcttagaatttgaaggacatgaatgggacgaaaacgttgattctgagaataataactttgattacttgatgggtgctgatttagatttctctgtttcagagaccgtggaacaactcgaaaaatggggtcactggttcagtgaaatgactaaaattgatgggttccggctcgacgctattaaacatatcgactttaagtattttgataagtggttagaacagcgtgcaaagcaattagatcgaaaattgtttattgttggtgaatattggagtgatgacttgggaaaactagaatattatttggaacaaagtagtgatcgtatacaactctttgacgttccccttcatttcaatatgaaagaagcttcttcaactaatggggaatttgacatgagaacattatttgaccatactcttacagccagccaaccagaattatcagtgacttttgttgataatcatgatacacaagaaggtcaagctcttcaaagctggatccctgcgtggtttaaagaacatgcatactcactaattttattgagaaagaaagagacacctacggtattttggggagatctttatggcattccatctcacaacgtcaaccctgttggtgataatttacgtacgatgatagcacttcgtaaagattcagaatttctgcgcgaaaatgattattttgatcatccagatattatcggctggactaatattctaaaaattgataacaaagaatacggactttcgtgtatcttaactaataaaaatgggggtagtaaatatatgattattgacaaagcatatgctggtaaagtttatattgatctttttggacgtcatgaaattcctataactttagatcaaaatggtggagcggaattctatgtaaatgatggcagcgtttctgtatgggtagataaagaaattgtctcaaaaattgaccagatgaattttcaaaactaa

SEQ ID NO: 2727 - DNA, 645 bp, Artificial Sequence
  Optimized genes for Lactococcus lactis
atgcaagaaattattattcaagtgatgaaccaatttggatatttcggagttgcttttttaattatgatcgagaatatttttcctcctattccatcagaagtgatactgacattcggtgggtttatgactacttattcagaattgggtataattggtatgatcatcgctgcgacaatcggatcagttttgggtgcattaattctttattttgttggccgtttactttctgttgaaagattagaaaaacttgtctctggacgcttgggaaaggtccttagattaaaacctgaagacattacgaaagctgaaaaatggttccttaaacgaggatacgctacaatttttttttgtcgtttcattcccctcatccgttctctgatttcgattccagcaggttcagcaaaaatgaaacttccatcatttttgattttgactaccttaggcacacttatttggaatattgttctcgtttgtctaggagccgccctaggggataattgggaaatgattgctggtattttagatagctatagttccgtagttgtagttatcttaggtattatatttattcttgcaattttgatctttgtaaagaaacgtttttttccaaaaaataaaaattacagtagtgatactgagaaataa

SEQ ID NO: 2728 - DNA, 1473 bp, Artificial Sequence
  Optimized genes for Lactococcus lactis
atggatgcagaaaacaaaaaaggaattggtttagctgcccttgttgcaattattgtgtctggagctattgggggaggcgtattcaatcttagtaatgatttagctactaacgcttctccagggggtgttgtaatctcatggatcgtgattggttttggtattctcatgttagtcctttcgttgaaccacctggttgtcaacaaaccggaattgtcaggtgttagtgactatgcacgagctggatttggaaatatggttggatttatatcaggttggggatattggctttctgcatgggcaggtaatattgcttttgccgttcttatgatgacaagtgttgactatttcttccctggagtttttcaagcaaaaaatggtagtttaactattttatccgtaatcgttgtatcaattgtttcttggggtcttactttgttggttatgcgcggtgttgaaggtgccgcagcgataaatgctattgttctggttgctaaactcattcctctgtttgtctttgttattgctggaattgtcacgttcaaggctggcgtgttttctgcgcatttttggcaaaattttgtcgcgaatacaaatgcggacggggtaattaagagtttgacatggtcaaatatgactggtggagatttgttcagtcaagtgaaaggtagccttatggtaatgatttgggtattcgttgggatcgaaggagcagctatgatgggtgatagagcaaaacgtaaatcggatgcaggtaaagcttctattttaggtttaattgctttacttgttatctacattctattatcactacttccttttggattcatgtcacaacaagaattagccaatactggacaaccaggtctagttcatatccttaatgctatggtcggcggatggggcggaagtcttatggccataggtctcgtgatttctctccttggcgcttggcttagctggactatgttacccgttgaggcaacacaacagctctcagaacaaaaacttttgccaagctggtttggtaaattaaatgataaaggcgcaccaaagaattcattgcttcttacccaattaattgttcaaatctttttgattgtaacatactttgtggctgatgcatataatgtttttgtttatttgtgcacagctgtcattatgatttgttatgcacttgttggattatatttgtttaaattgggaatacaagagaaaaaaacctcaaatatcattatcggttttatcgctgctgcatttcagattttagctttgtactattcaggttggcaattcgtttggctatctttaattttatacgcagttggatttatattgtatgctttgggaaaaaaagaatatggtactaaaatgtcaacggcggaacttattgcaacatttgtattaactgtacttgggattttagctgtctttggggtttatggaaattggttagcccgttgtacatggaactaa

SEQ ID NO: 2729 - DNA, 1131 bp, Artificial Sequence
  Optimized genes for Lactococcus lactis
atggaattggtccaatttggttgtgaagactggctaaatgtttgggaaaaaagtgctactattgatatcgctcaatcaacaatagattcactttcattggaagaggttttagcttttgaggaggataatggtgaagctttcatgagtcagatgatgaaagaaaagttttcttatggttggatcgaaggatctccagcatttaagtcggaagttgcaaaactttataaaagagtaccagaagacaatattctaagtactaacggagctactggtgctaatttccttactattttaggattaattggacagggtgatcatgttattgcacaatatccaagttatcaacaattatacgactggcctaaaacattgggtgcccaagttgactattggcatattaaagaagaaaacaattggttgcctcaaatcgaagaattacgtcgcctcgtaaaatctaacacgaaattgatttgtttaaataatgctgcgcaaccaacaggagccattatgagcccgaaatttctgtcagaagttgtggagattgctagatcagtagatgcgtatatcttgtgtgatgaagtatatttacccttagatgaagaaaccccatattccccaatcgcagatctctatgaaaaaggtatttcaacaaactctatttcaaaaacttattcagtacctggaatccgagttggatgggttgctacgcaagatcgtgatctatgtaatgaattccgtaaaattcgggattacaccttgatttgcactggggtgtttgatgatgcagttgctgcattagttcttaaacacaaagacaaagtgcttgaaagagcccgtaagatagtaaagggcaatctgtctattcttaaagaatgggtcgagaatgaacctcttgtttcaatggtttatccaaatgcagttagcgtcagcttcgtcaaatttgaagaattagatccaacaaaaacagaagactttgcaattcaacttctccgagaaaaaggagttttgattatacctggtaatcgttttgatcttagtggctacgctcgtattggttattgcactgatgaaacaacattacgtcaagggcttaaacttttatctgaatttttgcgcgaataccaagtttaa

SEQ ID NO: 2730 - DNA, 1023 bp, Artificial Sequence
  Optimized genes for Lactococcus lactis
atgacttttaaagaattgtcaaataagatcaatataaaagacgttcgcgaattaaatcatcttaatgatgaacaacaagaaaaaaaagaaaaacgtgataaagaacttgaagctattattaaaggagaagatgatcgtattctcctagtgattggtccctgtagttctgataatgaggctgcagttttggagtatgcccatcggttacttaaacttcagaaagaagttgaagacaaaattttcattgtaatgcgagtatacactgcaaagcctcgtacaaacggggatggttataaaggattgattcatgaacctgatgctgatggacacactgacttaattaacggtattaaaatggtaagagatctccactataaagttatcacagaaacaggtttaacaaccgctgacgagatgttatatccagaaaaccttccacttgtcgacgatctggtttcatattatgcagttggagctcgttcagtagaaaatcaacaacatagatttgtcgcttcaggaattgatgcaccaacaggtatgaaaaatcctactagtggaaatcttaaagttatgtttaatggtatgtatgctgcccaacaatcccaagatttcttatttggtaatgcagaagttgaaacatcaggcaatccattggcgcatgcgatccttagaggcggtcaagatgaaaatggaaaaaatcatccaaactattacactgataacttgctagaatcgatagagatctatgaaaaaatgggcttgcaaaatccttttattgtcattgatactaaccatgacaattctggtaagaaatacatggaacaaatccgtattgttcgtcaaacattagtgaatcgtaattgggacgaacagattcacaaatatgttcgagggtttatgatcgaaagttacttagaagatggtcgccaagataaaccagaagtttttggaaaaagcattacggatccgtgtttaggatgggataagaccgaagaattgattaatgagatatataattcttaa

SEQ ID NO: 2731 - DNA, 564 bp, Artificial Sequence
  Optimized genes for Lactococcus lactis
atggaatttcgtttggctaagaaatcagacgctaagcgtcttcttgaaatttacaaaccctatgttgagaaaacagccataacttttgagtatgaagttccaacgattgctgagtttgaaaaacgaattgaaaaaattggttcaagatatccttacatcgtcgcaattgaaaatgataaaattattgggtatgcatatgctggagcttatcgggaacgtgctgcatacgattgggtagttgaattaagcatctacttagatgaaaatgaaagacaacatggtgctggaagtgcattatatcaaaaactccttacagctctttctgtgttgaattatcagcgcgcctatgcttgtattacctatccaaatccagcatctgtagcatttcacaaaaaatttggtttcgaacaaataggattgtttcctaaagcgggttataaattcgaacaatggtatggcatcgtttggcttgaacgttcactccaaacaactgataaagttacagcaattaaactgttaactgacttaagtgaaaatgaattggaaaaaattctagcgaactaa

SEQ ID NO: 2732 - DNA, 1023 bp, Artificial Sequence
  Optimized genes for Lactococcus lactis
atggctattaatctggattgggaaaatcttggcttctcctaccgcaatcttcctttccgttatattgcacgctttaaggacggaaagtggtctgccggagagttaactggtgataatcaattacatatttcagaatcgtcaccagcattacattacggccaacaaggttttgagggacttaaagcatatagaactaaagacggttcaattcaactttttcgtcctgaccaaaatgctgcgcgtttgcagaatacagctcgacgactttgtatggccgaagtgcctactgaaatgtttattgatgcagtcaaacaagtagttaaagcaaacgaagattttgtacctccatacgggacaggcgctactctctatctaagaccattacttattggtgtcggggatgttatcggagtaaaaccagctgatgaatatatttttacagtatttgcaatgcccgttggtagttatttcaaagggggattagctccaagtaaatttgtcatatcacgtgactatgatcgtgctgctcctttggggaccggaggtgcaaaagtaggtggaaactatgctgcttcactccaagcggaagttggagcaaaagcttcaggttatgctgatgctatctatcttgatccaagtactcacacaaaaattgaagaagtgggagctgcgaatttttttggtattaccgcagataatgaattcatcacacccttgtctccaagtattctgccatctataacaaaatattctttactttacctagctgaacatcgtttaggcttgaaggccatagaaggagaagtttatgcgaaagacttaggtaaatttgttgaagctggtgcctgtggtacagcagcaattatttcaccgatcggaagaattgatgacggtgaagatagctacatttttcatagcgaaactgaagttggaccaacggttaaacggttgtatgatgagttggttggtattcaatttggtgatgttgaagcacctgaaggatggatcgttaaagttgattaa

SEQ ID NO: 2733 - DNA, 1053 bp, Artificial Sequence
  Optimized genes for Lactococcus lactis
atgaaaaaacgtgttatcgcagtttcagcccttgcacttgcatcagtggctgtgttagcaggatgtcgttcacatgatgctgcaggatctggaaaagctaaaactgatctcaaagcagcaattgttaccgaaattggaggtgttaatgatcgatcctttaatcaatcagcttgggaagggttgcagtcttggggaaaagaaaataatttgaaaaaagggactggttatacatattttcaaagcaatagtgcaagtgattatacaacaaactataattctgctgaacaacagggttacaaattactgtttggaactggattctcattgcaagacgctacgtctgcggcggctaaaaataatcctaagtcaaatttcgttattgttgattcagtcattaaagaccaaaaaaatgtcgcatctgccacattcgctgataacgaatcggcatatttagcaggtgttgctgctgctaaggctacgaaaacaaataaaatcggatttataggtggaatgcaaagcgacgtaattactagatttgaaaaaggctacgaagcaggtgcaaaatcagttaatccagatataaaagtagatgtacaatatgctggttctttttcagatgcggctaagggtaaaactattgctgcagcgatgtatggagctggcgatgatgtagtgtatcaatgtgccggtggtgttggcactggagtctttagtgaagctaaagcccttaacagtactaaaaacgaggcagataaggtttgggttattggtgttgatcaagaccaagaatacttaggtaagtataaaagtaaagacggtaaagattctaattttgtattagtttcaacaattaaagaggttgggaacgttgtcaaagatattgctgataaaacaaaggatggaaaatttcctggtggtacaatcgtcacctatgacttgaaaaatgggggagtaaatcttggcctagatagcgccaattcagaaattaaagatgcggtggctaaagccaaagctgacattatcgacggcaaaattactgttccaagtaaataa

SEQ ID NO: 2734 - DNA, 1503 bp, Artificial Sequence
  Optimized genes for Lactococcus lactis
atgaaccaacttattagtacctttcaaagtcagcaagggcaattttggcaagcattattggaacatattcaaatttcacttatctctatattcatcgctattcttatttctattccattggctcttttattgcgtcgattacctaaaattgcagaaccagtactacaagttactggaatttttcaaacaattccatcattagccttacttgggttattaattccttttattggtattggtagcttacctgcaatagttgcattagtggtttacgctatttttcctatcgtccagaatacatatactggtctagaacaaattgaaccatcattaatcgaagctgctactgcttttggaatgaatcgtagggagagattgatgaaattcgaattaagtttggctatgcattttataatggccggtatccgtacaagcactgtaatggttattgggactgcaactttggcagctttaattggtgctggtggattgggaaattttatacttttaggaattaatatgaatgatgtatcacttattttgattggagcgatcagtagtgctcttcttgctattatcttctcgtctttactgaaattccttgaaaaagctaaaatcaaaacaattcttatctccttttttattggattgttggttcttggaggctcttattatcgtccacaaacctcaaatcatccacaaatcactattgccggtaaacttggcgctgagcctgatgttttgattaatatgtacaaactcatgattgaaaaagattcaaatatacgggttaatttaaaatcaaattttggtgatacaacatttttgtataacgcactaaaggcaggtaaaatagacctgtatccagaatttacaggtacgattacgtcaacatttctcaaagatcccgtctcttcaactgatccaaatgttgtttggcaaaaggctgaagaaggtattaagaaacttaatcaatttacctatttatcaccaatgaaatttcaagatacatacgctatcgctgtcaaatctgacttcgcgaaagaacaccagcttactaaaatttctgacctcgctaatgtatctggacttacagccggattcgatgtcgaatttgctaatcgcagcgatggaaatattggccttcgtaagctatatggactggatttaaacgttaaaacaatgcaaaactcattaatttataaagcattgaattcaggtgcagttaatgtggcagaagtatacagtactgattctcaaattaaacaatataacttgacagtgttgaaagacgataaaaatttatttccaccgtatcaagcggcacctttgatgaaagaatcgctcttaaaaaaatatcctgaacttaaaaagattttaaacaaactctcaggcaaaattactgaccaagaaatgattgaaatgaattacgatgttaatgttaaacaagaagatgcggccaaggttgcagagagatatcttaaaagtaaaggtcttatctaa

SEQ ID NO: 2735 - DNA, 1041 bp, Artificial Sequence
  Optimized genes for Lactococcus lactis
atgttaatccatcgaaaagagtgggataagttccttaccgacttacatttaaacgtttctaattctagcgaaattgaaacaattgatgaaacagttgcaatttttgctaaaaacggtgaagtccttgcaacaggttcaattgcaggaaacgtaattaaatatgtagcaacttgtactaaaggtgagcaatcagccggcgagcgttttaataaaatcattactgaacttatgaatcgtttagcacaaaaaggaatttatcatgtttttgtttttacaaaaccaatgtatgctaaatcctttggttacttgggattcaaggaacttgccagagctgaacagggagtactcttggaaaaaggaagaccaaatattaccgattttctttcatcacttacggaaaagaaattggtaccagcgggagctaaaaaaatcgcagctgtggtgatgaatgcaaatccattcactttaggtcactgttatctggtagaacaggccgccgctgaaaatgattttgtttatgtttttgttgtctcaactgaccgttcgcttttccgcgctgatgaaagattagaccttgtgaaaaaaggtttaagtgctttaacaaatgtttctgttgtcagtggtggcgattacttggttagttttgctacttttcctgcgtactttattcaaagtgatgaagaagttatggactttcaaacacaaattgatgcgcgtatttttaaaaattggtttgttgaagctctaggaataactacacgctatctaggcgcagaacctttctctaaaactacatcaatatataaccaacaattgacagaagttttgagcgatgtcattgatgttaaaatcattgagcgaaaaaaagctgatgataatgaagaaatcatatcagctaccgctgttcgtgctgcaattgcaactaatcaattagaaaagattcggaatttcgtacccgaaactacatttgaatttattgaacaacatctccaagaattgcaagcacgtatcaaaggtgggcaaaaaacgaatgggaattaa

SEQ ID NO: 2736 - DNA, 291 bp, Artificial Sequence
  Optimized genes for Lactococcus lactis
atggaaattaaacagcatgcattagctggtacactcgaatcttcagatgttcaaatcatgatcgcaccagctaacaatggcattagtattgatctaatatcagacgtgaaaaaacaatttggaaaacaaattgaagcaactgtccgtcaagttttagctgcgtatgctatcgaaaatgctgatgtacaagttattgataagggtgcacttgatttggttattaaagctagagccattgccgttgtagagcgtgctattgaagcaaaagaccttaattgggaagtcttgtaa

SEQ ID NO: 2737 - DNA, 915 bp, Artificial Sequence
  Optimized genes for Lactococcus lactis
atggcggtagctgaacgtctgcggcgcactatgatgtttgttcctggtaacaatcctgctatgattaaagacgctggaatttttgaagcggattcgatcatgtttgatttggaagatgcggtgtctcttgctgagaaagatgctgctcgtgttttagtgtatgaagcagttaaaaacattgacttcggtggagccgagttggttgtccgtattaatggtttggacactccattttggcaaaaggatgttcgagctatggtaaaagccggaattgaagtcattagagcgcccaaagtcgaaactgctgcaatgatggaagaacttgaagttgaaatcgaaaaggcagaaaaggaattcggtattgaagttggcacaacacatgtgatggcagcattagaatctgctttgggtgtaatgaatgctcttgaaatcgcccgcagttgtccagaacgtatgatgggaattgctctcagcggaatggattatcgagttgacatgaaaacgaaatcatacccagacgaaggagaattatattttgcacgtaatatggtgttacatgcagctagagctgcaggggtagcagcttttgataccgtttttggtaacgttgatgatgaagaaggatttgtcaaaggcgtagaacttatacatcaactagggttcgatggtaaatcagtaattaatccgcgtcaaatccctcttgttaataaagtttatgctccaacaaaaaaagaagtagtccacgcacagcaagttatggaggcaattgaagaagcaaaacaaaaaggttcaggcgttattagtttaaatggacaaatggttgatagaccaattgttttacaagccgagcgtgttcttatgttggctaaagccgctaatgttctcgatgagggtggtaattacatagaaaaataa

SEQ ID NO: 2738 - DNA, 1539 bp, Artificial Sequence
  Optimized genes for Lactococcus lactis
atgaaaaataaagttaatagagaattgcccgatgagattttgaaaacaactggttataaaccttttgaaagcgtagaagtgaaagacctcgtgatcgaacgggtttctgccaaggttcgtcaatcagttaaaccaaataagctggtcgattctttagaagaagttgttcttaagacggttaaagacgggatgactatttcatttcatcatcactttcgtgaaggtgattatgtattcaataaagtaatgcgtattattatagaccatggatttaaagatttaaggatcgctccatcttctctaactaatgttatgaacgatattcttgtggaagctatcgaaaagggggttgtcacaaacattacttcatcaggaatgagaggcacgttaggtgatgtggtctcacatggagccctaaaaaacccagttatttttcgttcacacggaggtcgcgccagagcgatcgaaacaggagaaattcacattgacgtagcttttcttggaacgccaaatgcagatgaaatgggcaatgcaaacggaatggatggtaaagcaccatttggtagcttaggttatgctcttatggatgctcaatatgctgatacagttgtcgcgataacagattccttggtgtcatatcctaatacacctgctagtattaaacaaacacaggttgactatgttgtcaagatcgatgcggttggcaatccagacaaaatcggggctggtgctacacgttttactaaagatccgaaagagttaaaaattgcaagtatggttaacgatgtcattgttaatagtccatacttcaaaaatggtttttcatttcaaacaggtacaggtggagcagcactggctgtaactcgattcttacgccaaagcatgattgatcataatgttaaagctacttttggactcggaggtataaccaaaccaatggttgatcttttggaagagggattagttgataaattaatggatgtacaagatttcgatggtggatctgcacaatctatgcatttaaataaaaatcagcaagaaattgacgcttcttggtacgcagatccagcaaataaaggtgcaatggtagataaacttgatgttgtaattcttagtgctcttgaaattgatactaaatttaatgttaatgtaatgagtggaagtgatggcgttattcgtggagctatcgggggccatcaagatgctgggactgcaaaattgacaatcatttcagcccctttagttcgtggtcgtatcgcgacagtggtccccgacgtaaccactgttattacccctggtgattcgattgacgttttggttacagaaatcggaattgccattaatcctaaacgtacagatcttttggataaattgtcaaacattcctggtctaccagtttatactattgaagaactccaaaaaatagctgaggaaaaacttggtaaaccagaacctttagaatttactgacaaagtcgtagcattgattgaatacagagacggatcattacttgatattattcgagaagttaaagactaa

SEQ ID NO: 2739 - DNA, 663 bp, Artificial Sequence
  Optimized genes for Lactococcus lactis
atgaaaaaaattcaaatcgcaattgatggacctgcttcttcagggaagtcaactgtcgccaaaataattgcaagaaatcttgatttaatttatcttgacacaggagctatgtatcgtgttgcgacttttgtcgcgcttcaaaaagaaactgacgatgcaaaagaaattattgaattcatcgaaaaaaatccaattagttttatgaatggtcaaaaaggacaagaagttttgatgggttcagaaaatgtgaccgaagtaattcgaacaaatgaagttaccaatactgtttctaaaatttcagctatgacagaaattagagagtttatggtagctgaacaacagcgtattgcaaaaaacggcggaattattatggatggtcgcgatatcggtacagttgtgctcccaaaagcagatttgaaaatatttttagtagcatcagttgatgagcgtgctgagcgtcgatacaaagaaaacttaagcaaaggcattccaacagatttagaacggctaaaaatcgaaattagtgaacgtgaccgtaaagattcgacgagagccatatctcctttgaagcaagctgaagatgctatcttacttgatagtacaggtaagactattaatgaaattgttcaattcatcgaagacaaagctaaagaactgatgtaa

SEQ ID NO: 2740 - DNA, 609 bp, Artificial Sequence
  Optimized genes for Lactococcus lactis
atgaaagaaatctacgataagattcaagatattaacattatattaaaacgttcatttattgacttggggaaacctttggcatatcaagaagttgtagaaaagagtgctaaagttttggaaagctcactctttattatcgataccaaacgtaattgtttaggttatggatttacagactctgacaattcgtatcaagatgatattaatttacaaaattttttcatttatcaaaaaatctcaaaagatatttctagtcaacttcttaaccattacgaaatgtctgcctcattaccaatggctcaatctattcttgaaccagtcaaagaaataagcagtaaatttccaaataaatttctgtcctttcttcctatcgaaggtaatcacttaagattaggcacattgtttttgttgactgattctcccctagaagaggagaaaagaattcttgttgattttctttcaacatttattggaaatcagatgagttatattatgctcgctgagctagaaggtcaacgccgtaatgaaactttcgtttcacttgtgcaaagtttatcacgttcagaattagaagcattcaaatctattatcgaaaaaattgatcgataa

SEQ ID NO: 2741 - DNA, 432 bp, Artificial Sequence
  Optimized genes for Lactococcus lactis
atgattcgtattaaaatgaaaaatgaaattttaatgaccaaggcctttacacttttggaatcactccttgtgcttcttattatctctttcattactacattgttttctttggaaatcattcaaacaattcatttgttcaaaggtgagttatttgttttacagtttgaaaacttttataaacgtagtcaagaagatgctgcactattacaaaagtcagagagcctcgttgctaaaaatcaagaacttatttgtgaagatagaagtataacgattcctaaagaagtcgcagttaaggatttcactgtaaaatttgatgacaaaggcgaaaattcgtctcttcaaaaattaactatctcattaccatatgaaaaaaaatttattacataccaactggaaatcggaagtggtaaatttaaaaaaaaaatatcataa

SEQ ID NO: 2742 - DNA, 594 bp, Artificial Sequence
  Optimized genes for Lactococcus lactis
atgacagataatttttttgaaaaaacccttgctgcgcgcgaaattagccagatcccaggaatgttagaatttgacattccagttcacggggataatcgtggttggtttaaagagaattttcaaaaagaaaaaatgatgcccttgggttttcctgaaagtttctttgctgaggaaaaattacaaaacaatgtatctttttcacgtaaaaatgttctccgaggtttacatgccgaaccttgggacaaatatatatcagttgcagatggaggaagtgttcttggagcatgggtggaccttcgtgaaggcgaaaattttggccatgtttatcaaacagtcattgatgcttctaaaggtatctttgtcccgagaggtgttgctaatggattccaagtattgtcggatactgtttcttattcatacctggtcaatgactactgggcacttgagttaaaaccaaagtatgctttcgtgaactatgccgatccaactttgggtattaaatgggaagatgttgaaaatgcagaagtttcagaagctgataaaaaccatcctcttctaaaagatgtaaaagctttaaaggcagatgaattgtaa

SEQ ID NO: 2743 - DNA, 198 bp, Artificial Sequence
  Optimized genes for Lactococcus lactis
atggcccaaggaaccgttaaatggtttaatgcaactaaaggatttggttttatcacaacagaagaaggtaacgatgtcttcgctcatttttcagctattcaaactgatgggttcaagactttagatgagggccaaaaagttacatttgatgtagaagacggtccacgtggacctcaagcagttaatattcagaaataa

SEQ ID NO: 2744 - DNA, 1410 bp, Artificial Sequence
  Optimized genes for Lactococcus lactis
atgggttttatgagaaaagccgattttgaattgtaccgcgacgcagataagcattacaatcaagttttaacaacgcgtgacttcttggcgcttggagttggaaccataatatctactagtatttttacactaccgggtcaagtcgctgcccaatttgctggaccaggagtggtattctcttaccttctcgcagcattagtagctggttttgttgctctggcatacgcagaaatgtcaactgttatgccctttgcaggatcagcctattcttggattagcgttttgtttggggaaggtttcggatggattgctggatgggcgttgctcgctgaatattttattgctgttgcgtttgtcggatctggtttctcagcaaatcttcaacaacttcttgctccattgggttttcatttgccaaaagtcttagctaatcctttcggaacagatggtggggttgtcgatatcatctcccttcttgttattttgttatcagctatcattgtgtttcggggggctagtgatgctggtcgcattagtcaaatacttgtagttcttaaagttgcagctgtaattgcgtttattattgtaggaattacagtcattaaacccgcaaattaccacccatttatcccacctcataatccaaaaactggatttggtggctttagcggaatttggtcaggagtttctatgatttttctagcatatattggcttcgattcaatcgcagctaactcggctgaagcaaaaaaaccacaaaagaccatgccacgtggcatcatcggttcattgctgattgcagtagttcttttcgctgcagttactttagttttagttgggatgcatccatattcagcatatgctggtaatgctgcacctgtaggttgggccctacaacaatctggttattctgttctctcagaggttgtgactgcgattgctcttgccggtatgtttattgcattgcttggtatggtcttagcaggaagtcgtttgttatatgccttcgggagagacggtttgctgccaaaaggtttaggcaaaatgaatgcacgtaatttaccagctaacggcgtgtggacattagctattgtggctattgttattggtgctttttttccttttgcattcctcgctcagcttatcagtgctggtacactaattgcctttatgtttgttacattaggtatttattcattacgtagacgacagggaaaagatttacctgaagcgacttataaaatgcctttctatcctgttttgcctgctttaggttttattggaagcttgtttgtattttggggacttgatgttcaagctaaactttatagtggcatttggtttttaataggaatcttaatttattttgcctatgggaaccgtcgttcacgaaaatctgaagaaaaataa

SEQ ID NO: 2745 - DNA, 456 bp, Artificial Sequence
  Optimized genes for Lactococcus lactis
atggctggtcaaaaaaatacaagcgatattatagaggcgtatctgagaaagcttttagaggaagctcaagttattgaaatcaaacgggcagatttggctaatcaatttgacgtggttccatctcagattaattacgtcattaaaacccgttttacagcatctaaaggcttcgatgttgaatcaaaaagaggtggaggaggttacattaaaattgtaaaatatcaatatagtgcccgccatgaatttcttacagctttgtatcaaaaagtcccagcaaatttaagttcaaaagccgctcacgatattgtacaattactttttgacgaaaaggttttgactgaacgtgaaggtaacttactactcttagttattactgatggagcaatatcgcctttcactcgtgggattatgatgaaatcaattatcaatcgtcttgatcgagacgatgaaatctaa

SEQ ID NO: 2746 - DNA, 1347 bp, Artificial Sequence
  Optimized genes for Lactococcus lactis
atgaaaatttataatacttattcacgtcagcttgaagattttcaaccaatcgaacctgggaaagttaaaatgtacgtttgtggtccaaccgtttataactatattcatgttggaaatgcgcgtagtgttgttgcatttgacttggtacgtaaatatttagaatttcgtggatttgaggtacaatacatttcaaatttcacagatgttgatgacaaaatcattaatggagccaaagctgccaatatgactactaccgatttttcagaacgttatatcgctgcattttatgaagacactgatgcattaaatgttaaaagagctagccaaaatccaaaagctacagaatttattgaagctatgattgaatttatccaagaattagtcgataaagaatttgcttatgtatctcaaggagatgtatattttcgcgtgtcaaaatctaaagactatgctaagcttgcgaataaaaaccttgctgatttattggcaggtgcttcaggccgtaccgatgaggaaacaaaattgaaagaaagcccagctgattttgcactctggaaaagtgcaaaggctgacgaagtttcctggcaagcgccttggggagctggacgtcctggttggcatattgaatgttctgtcatgagtacatcattgttaggtgaaacaatagatattcacggagggggtgcagatttggaattccctcaccatacaaatgaaattgctcaatcagaggccaaaactggtcagaaatttgttaattattggatgcataatggttttgttaatgtcgacggggaaaaaatgagtaaatcattaggtaattttacaactgtccacgagttgcttcaagtggtcaatccacaaattttacgatttttcctcgctacaacacattacaggagacccgtaaatttcactgacgatgcactgactgaagctgaaaacaatatcaagaaaatcgaaaacgcatatcgtcatttagatgaacaagcagaaagtaacctttcggcacttacgacatttcgtaatgattttgttgcggctatggatgaagattttaacattgccaatggtatgactgttttctacgattttgtatcttgggtgaataagggtaatggcggaccggaggtaaaagagttcttcgatcaagttcttgaaattctaggtattaaatttaaattcgaacaatcactagactctgaaattgaagctatgattgaagcaagacaattagctagagaagttcgagattttgccaaatctgatgaaattcgtgatgcacttaaagcacaaggaatagttttggaagatacgaaagacggcgttcggtggcatcgcgaataa

SEQ ID NO: 2747 - DNA, 1308 bp, Artificial Sequence
  Optimized genes for Lactococcus lactis
atgaaaaagatcgctattatattttgtagttttctcatttcccttagtgtcttatcagactttagtgtgtcagctgctacaacaccgacaacaaatgactttacagttgcagccaaaagtgcaatcgctattgatgcatcaagcggtaaaattctttacgctcaaaattctgatgacgcgtcaacgagaatagcttctattactaagcttcttacggcttatctggtgtataaaaacgttgcagagaacaaattgacttggaatactaaagttccaatctcagattatgcatatgaattgacccaaaacagtaacgcttcaaatattcctcttgcccaaaatggacagtatacagtgaaagatttgttaaatgctttactccttccttcagcaaattcagctgcggtagcacttgcagaaaagattgcaggaagtgagcccaaatttgtagatatgatgacaaaacaaatgaaagattggggtatcacagattctcatttagtaaatgcgagcgggttacccaatgatgacttaaatggtcatatttatccaggatctggtgcgtcagctacaaataccatgtctgcaaaagcagttgctactcttagctaccacctgattcaagatttcccagaaatccttcaaatcactaaaaaaactgaaattccatttgatactggaaatgaagctaaaatgactttgacaaataccaaccaaatgttaagtggattttcaacttcacgtacaggggttgacggccttaaaacaggttcgacttctttccagattgattgctttgccggtactaccaatcaaaacggatttcgaataattacagttgttttggaagctacagatccagctgccgataattccactccatttactttaacaaatcaactaatgaattacgtctatggccattggcgcacgacttcattagtacaaaaaaatcaatcgttagacgattttaaagaaattacagtcattgatggtaaagaaaaatcagttcaattggttgctccacaaaatattacccctgttgtcccttatgccacagacggtagcgcagatactaaatcattaacagttaagttttcaaaagaaaaaacagcttctgttgaagcaacagtcactaaaaatcaaaaattggtgacgctctctactacagtaaaggatagtttgggatatttgcctaattgtactgctgaacaaattccacttgtagctaaaaaaactgttccacgttcttctgcacctaaagttttctggaaccattttgttaatttcgttaatgaaaaactataa

SEQ ID NO: 2748 - DNA, 747 bp, Artificial Sequence
  Optimized genes for Lactococcus lactis
atgaaaagacgtattacattttctcttatcgtcctcgttctacttatcattggagctcttggtttcattttaattactaatgacaaatcaaatagtacaaatgagtctgcgaaaaaaacaagcatttcaagttcaaaagaagtagctaaaaagaaagatctgcctgatgcaaaacaatctgattgggatcttgtgttagtttcaagaaaaagtccaaaagatgaaatgaacccaacattggctactgttaatggaatccaagttgatcaacgtatagcaagcgcagtacaacaattcctcgctgccgctcagcagatctcacctgcggaacaccttatttcgggttatcgttctgtgtcataccaagagggattatatcaatcctacgttcaagctgaaatgaacggtcaaggtactgtaaatagttctgggaatcccatttctgaagaagaagcaattaaaaatgttcaaacttattctcaaccgccacgctcaagtgaacatcaaacgggacttgccattgatatgtcaaacatagactcattaaatgaaagccaatatgctaaacaagtcgctgctattgcccctaagtatggctttgttttgcgatttccagagggcaaaaaagcagaaaccggaattggttatgaagactggcattttcgttacgttggtttggaaaatgcaaagtatatgacagaacataatttgactttagaagaatatttgaaattattaccagcataa

SEQ ID NO: 2749 - DNA, 240 bp, Artificial Sequence
  Optimized genes for Lactococcus lactis
atgaaggagcaaatctttgatattatagaaaccgtaagtggtactgatgaatttcgtgaagatctcgatatggatttgttcgaagaaggcattcttgactcaatgcgagccatcatgcttattgttgagttagaaggagcatttgacatttctttaccaccttcagaaatggatcgtgaagactggaatacagctaataaaattgcagctagagttcaagaaaaaaaagatgaaaactaa

SEQ ID NO: 2750 - DNA, 1659 bp, Artificial Sequence
  Optimized genes for Lactococcus lactis
atggcatatcaagcattatatcgtaaatatcggtctcaaagatttgatgaaatggtaggacaagaagtagttgcaactactcttaaaaatgcaattgttaatcatcaaatctcacatgcttatttattctcaggtccacgtggtacaggtaaaacaagtgctgctaaaatttttgctaaagctatcaactgtccaaatcaagtcgatggagagccttgtaacaattgcttcatatgtgactctataactaaagggagtctagatgatgttattgaactagatgctgctagtaacaatggcgttgatgaaattcgtgagattagagacaaatctacttacgctgcttcacaagcaacctataaagtctatatcattgacgaagttcatatgttgtcaacaggagcatttaatgcacttttgaaaacgctagaagaacctacagaaaatgtagtttttgttcttgcaacaactgagttacaaaaaattccagcaaccatcatttctcgagttcagcgttttgcattcaaatcaattactactggggacatccgtacatacttagccaaaattatggcagatgaaggtttggaatttgatggaaaagctttagatgttattgcaaaagcggctgaaggaggtatgcgtgatgccctgtccttactcgatcaagctttgtcattttcttctggaaaattggaagaaaatgatgcattactggttactggttcaattgctgcggatgctttagttacctatgtggcagctcttttcgaacatgatgaagccaaagctatgacagaattagataagatctttgccgaaggtaaaaacatgttgcgttttacagaagatttattggcatacttgcgagatctgcttttagataaaaatagccaatatgaccgcggtcaaattttttcttggattgatgtggctatcgaaagtcttaaaactattaaagaaactacccaaactaagattgccgctgatgtaatgactatgcgtttagcagaaattggccaaaataatttacttacggcttcgcaaggtgaaattccaaaccagcttacagctgaaattgctacgcttaagacagaaattaatcaactcaaagctcaaataagcgccggacagattcaagttaattctgattcacaaaacaatttacttacagagaatgttaaggcgtctcctaaaccaattgcttcaaaaaaacgccaaattaataaagaccttatctataaggcactcgctgaagctacaaacgaagctaggaaagcagcgctttcagcgtggcccgaattggtggcatcagtaacaaaacctgccgatagagccttgcttaataatacagcgccagttgcagcttcggaaaattttctcgttgtcacttttccgcacgaaaaccttgcaaaacgtgtttcagagaatgaagagttgcaattgttttgtggtaatcttttaagtagtatagtcggctttgcgccagaaattatcagcttagcagaacaagactggcaagaggttagagctgaatatgtatcaaatcttaaaagtgaaaatgtacaagaagatgaagaagatgaaaaagagcctgacgaaacagttaatttagctaaagaattgttcggagaaaaggtcgtggaaattaatgactaa

SEQ ID NO: 2751 - DNA, 447 bp, Artificial Sequence
  Optimized genes for Lactococcus lactis
atgagtaatgaacatacacaggaagtcttaaaccaaacagtcgcagatttgtcaaaggctagtgcactcgttcaccaaattcattggtacttacgtggtcctggatttctttatcttcatcctaaaatggatgaattaaaagaccaattagatgaacatctagacgaattcgccgaacgtttgataactattggaggttcaccagttagcactttagcagaatttgataagaattcaaaaattgaaatgacaccagctgtttggggaaaatctaattctgaaagagtgaaagagttgattgttgcgtataaatatcttactcaactttttaaagatggtatcaaaattgctggagacgatggggatgatgttacggtagacctttatactacagctctgggcgatatcgaaaaaaccttgtggatgattgaagctgaggtaggttaa

SEQ ID NO: 2752 - DNA, 558 bp, Artificial Sequence
  Optimized genes for Lactococcus lactis
atggttttagccaaagacttgaaatcaggtatgacatttcttaatggagaaaaattattacgtgttatggaagctagtcaccataaaccaggaaaaggaaacactattatgcgcatgaaactgaaggatgtacgtagcggttcaacttttgatgacacctaccgacctgaagacaaattcgagcaagctgtaattgaaacagtgacggcgcaatatttatattcaatggatggtattgctaactttatgaataatgaaacatatgaacaatatgagattcctgttgaacaggttaaagatgagcttttatatgtccttgaaaatactgatgttaaaattcaattttatggaacagaagtgatcggaatccaacttccaacaacggtagttctagaagtcactgaaactcaaccatctattaaaggcgcaacagttacagggtctggtaaaccagcaactatggaaactggtttggtagttaatgtccccgatttcgttgaagcaggcacaaaactcgaaataaatactcaaaccggtgaatacttgaagagagcttaa

SEQ ID NO: 2753 - DNA, 1302 bp, Artificial Sequence
  Optimized genes for Lactococcus lactis
atgtccatcattactgatatctatgcccgtgaagtcttggattctcgaggcaaccctacgttagaagtagaagtttacacagaagatggagcgtttggtagaggtatggttccttctggagcttcaactggagaacatgaagctgttgagttacgggatggagataaaagtcgttataatggcttgggtacccaaaaagcagttgataatgtaaataatattatagctgaagcaattattggatatgaggtgacagatcaacaagcaatagaccgtgcaatgattgcactagatggaacagaaaataaaggaaaacttggagcaaatgctattcttggggtttcaatcgcagcggctcgagcagccgcagacgaattaggagttcctttatacaattatttgggaggtttcaacgcgaaagttttgccaacaccaatgatgaatatcatcaatggtgggtcgcatagcgatgctccaattgctttccaagaatttatgatcgtaccagtaggagcaccgacattcaaggaagccctacgttggggtgctgagatttttcacgccttaaagaaaattcttaaagcccgtggtttggaaaccgccgttggggatgaagggggatttgctccaaaatttgacggtacagaagatggtgttgaaactattttaaaagctattgaagctgctgggtataaagcaggtgaagatggtgtcatgattggttttgattgtgcatcaagtgaattttatgaaaatggtgtttatgattatacaaaatttgagggagaaggaggaaaaaaattgtctgcgtctgaacaagttgattatcttgaagaacttgttagcaaataccccatcataactattgaggacggtatggatgaaaatgactgggatggctggaaaattcttactgaacgtttaggcaaaaaggttcagttagttggagatgactttttcgtgacaaacacaaaatatcttgaacgtggtattagagaaaatgcgtcaaatgctattctcattaaagtcaaccaaattggtactctgactgaaacttttgaggcaattgaaatggctaaagaagctggatttactgcaattgtaagtcatagaagtggtgaaacagaagattcaacgatttcagacatcgcagtcgctacaaatgcaggccaaattaaaactggttctctgtcacgcaccgatcgtatggctaaatacaaccaactccttcgcattgaagaccaacttgctgaagtggctcaatataagggtttgaaagctttttataatttaaaaaaataa

SEQ ID NO: 2754 - DNA, 1284 bp, Artificial Sequence
  Optimized genes for Lactococcus lactis
atgagtatagaagaagcattagaatggatacattcacgattgaaattcaatatcagaccaggactttcacgagtttcagcattgttagaattattgggccatccagaagaatctttgagcatgattcatgttgcaggaacaaatggtaaaggttcaaccgtggcctttacgcgctcaatttttatgcaggctggtcttaaggttgcatcatttacgtcaccttttattactacatttggtgaacgtatgagcattaatgcactccctatcgctgatgacaaattgatctattatgtcgaaatgatccaacccttagtagctgaactcgacaaagatgctgaattaacaggtattactgagtttgaaatcattacagctatggcatttaaatattttagtgatgaacaagttgatttagcagtaattgaagtaggtctgggtggccttttggacagcactaatgtcataaaacctgttgtttcagggattacaactattggacttgatcatattgatatcttggggagtactattgaagaaattgccgctcaaaaggccggtatcattaaacctggaattcctgtagttgtaggtaatattgaacttaaagcgctccgtgtcatctgggaagttgcacgtaaaaacactgcaagagtttatcaatttccatacgattatcgtactgaagtggaggaacatgagcactttaactttttctcaggtcaagaagccattttagatattgaaaaatctctggttggattgcaccaaatcgagaatgctggaatggctattgaactatctttggtgtatgctagtaaagttggaattgaacttacagaagatgttattcgttctggtattcgggaagcgttttggccagctcgcatggagaaattgggagaaaaaccattaatccttcttgacggggcacacaatgttcatgctatgaatcgtctccttgagaatttatctagtgaattcccagataagaaaattactattattttctctgctattacaacaaaagatatatcgcaaatgattaaaatgttacaaacagttaaaaactcacatttaattttaaccacttttgattatccaaaagctttaaatttaggagacttccaacgtcttgaagaagaaggcgttgaactggcgccgtcatgggaactagctctagtacgtgcacagaagaatttagctgaagatgatttgcttcttgtcacaggaagtctttacttttcttcccaagtcagagaatttcttaaaaaagaaaaataa

SEQ ID NO: 2755 - DNA, 1509 bp, Artificial Sequence
  Optimized genes for Lactococcus lactis
atgaagatttggactaaactcggtcttttgacgctggttggtttgtcattaacatcttgtggttcaaatactaaaaatactaaaggccaatcaagcagctctcaaaaagttgaaactagtgctggagctagtaaatcaaatatttatgcagacccatcaacattaagcgataaatatgacgttattattgtgggttcaggcggggccggaatgacagccgctattgaagctaaagatgcaggaatgaatcctgtaattttagaaaaaatgcctatcgccggtggaaacacctcaaaggcttccgcgggattgaatgcatccgagacgagcgtagaaaaagcgcagggcgtggctgattcgaatgataaattttatgaagaaacattaaaaggaggtggtgggacaaatgataaagcacttttgcgttattttgtcgaccattcagctggagctgtagattggttgaatactaatgggatagtgttagacaatcttactactacaggggggatgagtgttagtagaactcaccggccacatgatggatcagcagttggaggttacctagttaaaggccttgaagagaatattactaaacgtaacattccattatttgtcaactcagatgtaaccaaaattacagaaaaagatggaaaagtttctggagttaaggttaagatagaaggagaaactaaagatatttcttctaaagccgtagttgttacgacaggaggttttggtgctaataaaaaaatgattgcgaaataccgtccagatcttaaagattatgttacaactaatgctgctggatcgacaggagacggtataacaatgatcagtgagctgggaggagaacttgtcgatatggacaaaattcaaatccatccaaccgtattccaaaaaactggttacttagtatcagaaagtattcgtggtgagggagctatccttgtcaatcaaaaaggcaaacgctttttcaacgaaatggataccagagacaaagtttctgcggcagaattaaagcaacctggtaaatatagttatgttatcttcggtgaaggtaccaaagataaagtcaaagcagtggaacaatatattagtaaagatatggtggttgaagccgattcaatcaaaggtttggctgacaaactcgatattaacgaaaaagctttgacatcaactattgatggatggaataaagcagtttctacaaaaaaagatgaagactttggcaggactactggtatgacaacagaagtctctggtaaatattacgcaatcaaggttgctcccggtattcatcacactatggcaggagttaagattaacacgaatactcaagttttaaaaaaagatggttcaccgattcaaggtctatatgctgcaggtgaagttacaggaggtcttcatggcggtaatcgaattgggggtaatgctgttgcagatattgtaatctttggacgtcaggcaggcacacaatctgcagcttatgctaaaacatctaattaa

SEQ ID NO: 2756 - DNA, 693 bp, Artificial Sequence
  Optimized genes for Lactococcus lactis
atgagcatcattaagttgtcgaacgtctctaaaaagtattctaatggaacaacggcgttaagaaatatttcactcgaaattgaaccaggtgaattcacttatatagttggaccttcaggggctggaaaatcaacatttatcaaacttctttatcgtgagttaaagattgatcggggctcaggtactgtagcacagtatgacctcagtaaattaaaacgtcgagacgttcccatgcttcgacgctccgttggtgtggtttttcaagattataaattgctgccaaaaaaaactgtttttgagaatatctcatacgctatggaagtaattggtaaatctcctagagaaattaaaaaaagagttaatgaagttcttgatttagtcggtttgaaacataaaattcgcagttttccaaatgaattgagtggaggggaacaacaacgtgttgctatagctcgttctatcgccaacgcaccgaaagtactaatcgcagatgaacctacaggtaaccttgatccagaaaattcatgggaaattatgaatcttttggaaaaaattaatttacaaggtactacaattttaatggcaacacataatagccaaattgtaaataccttaaaacaccgtgtcattgctattgagaatggacgtattgtgcgtgaccaagaagaaggcgtttacggatatgatgattaa

SEQ ID NO: 2757 - DNA, 2130 bp, Artificial Sequence
  Optimized genes for Lactococcus lactis
atggcccgtgaattctcattggcaaatacacgtaacattggcatcatggctcacgtagacgcaggaaaaactacaacaacagaaagggtactttactacaccggcaaaattcataaaattggtgagacacatgaaggtgcatcacaaatggattggatggaacaggaacaagaacgaggaattacaattacatcagcggcaacaactgcagaatggaaaggaaatcgggtcaacatcatagatacaccaggccatgtggactttactatagaggttcaacgttctctgcgtgtattggacggagcagtaacagtactagatgcacaatcaggggttgaaccacaaactgaaaccgtttggcgtcaagctactgaatatggagttccacgaattgtttttgccaataaaatggataaaattggtgctgatttttattatagtttatcaacacttggagatcgcttaggagcgaatgcacatccaattcaaatccccattggtgcggaagatgactttattggtattattgatttagttacaatgaaaagtgaaatatataccaatgatttaggcactgatattaaagaaacagtcgtaggatctgatgaatttaacgccgagctcgctgcgctagattttaatgctgaagaatatactgaattggcaaatgaatggagagaaaaactaatcgaagctatcgctgatttcgatgaagatataatggaaaaatattttgctggagaagagattcctgaagcagaattgaaagcagctattcgtaaagctacaattaatgttgatttttatccaatgcttgctggctcagcttttaaaaataaaggtgtacaaatgatgttagacgcagttattgattatttaccgtctcctttagacatcccagctatacagggtgttaaccctgatactgatgaagaagacgaaagaccagcttcagacgaagaaccattcgcagcattggcatttaaaattatgactgacccatttgtcggtcgtctctctttctttcgggtttatagtgggactttagacgctggttcgtacgttctcaatactagcaagggtaagcgagaacgtattgggcgcatccttcaaatgcatgcaaatactcgtaaagagattcaaacggtttatgccggtgatatcgctgccgctgttggattaaaaaatactactactggagattctttgacggatgaaaaggcaaaaattatccttgaatcaatcgaagtgcctgaaccggttattcaacttatggtagagcctaaaactaaagccgatcaagataaaatgggagtggctttacaaaaattggcagaagaggatccaaccttcagagtagaaacgaacccagaaacgggagaaactgttatttcaggtatgggagaattacatcttgatgtgcttgtcgaccgtatgaaacgagaatttaaggttgaagccaatgtaggagcgccacaagtagcttatcgcgaaacattccgtgctggtacttcagctcgtggattttttaaacgtcagtctggtggtaaaggacaatacggagatgtttggatcgagttcactcctaatgaagaaggtgctggatttgaatttgaaaatgcaattgttgggggcgttgtccctagagaatttgtacctgcagttgaaaaaggtttggtggagacaatggctaatggggttcttgctggctacccaatggttgatattaaagctaaattatatgacggtagctatcatgatgttgatagttctgaaacagcttttaaagttgctgccagccttgcgatgaaagaagcagccaagacagcaaaaccagcaattctggaacctatgatgaaggtcaccattacagtgcctgaagaaaatttgggagatattatgggtcatgttacagcgcgtagaggtcaagtcaactccatggaggctcacggtaaaagtcaaattgttaatgcttttgttccacttgcagaaatgtttgggtatgctactacattaagaagttctacacaaggtagaggtacctttatgatggtcttcgatcactatagtgatgttcccaaatcagttcaagaagaaattattgctaaaaatggacgtaatgctgactaa

SEQ ID NO: 2758 - DNA, 1011 bp, Artificial Sequence
  Optimized genes for Lactococcus lactis
atggttgttaaagttggcattaatggtttcggtagaattggaaggttagcattccgtcgtattcaaaacgttgagggagttgaagtggttgctattaatgatttgacagatccagctatgcttgcacatttactgaaatatgataccacacaaggacgttttgatggaaaagttgaagtaaaagatggaggttttgaggttaatggcaagtttgtaaaagttactgctgaatctaatcctgcaaatattaattgggctgaagtgggggcagaaattgtacttgaagcaacaggtttttttgctacaaaggaaaaagctgaacagcatttacacgcgaatggtgccaaaaaagttgtcattacagccccggggggatcggacgtcaaaacaatagtttttaatactaatcatgaagtacttgatggaacagaaacagtcatctctgcaggttcatgtactactaattgtttggctcctatggccgacactctcaacaaacaatttggaatcaaagtaggtacgatgacaaccgtacacggatacacgggtgaccaaatgactcttgatggtccacatcgaggcggagatttcagacgtgctcgggcagcagcagaaaatattgttccaaatagtactggtgctgcaaaagctatcgggcttgttctaccagaattacaaggaaagttgcaaggtcatgcgcaacgcgttcctgtccccacaggtagtttgacagaactcgttacaattttaaataaagaagtaactgtggacgaaatcaacgctgcaatgaaagcagcttcaaacgaatcctttggctacaatgaggaccaaatagtttctagcgatattgttggtatttctaattcaagcttgtttgatgctacgcaaactgaagttactagtgcggatggagcccaattagtcaaaaccgtttcatggtatgataatgaaatgtcatatacatcaaaccttgtgcgtactttagcttattttgctaaaattgcgaaataa

SEQ ID NO: 2759 - DNA, 1878 bp, Artificial Sequence
  Optimized genes for Lactococcus lactis
atgaacttccaagagaattacgacgtcgttgttattggtggagggcatgccggtgttgaagcttcacttgctgcagcaagaatgggaagcaaaacattgttaatgacaattaatcttaatatggttgcatttatgccatgcaatccatcaattggtgggtcggctaagggcatagtagttcgggaaattgacgcattaggtggcgaaatgggtcgcaatattgacaaaacctatattcaaatgaagatgttaaatactggaaaaggtcctgctgtacgtgcgcttagagcccaagccgataaagatgaatatgcagactctatgaaaaatacagtctcagatcaggaaaaccttactcttagacaaggtatggttgaagaattaattctggacgaagaaaagaaaaaagtgattggtatcaaaactagtactggtactaaatatggtgctaaagctgttattattaccacaggaactgctctccgcggagaaatcattattggcgaattgaaatattcttccggaccaaataattcactttcttcaattggattagctgataatttgcgagaaattggatttgagatcggacgttttaaaactggtacccctccaagagtcttggcctcatcaattgattatgataaaactgaaatccaaccaggagatgaagcaccaaatcattttagttttatgtcatctgacgaaaactatttaaaagatcagattccttgttggttgacatatacaacagagaacagtcacactattttacgtggaaacctccatagggcgcctctatttagtggtatcgttaaaggagttggtcctcgttattgtccatcaattgaagataagattactcgtttcgctgataaacctcgtcaccaattattccttgagccagaagggagaaatactgaggaagtttatattggtggtttatctacaagcatgccagaagacgttcaatttgatttagttaaatcaattcctggtttagaaaatgcccaaatgatgcggcccgggtacgcaatcgaatacgatgtagttatgccacatcaattgcgtccaacacttgaaacaaaacttgtttcaggattgtttaccgcaggacaaacaaatggaacgtctggttacgaagaagctgcgggtcagggattggttgcaggaataaatgctgctctgaaagtacaagggaaatctgaatttattttaaaacgtagtgaagcttatattggtgttatgatcgatgatctagtcactaaaggcacgcttgaaccgtatcgactactcacaagccgtgctgaatatagattgattttacgtcatgacaatgcagatcgtcgtttaacagaaattggccgacaagtgggacttgtctctgacgaacaatgggaacactaccaagcgaagatggctcaatttgatcgtgaaatgaaacgtcttaattcggaaaaactgaaaccccttcctgatactcaagaaaaactcggaaaattaggtttcggtccaataaaggatgcgttgacgggggctgagtttttaaaacgtccggaagtgcattataacgaagtaattgattttataggccaagcacctgaaaaaattgatcgtactgtaatagaacttatcgaaacagaaatcacatatgaaggctacattaaaaaagctatggaccaagttgataaaatgcatcgccttgaagctaagcgcatccctaaaaatatggattgggataaattggattcaatcgcaactgaggcacgacaaaaattcaaaaaaattaatccagagacattaggacaagctagtagaattagtggtgtgaatccagcagatatttctattttgatggtatatctagaaggtaaataa

SEQ ID NO: 2760 - DNA, 369 bp, Artificial Sequence
  Optimized genes for Lactococcus lactis
atggttaaagaaagagaacttcgaagaagtatggctgtcttgcctattggtactgtaatgaaactgacagatctttcagcacgccagattcgttattatgaggaacaagaattaatctttccagaacgttctgacgggaatcggcgtatgtatagcttgaatgatatcgatgcactatttgatattgcagatttactccaagaaggaaacaatattgcggacataaaagagatttacgctaaacgtgatgccaagaaagctcaaacattatcaattggagaagttcatcacgctcttgaacgtgaatttgctcaacaaggcagatttggtaccccagaccctacacatttcactcaaccacgtatgtaa

SEQ ID NO: 2761 - DNA, 1440 bp, Artificial Sequence
  Optimized genes for Lactococcus lactis
atggctgatcctaatggctttttaaattatcctcgtaatgacaacccatatcgtgaattagctgaacggatcaaagattttgctgaattacaagtgccattgtcgactgaagaacggcagaagcaagctgcccgttgtatgcattgcgatgttccattctgccatcaaggaattttttacgggggtaaacgcgctgtttctgggtgtcctaatgataatcatatacctgaatggaatgatttaatttatcgaggacttcaacgaaaggcttacgaaagattgattctgactaaccctttcccagaatttacaggaagagtatgtcctgcgccttgtgaaaaatcatgtgctgaagcgctaaatggtgccggtgtaacaattaaagacaatgaaaggtttttaggtgatttaggaaatgatgagggatgggttgcagaaattggaaaagctgctgaacctaccggctataaaattgcaataatcggtagtggaccagctggcttatcagcagcttggcgtttgaatcaacttggtcactctgttacagtatttgagaaaagtgatagacttggaggactcctaatgtatggaattccaaatatgaagctcgataaaaaagtggttcaaaaacgtattgatttgatgacagaactgggtgttacatttgtcacgaatactgaaatcggaaaaacgatttcctatgaagatctttcagttaatttcgatcgaattatcttagctattggtgcgggtatcccgcgtgatcttaacatttctggtcgtgaagcagtcggtatccgctttgccatagacttcttgacagaaactactaaaacagttttggaagaaggagaagataatatttcacaaagtcttaaaggtaaaaaagtggtagtaattggaggtggagacaccgggaatgattgtatcggaaccgcagttagattaggtgccgcttcagtttctcaacttgagattactccatcacttccaacggatcgtcttgataataacccatggccagaatggcccatgacattaagagctgggtatgggcagaaagaagcagagttcgttggtaacacagatttaattacttatcaaatgacagcaacagcctttcaaactaacgctgaaggacaattgacaggactcaaagtcgcaaaagtcggccccgattttaaagcgttggaaggtactgaacaagtaattgaagcagatttagtgttgcttgcaatgggctttgttggcactgacactggtttacttgataaatttggtattcaagaaatttacgacgactatcgtactaataatgacaaagttctagtcgctggagacgctcgtcgcggtccaagcttggttatttgggcaattcgtgaaggtcgtaagacagctgaaattgttgatgagcaacttatcaaagttgcaacagcataa

SEQ ID NO: 2762 - DNA, 540 bp, Artificial Sequence
  Optimized genes for Lactococcus lactis
atgagtgaagaaaccaaagaggaaattaagaatgaaaaagtagacgaagaagtcacagaggaactcacagaagaagcacttgaagatatagttgaagaagagatcaatgaattagatgaggcccaaaaattagctactgaatgggaaaataaatttcttcgagtatctgctgaaatgcaaaatgtccagcgtcgtggaaatgaagaaagacttcaattaattaaatatcgttctcaagatttggcaaaaaaaatcctttcaagcttagataacttggaacgtgctcttgctgttgaaggactcacagatgacgttaaaaagggcttggaaatggttcaagaatcattgattagtgccttaaaagaagaaggtgttgaagaagtgtcatatgagtcttttgatcacaacattcatatggcagttcaaactgttcctgctgacgatgaacatccagcggattcaattgtacaagttttccaaaaaggttaccaactacatgaacgcctgttaagaccagctatggtggttgtcgcacaataa

SEQ ID NO: 2763 - DNA, 2490 bp, Artificial Sequence
  Optimized genes for Lactococcus lactis
atgcaagacaaaaatgttatcaatgttaatttagttgaagaaatgaaaacatcatttagagattatgcaatgtcagtgattgtagctcgtgccttaccagatgttcgtgatggtctgaaacctgttcaccgtcggatcctttatggaatgaacgagttaggaaatactcccgataaaccacataaaaaatcagcacgcattgttggtgaagttatgggaaaatatcaccctcatggtgactcaagcatttatgaagcaatggttcgtatggcacaatggtggtcttatagacatatgttggcggatggacatggtaatttcggttcaatggatggagacggtgctgctgctatgcgttacactgaagctcgtttaagtaagattgctatggagatgttgcgtgatattaataaaaatactgtggattttatggacaatttcgatggaacggaaagagaacccttagttttgccggcacgttttcctaatcttttggtcaatggaacgactggcatagctgtcggtatggcaactaatattccaccacataaccttggcgaaacaatcgatgctgtagatatgttgatggagaatccagaagcttctgtcactgatttaatgtcggttatccctggaccagattttccaacaggagctttagtaatgggaaaatctggaatacggcgtgcgtatgagacaggtaaaggtagtattacattacgtgcgaaaactcatattgaagaaatggccggcggaaaagaaagaattgtcgttaccgaacttccttatatggttaataaggctcgtttagttgaacatattgttcgattaaaccatgaaaaacgtattgaaggacttaccgccgtgcgagatgaaagtaatcgtgaagggattcgtgttgttatcgaagttcgacgtgatctctctgctcatgttattctaaacaatttatttaagcttacaagcttgcaaacaagttttggctttaatatgctggctattgaaaagggtattccaaagatcctttcacttaaagaaattcttgttgattatattgaacaccagattgaggttgtggaacgtcgaacagctttcgataaagcccgcgcagaagctcgtgcgcatatcttagaaggtttgaggatcgcccttgataatatagataggattattaccatcattcgtgaaagtcagacagacgctattgcacaaaaaacaatgatggacgaatttctcctctctgaaaaacaatcacaagcaattttagatatgcgcctccgacgacttacaggattggaacgtgataaaattgaagctgagtaccaagatcttgttgctttaatcgctgacttggctgacatccttgcgaaaccagaacgtgtaaaaaaaatcattcgtgaagaattagaagaagtaaaacgtaaatttgctgacaaacgtcgcactgaacttttggtaggtgaagttttgacacttgaggatgaggatttaattgaagaagaagacgtcctaataacgttatcgaataaaggttatattaaacgcctagcaaatgatgaatttagagcacaaaatagaggagggcgcggtgtccaagggatgggtatgtcagatgatgattttgttcaacacctagtttctacgtcaacccatgatcatcttctgtttttcacaaatttaggaagagtttatcgtatgaaaggttatgaaatcccagaatatggaagaactgcaaaaggcttacctattgttaacttgctgaagttagacgatggtgaaaaaattgcaacaattattaatgtcgatcgtgatcaagctgccaaatacttatttttcaccacacggaatggtattgtaaaacgcacatctactagtcaatttagcaacataagaacaaatggactaaaagctttgaaacttagagatggagatgagcttattaacgtattacgaactagtggagaggatgaagtcattattggaacacacttggggtattccgttagattcaaaggtgctgttgtgagagatatgggtcgtgcagctgcaggtgtgaaaggtgtaaatcttcgtgaaggggattacgttgtaggaacttcacgtattgatgattcacaagaagtactcgttatttcagaaaacggtcttggtaaacgtactcaagcatcagaataccctactaaaggtagaggcggtaaaggcatgaaggtgatgaatgtcacagaacgcactgggaaacttgcgggtttgacagcagttaatggggacgaagacctcatggtaataactgatactggcgtgattattcgtacaaatgtagctaacatctctcaaactggaagagcagcccaaggagtaaaagttatgcggttggatgatgaagctcagatagttacttttgcattggtcgaccctgttattgaagacgaagaagttgacgcaccagaattaacagacgaaactatttctaccgataataatgaggaataa

SEQ ID NO: 2764 - DNA, 1224 bp, Artificial Sequence
  Optimized genes for Lactococcus lactis
atgaaagaacgtttaaaagcgccagagttgcgttttgatggatttactgatgactgggaagaacgaaagttgctcgataacgttgaaaaagttctagactatagaggtaaaagcccggccaaatttgggatggaatggggaaccgaaggatacttggtcttgtcagctctgaacgtaaagaatggctatattgataaatctgtagaagctaaatatggagaccatgagctctttgatagatggatgggaaataaccgattggaaaaaggagacgttgttttcactactgaagctcctttaggtaatgttgctcaagtacccgataacaatgggtatattttgaaccaacgcgcagtcgctttcaaatccttgcaagaaacagatgacaatttttttgctcaactacttcgttcacctattgttcaaaatactttaaaagcaagctcttcaggaggtacagccaaaggtattggtatgaaagaatttgcaaaattaaatgcaagagtaccagaaacacacgaggaacaacggaaaatcggtcttttttttaaacaattagacgatacgattgttttacatcaacgtaaacttgatcttcttaaagaacaaaagaagggttaccttcaaaaaatgtttcctaaaaatggctcaaaaattccagaactgcgtttcgctgaatttgcagatgattgggaagaacgtaaattaggtgaagtagctacatttctaaatggaagagcatataaacaagatgaacttttagactctggtaaatataaagtcctccgtgttgggaatttctataccaatgattcttggtattacagtaatatggaattaggagataaatattatgttgataaaggtgatttagtgtatacatggtcggctacttttggaccacatatttggagtggtgaaaaagttatttatcattaccatatttggaaagttgaactttcaaaattcttggatcgcaattttactttacaacttcttgaggcagataaagcgcgtcttctcagttctacaaatggttcaactatgatacacgtgacgaagggcgatatggaatcaaaaattgttagtataccaaatatcgatgaacaaaaacaaattggatcattttttaagcaattagataatacaatcacacttcatcaacgtaaattggacttacttaaagagcagaaaaaaggcttcttgcagaaaatgtttatctaa

SEQ ID NO: 2765 - DNA, 1065 bp, Artificial Sequence
  Optimized genes for Lactococcus lactis
atgcttatatcaacaatggttgatgtatacgttgtatactatccaattattcttagctttatctgggcttctggagcgtttttgtctcgatggaaggaaagagataaaaaagcaattgatgaaacaaaagaattcgaaaaaatttctattgtcatttctgcttataacgaagaagaaacaattgaagaagtattattaagtcttcggaatctcaattatccttcattagaaatttttatcgtcgatgataaatcttcagaccgtactttagaaaaactttatgaagttaaaaaaagttttgatgactgggaaacgctaactatactcgaacagaaagagaataaaggtaaagcaacagcgctaaatgtggctttacaacaagttaattcaaagtatatgttggttattgacgcagatagttatttaagcaaagatgccttatcgtatcttcttgctgagcttacttcatctagtgatatcggagctgttactggccgtccaatcgttcgtaatagaacaacccttttaggtaaattacaaaccttggaatatctgtctgtgattgacgcaattaaacgtgcacaatcactctttctcggtgccattatgactgtatcaggggttatcgttatgtaccgtgtcgaagctcttaaagagattggtggttttaacactgaagtcatgacagaagatattgatgtaacatggcgtctacatcgcaatcaatggaaagttaaatacgttcctaaagctttatcatatattcttgttccagaaaatcttaaatctttgttgaaacaacgccgacgttgggcagttggtggagttgaagtcttgatttcaaatttgtcatgggtgtttaaaagaggcgagttcaagcatcgttttttactgatcgaaatgatctgttcacacatatggtcctggttttttttgatcgaaagctatcaatatttcttgcagatgttgttaaaccaagaatttaaggttagtggacaaattattgtaatttttgtattaattagttttttcgttttctttcttggaccccaaattgttaaataa

SEQ ID NO: 2766 - DNA, 2799 bp, Artificial Sequence
  Optimized genes for Lactococcus lactis
atgaaaatcaaagacactctcaatttgggtaaaacagcgttcccaatgcgtgctggattaccaaataaagaaccaaactggcaaaaagactgggcagatgcaactttatatgagaaacgtcaagaacttaatgagggaaagccttcttttatgcttcatgatgggccaccatatgctaatggtaacattcatcttggacattctcttaataaaatttccaaagatattattgttagatataaatctatggcaggtttccgagctccatatgttcctggctgggacacacatggtttaccaattgagcagcaacttgcaaaggctggtatgaaaagaaaagaaatggatctattggattatttagaagaatgcagaaaatacgcgatgaaacaagttgatatgcagcgaagtgattttaaatcattgggcgttttggctgattgggaccgcccataccttacacttttacctgaatatgaagctgcgcaaatccgtgtgttcggtaaaatggctgaaaaaggttatatatataaagggcaaaaaccaatctactggagtccatcaagtgaatcatcattagcagaagcagaaattgagtatcaagatgttcgcagtgcaagtatttttgtggcttttaaagcaaaagacacaaaaggcaagcttcctgaggatgttgaatttgtgatatggacaaccactccctggacaatcccgagcaatcttgggatatttgctcaccctgattatgattatagcgtagtcgcagttaatggtcgtaaatttgttattgcttcggaaatgttagaagctgttgctgaaaaattagagtgggaaaatccagaagtccttcaaaccattaagggatcagaacttgaatacatggtagcaaaacaccctttttatgatcgtgaaactttaattatgaatgctgactatgttaccttagattctggtacaggattagttcatgttgctcccggtcatggagaagacgactacttcgcatctcgtaaatataaattgccagtattaagcccaatcgataatagaggatattacacagatgaagcacccggattggaaggattactttacgatgaaggtaacaaagtagtatcaaaatggttagaagaaaaggacgcgctattaaaactagaatttttcactcattcttatcctcacgattggagaactaaaaaaccagtgatatttcgtgccacaccacaatggtttgcttcaattgatgactttcgacaaaatatcttggacgaagtcgaacgggtggactgggttattccttggggcaaaacgcgtctttttaatatggtccgcgatcgtggtgattgggtaatttctaggcagcgcgcgtggggagttcctctcccaatattttatggtgaaaatggtgaacctataattacaccagaaacaactgaacatgtcgctaaattatttgcagaatttgggtctaaggtttggttcgaaagagaagcaaaagacttgcttccagaaggttttacacatccggctagcccaaatggtgaatttacaaaagaaaaagatattatggatgtttggtttgattcaggaagctcatggaacggggtactcaatgaaagagattatctttcatttcctgccgatctttatttagaaggttccgatcaatatcgtggatggtttaatagttctatcactacatctgtagctgtaaatggtgttgctccttacaaagcagttctttcacaaggcttcgtattagatggaaaaggaagaaaaatgtctaaatcaattggtaacaccattgtgcccaaagatgtcaccaaaaaatttggtgcagatatcttaagactttgggttgcttcgattgatactgaatctgatgttcgagtgagtatggacatcctctcgcaagttagtgaagtttatcggaaaattcgtaatacattacgttttttaattgccaatacttcagatttcaatccaaaagaagatgctattgatttcgctgaattgcggccagtagataaatatatgttggttaagtttaatgaactcgttaagcaaattcgtactgcttatgataactattcattcatgactgtctataaatcaattattaattttattacgaacgacttgtcttcattttacctagatttcgccaaagacgtggtttatatcgaagcagctaatagtccagagcgtcgctcaatgcaaacggtcatgtatgttattttgaaagaccttgtcaaaattttggttccaatcttgcctcacactgcagaggaaacatggacgtatcttgaacatgaaccggagaattttgcttatttagccgagatgcctgaagccgccgaaattcctggatcagaagaactgcttggaaattggcaagaattcttagattttcgtgataagattttaaaagccctggaatctgcacgtgaggctaaattaattggaaaaagtttggaagcaacagttactatttaccctaacgaagttgtacgtactcttttgactgccattgacgaaaacgttgcacaactgctcattgtatcaaattttgttgtagctaatgaaccagttaataatgcgcctgaaagtgctatgaaatttgatgatcttgcagttttggttgaacacgcagcgggtgaggtctgtgatcgttgtcgacgtacagatgaaactgttggccataacgctaatgagcacttgaagatgctatgtgaacattgtgctcatatcgttgaaacagaatttccagaaattctggaagaaggatttgaagattaa

SEQ ID NO: 2767 - DNA, 1023 bp, Artificial Sequence
  Optimized genes for Lactococcus lactis
atggctgttacaatgtattatgaagatgatgtcgaagtatcagccttagctgggaagcaaatcgcagttataggctatggtagccaagggcatgcacatgctcaaaatttgcgagattctggacataatgttattatcggtgttcgtcatggaaaatcatttgataaagcaaaagaggacggattcgaaacatttgaagtgggagaagctgttgccaaagcagatgtaattatggttcttgctcctgacgagcttcaacaaagtatttatgaagaagatattaagccgaatttgaaagctggttctgcattgggcttcgctcatggttttaacattcacttcggttatattaaagtccctgaagacgtggatgtttttatggttgcccccaaggcaccaggtcaccttgttaggcgcacatatactgaaggattcggtactccagcattatttgtgagtcaccaaaacgcttcaggccatgcacgtgaaatagctatggattgggcaaaaggaattggttgtgcacgtgttggaattattgaaaccacatttaaagaagagaccgaagaagatctttttggtgaacaagctgttctgtgtggtggacttactgctttagttgaagctggttttgaaacattaactgaagctgggtatgcaggtgagttggcttattttgaagtcttacatgagatgaaattaattgttgaccttatgtacgaaggaggatttacaaaaatgagacagagtatttctaatactgctgaatttggagactatgtaactggccctcgtatcatcactgatgctgtcaaaaaaaatatgaaactcgtattggcagatatccaatcgggaaaatttgcccaagattttgtagatgattttaaagcgggtcgtccaaaactaacggcgtaccgggaagccgcaaaaaatttagaaattgaaaaaattggtgctgaactcagaaaagcgatgccattcacacaatcaggggatgacgatgcgtttaaaatttaccagtaa

SEQ ID NO: 2768 - DNA, 477 bp, Artificial Sequence
  Optimized genes for Lactococcus lactis
atgcggaggatgatcattgctaagttacacaacgttacaggtatcatgaaccgtttcacggcagttcttaatagaagacaagtcaatattttaagtattactgcaggggttactgaatctcaagatcttactcatacaacttttgttattgaagtcgatcatttggacgaagttgaacaaatcataaaacagttgaatcgactgattgatgttatagaggttgctgatattactgacctccctcatgtagagcgtgaagtagttttaattaaagtttcagctccaccaacaattcgtgcggaaatttttacaatgattgaaccttttcgcgttaatgtggtggacgtaaatcttgaaaatgtcacaattcaactaaccggtgattcagctaaaatcgaagctttgattgatgttgtatctccatatggtattttaaatatggcccgtacaggcagcgcaggatttgaacgtggataa

SEQ ID NO: 2769 - DNA, 219 bp, Artificial Sequence
  Optimized genes for Lactococcus lactis
atggccaaggatgatgttattgaggtagacggaaaagtggttgatacaatgccaaatgctatgttcaccgttgaacttgaaaacggtcatcaagttttggcaacaatttctggtaaaatacgcaaaaattacattcgtattcttccaggagacaaagtacaagtcgaattatcaccttatgatttaactagaggccgtatcacttatcgatttaaataa

SEQ ID NO: 2770 - DNA, 951 bp, Artificial Sequence
  Optimized genes for Lactococcus lactis
atgactgaatttatcacactaggagaacctttggttgttctcgcatccgaaaatcaagatatttctcttgatgtagctgaacacttttctaaatacttagctggcgcggaactcaatgttgcaattggattatctcgtttgggacataaaggaatatatttgagcaaagttggggaagattcattcggtaactttattattgaatcggttaaaaaagcagaaattgaaaccacttatcttactaaagataaaaactatagtacaggattctatctgaaacaaaaagtctctgaaggtgatccaaaggttgattattatcgtaagaatagtgccgcagcaaacctttcaattgcagagttaaaagctcttgacttaagcggtatcaaaattgctcatttgtcaggcatttttccagctttatcagaaacaagtcttaaaacattccaagctttcaatcagaagttaaatgaagcagatattcttaccatttttgatcccaatttgcgcccggttttatgggataatcaagaaaaaatgattcgaactataaatgacttagccaaacaatcacaaatcatccttcctggtattaatgaaggtgaaatccttacaggatcttcagaaccagagaaaattgcgaatttttacttggaacaaagtcctcttactaaaattgtagtggttaaattgggagcagatggagcttttgtgaaacttaaaaatggggaacaatattttgttagtggttttaaagtagctaaagtagtagatactgtcggtgctggagacgggtttgctgttggtttagaatcagcattactagagggtaaaacattgaaagaagctgttaaaagagcgtgtgccgttggtgctctggcagtccaatcatctggtgactcagaaggctatccaacgaaggaggaactcaaagctttttacaaagaaatgtaa

SEQ ID NO: 2771 - DNA, 1443 bp, Artificial Sequence
  Optimized genes for Lactococcus lactis
atgatcaaattttttaattcaatgatttttaaaggtgttgttgctcatttgttacttttcgttattctttttatgtcttcatttgattataactttgcacacctcagtacatttattggatactatcttttctctttggttttcgttttagtttttcttaatcaacaacatcgaatgattgtcaatgttagtaaacaaatgaatgatatcaaaaatggttatctgaatcgtgacaaaattcctaaaggcacttccgaaataaatgaactatatgatgagattttaaaattaggagaagatatcgtaagaacacaaaataacttggaaaatcaacgtaatcaattggatagtattttagcttacatggttgacggagtgattgctactgatcgacgcggtaatatcataatggcaaacaaatcagccttacattatttaaatacagataatgatctcttgatgcaaaaaaatattgttgaagtattgaaaatcactgatcaatacaatttttatgacttattagaaaaagaacccgaaatcacaattgaaacacatgactcaggaaacgaatctattagtcttcacattaagttcgcattatttagacgtgaatcaggatttatttcgggtattattgcagtacttcatgatatgacagagcaagataaagctgaacgtgagcgtcgtttgtttgttagcaatgtatcacacgaacttcgtacaccactaacctctgtaaaggcttatcttgaagcattagaagatggcgcgattgaagataaagaaaccgcaagctcattcattaacgtgtctctaactgaaacgaatcgtatgattcggatgatttcggatcttttgacattatctaggatggatcaagacagaatcgttcttaataaagaaatgatcaatttaattgcttttttagactatcagattaatcgccttgatcaaattcttgagaccgaaagcaatgaccttatttcttcaaactttacgttggtccgtaagtatagtgaacaaccaatttgggtcgaaatagatactgataagatcgctcaagttatcgataacataattggcaatgctattaaatatagtcctaaaggtggtactattacaatttcagttgaaaaaagagaaagtgatgttctgatttcaatctcagaccagggaatggggatcccaaaatcagatcttctcaaaatttttgaccgattctacagagtagacaatgccagccgtaactctaaagtgggaggaactgggttgggtttatcaatagttcatgatattgtcaaaattcatggtggtactatttttgcttcttctgaaggagaaggtaaagggacaacattttcatttactctcccatatagtttggaagcagcggatgactgggatgatggtactgatgaattcgaatttgaagataatgagtaa

SEQ ID NO: 2772 - DNA, 963 bp, Artificial Sequence
  Optimized genes for Lactococcus lactis
atgagtaaaaaaatcgttacactagccggtgatggtatcggaccagaaattatgtctgcaggccttagtgttttaaaagccgtttcaaaaaaaattgattttgaatatgaattagaagcaaaagatttcggaggtattgctatagataaacatggtcatcctttgcctgaagaaacattacaagctgtgaaaaatgcagacgctattctattagctgcgatcggtcatccgaaatataataatgctaaagtaagaccagagcaaggacttcttgcgttacgtaaggaacttggtctttatgctaacgtgagaccactgaaaatttacccagcattgaaaaaattatcaccaattcgtaatgtcgaaaatgtagattttttgatgattcgtgaattgacaggcggaatttactttggacaacatgaattggccgatgataaagcacgtgacgtaaatgactattctgctgatgaaatccgtcggattcttcattttgcattcaaatcagcacaaagcagacctcgtaaattattaacttctgttgataaacaaaatgtcttagctacctcaaaactgtggcgcaagatggctgatgaaattgcagatgaatatccagatgttcgacttgaacaccaactcgtagactcatgtgctatgctcttaattactaaccctcaacaattcgatgtcattgttacagagaatttgtttggtgacattttaagtgatgaagcatcatctctcgctgggagtttgggtgttatgccttcctcaagtcacggatttaatggccttgcattgtatgaaccaattcatggttcggctccagatattgctggaaaggggattgcgaaccccgttagcatgatcctttctatcgcaatgatgcttcgagagtcatttggtcaggaagatggagccactatgatagaaaaagctgttactcaaacatttacggactaa

SEQ ID NO: 2773 - DNA, 1383 bp, Artificial Sequence
  Optimized genes for Lactococcus lactis
atgtctggtaaaacaatttttgataaattgtgggatcaacatgttatcgctggtaatgaaggagaaccacaacttttatatattgatttacatgtaatccatgaagtaacctctccacaagcatttcaaggtcttagagaagctggccgtcgcgtgcgtagaaaagaccttacttatggaacactggatcataatgtacctacacaagatatttttaacattcaagaccttatttctaaaaaacaaatcgacacatttactaaaaatgttaaagaattcgatgttccagcggaaacacacggaggaaaaggtcaaggtattgtccatatggttgctcctgaaagcggacgtacccagccaggtaaaacaattgtttgtggggactctcatactgctacaaatggtgcttttggagctatcgcttttggtattggtacttcagaagttgaacacgttttagcaacgcaaactatttggcaagttaaacccaaacgtatgaagatagaatttcaagggcaccctcaaaagggcatctatagcaaagatttcattttagctttgattgcgaagtatggtgttgatgccggcgttggttacgctgtggaatacagtggagacgcaatttcggatttatcaatggaagaacggatgactatttgcaacatgtcaattgaatttggtgctaaaattggtctcatgaatccagatgagaaaacctatgattatgtcaaaggaagggagcatgctccgaaaaatttcgatgaagcagtatccaaatgggaaaaattagtctcagattcagatgcacaatatgataaaatcctttcactagatgtaagtcagttaaaacctatggtaacttgggggacaaacccaggtatgggactcgaattcggagagaaatttccagagattaataatgatcttaattatgaaagagcctatcaatatatggacttaaaaccaggccaaactgcgagtgcgatagatttggggtacatctttattggctcttgtacaaatgcacgtttaggagaccttgaagaagcagccaaaattattggagatcgtcatattgctgacggtttgactggtatagttgttccaggtagtcgacctgttaaagaagcagccgaagcacaaggtctagataaaatttttaaagaggctggattcgaatggcgtgaacctggatgtagtgcctgtttgggaatgaatcctgaccagattcccgaatacgtgcattgcgcttctacatcaaatcgcaactttgaaggacgacaagggcataatgctagaactcacctttgttcaccagctatggctgcagcagcagcaatcgctggtaagtttgtcgatgttcgtacattggttacggattaa

SEQ ID NO: 2774 - DNA, 576 bp, Artificial Sequence
  Optimized genes for Lactococcus lactis
atggaaaagtttacaatttataaaggtacttcagttcccgttatgaatgataatatcgacactgatcaaattattccaaaacaatttctgaaagcaatagacaaaaagggtttcggcaaaaacctattttatgagtggagatatcttaaagactacgatgaaaacccagattttattctcaacgctccaaaatataaaaaagcatctttacttattagtggagataatttcggctctggaagttctcgtgaacatgcagcttgggcattatcggattatgggtttcgagctattattgcgggttcatatagcgatatattttacaataatgccttgaaaaatggacttttgcctattaaacaacctcgtgaagtactcaatcaacttacaaaattatcaagtcaagaagagattaccattgatttgccacatcaacttattatcacatcattgggtgattttcacttcgaaattgaccctatttggaaagataaattaattaatggtttagatgatatcggaatcactttacaatatgaagaagctatctcagcttacgaacagaagaatcaataa

SEQ ID NO: 2775 - DNA, 1158 bp, Artificial Sequence
  Optimized genes for Lactococcus lactis
atgaaaaaagcggtacactttggtgcaggtaatattggacggggcttcatcggagaaattttgtctaaaaatggttttgacattcatttcgtagatacaaataaaagtattattgcggaattaaataatcgtcatagctatgaaataggcattgcatcgagtgaacatgaaaaaatatcagttaaggcagttagcggaattaataactctgaaaatcctgaagcagtaattgaggcaatcgccaaggctgacattttgactacagcaattggacccaatgttttgccttatattgctgagcttattgctaaaggattacaaaagcgaaaagaagaaaaagttcagagtccattagatattattgcttgtgaaaatatgatcggaggttccgaatttctggaggaaaaagtatcagattatcttagcgaatctgataaattatacctttctaaattcattgggtttccaaacgctgctgttgatagaattgttccagctcaaaaacataaagacgtcctttatgttgaagtggaacctttttcagaatgggttattgatgcttcacatctgaagaataaagaaattaaacttgaaggtgtccattatacaactgatttagaaccatttatcgaacgtaaattgttttcagttaactctggtcacgcagcagttgcatacagttcagcctataaagggtataaaactatcctcgagggcttacaagatgaagaaattcttaatatacttaaagccgttcaaaaagagacccgcgctcttctcctagctaaatgggcacaatactttaaacaagatgaattgattaaatatcatgaacttattatttctcgatttagtaacccggaaatcattgatgaagtatcacgcgtggcgagaacaccaatccgtaaattaggttatgatgaaagattcatacgtccaattcgtgaactcaatgatcgtaaattatcatatcaaaatcacttggacatcgtcggtaaaatttttgcttaccacgatgaaaatgacgctcaagctatccagttacaagaaaaattaaaaattacggaactacctatgcttatcgaagaagtgactggattgtcaaaccaaaaattgattttagagatagaaaaagttattaatcattataagaaataa

SEQ ID NO: 2776 - DNA, 942 bp, Artificial Sequence
  Optimized genes for Lactococcus lactis
atgattgaaaaatataagaatattctcattacattcatagcattagcagcaatcgtgtttttagtaggatgttcaaataaaaaaacagaccaagtaaccgataaaaagataaatgttgttgttacaaattcaattctagctgatattactaaaaatattgcagatgataaaatcaacttgcattctattgtaccagtcggaaaagatccacatgaatacgaacctttgccagttgatgttcaaaaaactagtaaagcggatctcattttctataatggtcttaatttagaaacagggggtaatgcatggttcactaaacttgttaataatgcgaacaaaaaagaaaacattgattattttccagtctctacaggggttgaggttatttatcttgagggtaaaaatacggaaggaaaagaagatccgcacgcttggctgaatttggaaaatggtattatttatgctaaaaatattgaacaacagctatcgaaaaaagatcccgttaacaaagacttttataaacataatttagataaatatgtaaaaaaacttagtgatcttgaccaacaagctaaaagtaaattttcattgatccctgaaaacgaaaaaatgatcgttacttctgaaggatgttttaaatacttttctaaagcctataatatccctagcgcttacatttgggaaatcaatactgaagaggaaggcacccctgaccaaattaagaatcttgttagaaaattacgtgccacagaattaaaaagtttatttgttgaatcttcagtagataatcgtccaatgaagacagtctccaaagatactggaattccaatatattcaacaatttttactgattcagtggctaaaaagggtgaaaacggcgacagctactattcaatgatgaaatggaatttggaccaaatttataaaggtcttgctaagtaa

SEQ ID NO: 2777 - DNA, 1314 bp, Artificial Sequence
  Optimized genes for Lactococcus lactis
atgagcctgtttttggacactgcacgtattgaagttaaagcaggtaaaggtggagatggtgctgtcgcatttagacgagaaaaatatgtccctgacggaggcccggcgggaggtgatggaggtaaaggcggatctgttatttttaaagttgatgagggaatgagtacattgatggatttccgttacaaccgtatttttcgtgggaaacctggagaaaaaggtatgaataaaggaatgcatgggcgtggagcagaagatttgattgttcatgttcctcaaggtacaactgttaaagacaatgagactggcgacgttctcgttgatcttatcgaaaaggaccaagaatttgctgttgctaaaggaggacgtggcggaagagggaacatccgctttgctaccccacgtaatccagctccagaagtcgcagaaaatggtgagccaggtgaagataaaatattattattggaactgcgcgttcttgcggatgttgggcttgtgggttttccatctgttggtaaaagcactttgctctcagtagtatctaatgcccggcctaaaattggagcatatcattttacaacaattacaccaaatataggtatggtacaagtaggttatggtgattcatttgttatggccgatatgcctggcttaattgaaggtgcacacagtggtgcaggtttaggaattcagtttttgaggcacattgaacggacgagagtgcttttgcatgttttagatatgtcggagcttgaaggacgtgatccttatgaagactataaaactattaatgatgaacttgaaagttataatttaagactaatggaacgcccacaaattatcgtggctaacaagatggacatgccagaagctgcagaacgtcttgctgaatttaaagaaaaattagctgcggatttaggtccagataaagaaatgcccgaaatcttcgaagtttcaggattaactaaaacaggtctccaagggttgcttgcccgaacgtcagaacttcttgctcaaacaccagaattcctactttacgatgaagacgaattagcagacgaaacagcctattatggttttgaagaagaggaaaaacctttcaaggtctcccgtgatgatgatggaggttggcgattgtctggcgataaaatcgaaagattatttattatgactaatttcgaccatgatgagtcagtcatgaagtttgctcgtcaaatgcgtgctatgggagtagatgaaaccttacgttcaatgggtgctaaagatggagattacgtaagaattcaaaaatttgaattcgaatttgttgattaa

SEQ ID NO: 2778 - DNA, 960 bp, Artificial Sequence
  Optimized genes for Lactococcus lactis
atgtggaaagttattattcgtcgtatattgttaatgattccacaattgttcattttgagtattttagttttttttttcgctaagcttatgccgggcgatccatttagtggccttattggtcctcacactgatccacatgaagttgaagccttgagacgagctgctggcttatatgacccatggtgggaacagtacttacgttggctgggtaacgcaattcatggaaatctcggtatgagttataatttaaaagaacctgtgatgacagtaatcggtcatcgtgctattaatacattctggatgtcacttttgtcagttattcttacatacttatttgcgattccaatgtccattgttgcagctcgtaatgaaggaaaatggcaagatcaattatggttaacatataattcaatcacatttggtattccaccttatgtattttatcttctaatcattttcatttttggatattcacttaactggtttccaaccggcggtaccgtttctcctgatgcaatgggtattatccctgtttttttctcaaaaatttatcacatgatattgcctgctttctctttggcagtctttggtactgttgggatttttacttattttcgctcaggaattttagacgaacaaacacaagattatgtcagaacagctcgtgctaaaggtgtcaaagaaaaagtgatttttcgccgtcatattttaagaaatgcatcgcttcccatagcgtctaattttggttttgtaattactggattacttggaggtgccatctttgccgagactatctttggatacccaggtctaggacaacttttcattacgtctatcagcggacgagattatagcatgatcactgcactgatcctcttaaatgggtttttggggttgcttggagcactccttagtgatattattatggctatggttgacccacggattcgtatacaataa

SEQ ID NO: 2779 - DNA, 1638 bp, Artificial Sequence
  Optimized genes for Lactococcus lactis
atgaaaacatggaaaaaagtcactctcggaacagtagctttgggtagtgcagcattgttggctgcatgtggaaattcagggtcatcatctagttcgtcatctaaagatattcaatggaatcttacttcaccaattcaaactttagattcttctctagcaactgatacctacagtaatattatcattggtaacactaatgctggacttacgcgtgttgataaagacggtaaggctcaaccagaacttgctaagtcagttgacgtctcaaaagatggtcttacatacactttccaccttcgtgatgggttaaaatggagtaatggagacgcattaacagcaaaggattttgtgtatagctggcaacgggctgtagatccagccacagcgtctgaatacgggtatcttctgggtccggttaaaaacgctaatgaaattaacggcggtaaagctgacaaatcgacattgggcgttaaagcaactgatgataaaacattcgtcgttactcttgcccagccaactccctattttgaatttttaacagcgaacagtgtatactatcctttgaatcagaaagttgttgagaaatatggaaaacaatatggaacaagctctgagaaaatggtttattcaggtccatataaatttgaaaaatcaaaaggatggaatggtagcaaccaaacattctcaatcgttaaaaacgatgactattgggataaatctgctgtcaaaacaaaagaaatagactttcaagtagttcaagatcccaaaactagttttaatttgtataaacaaggcaaaattgttcaagcgtctattggtgatcctgatttattcaaagcaaacaaaaataataaagatgttgtgagtttagacgaagctacaacagcatatattcaatataatcaatccggaaaaaataaggctcttgcaaataaaaatatacgtgaagcttttaatttagcaaccgatcgtcagcaatatgttgatacagttacacctgcttccaatcctgcgactggtcttacaccagctggtatggctaaaactaatactggtgtggactttgctaaatatgcagctcaaccatataagtatgatgctacagccgctaaagctgcatgggccaaaggtctctcagaaatcggagaaactaaattgacgttaactttaacaacggatgatacctcagcatcaaaggatagcgctacattccttaaacaagcctgggaaaaacaacttccagggttaacattaaacattaaatcagtaccatttaaacaaagattaaatgattcaacaaccggaaattttgatatggtaatcagtctatggggaggcgactatgcagaaccttctacttttcttgatctttttgttaaagatggaccaaataataatggtaaaattaataatgttacttatgataaagccattaaagctgcggaagtaactgacgcattagatcctgaaaaacattatgcagattacaaagcagccgaagaaagtctgtacaccgagtctaatctcaaccctttgtattttagaactactcctgttttgcgaaatccaaatttgaaggatgtccgctttggatctaccggtttaatgtacgactttaaaacggcttatctaaagtaa

SEQ ID NO: 2780 - DNA, 1050 bp, Artificial Sequence
  Optimized genes for Lactococcus lactis
atggctgaagaaaaagtgcttgaagttaaaaatctccatgttaattttcatacatacgcaggcgacgttaaagcaattcgagatgtatcttttgatttggaaaaaggtcaaacattggcaatcgtgggcgaatcgggtagtggaaaatcagtaactaccaaaactttaatgggtttaaatgcaaaaaatgcggttattcctcaaggtgaacttttattcaagggtagaaatcttcttgatttaaaagaagaagaatggcaaaaaatccgtggaaatgaaattagtatgatatttcaggacccaatgacatcattagatcccactatgcgtattggaaaacagattgcagagcctttattaaaacacaacaaaggcatgagcaaagctgatgctatgaaacgtgcattagagctgatgcaacaagtcggtattccagatgctgaagttcatattaacgactatccacatcaatggtctggaggtatgcgtcaaagagcggttattgccattgcacttgctgctgacccagaaatccttattgcagatgaaccaactacagcacttgacgtaacaatacaagcgcaaatcatgcacatgatggctgaacttcaagaacgaattaattcatctatcgtttttattactcatgatttgggtgtcgtagccggttttgcacataaggttgctgttatgtatgctggggaaattgtagaatatggaactgtggaggaaatcttttataacccacaacatccatacacatggggacttctagattcaatgcctacagttgattcttccgttgatagattggtctcaattccagggacacctccggatttactcaatccacctaaaggagatgcctttgctgctcgtaataaattcgccctggctattgattttgaggaagaacctccctatttcgaagttagtcctactcactttgctaagacgtggttgttggatccacgtgcacctaaagttaccccatcagataatattttggctcggtggaaacgctgggaagaactaaaaggagacaaataa

SEQ ID NO: 2781 - DNA, 1887 bp, Artificial Sequence
  Optimized genes for Lactococcus lactis
atgaaggaatttattattaaaaacactgatatttggaaaatttttcttaagtactatcgcagtgatgaggaaatcgtctttctccattcatcacaagttacggaaaatgaacattattcaattttggctcacaaaccatacaaaaaagtatctaaatataaaggtcaagtttttttcaatggagaaaaaaaaaaatttaattttctagatgcggttgatcttttgaaagatgaacgagttgaacgtcctaaaaactggcccttctatccagaacttttgggctttgttagctacgagcaggacccagcttgttttgctgcttacgatgaagtactgctttttgatcaccgtacaaagttgttacgtgtggttcaattcgagcaaaccgatggtcaatactggttaactgaatcagaagagatcgaagttgactcagaaattgaatttgatggacaaaacggtataggtgcaatttttattgatcagactcgtcaagaatatattgcatcaattaaaaaacttcaagactatatgaaagcaggagatatatatgtagcaaatttaacgcaacaatttgaaatttggtcagatcaaaaacctattgaagtttttaaaaaaactcgtaaacagatccctgcacctttttcttctttcttacaatatccagaatggaaaatgactcaaatttcatccagtgtagaacgttttgttagtattcatgatggagcattgatttcaaaacctattaaaggtaccattgctagaggtgaagacgtgggagcggaccgtttacaaaaagaaattttaagcgattcctctaaagaacgctctgaacttttaatggtcactgacttattgaggaacgatatcgttagaatctcacaaccgttctcattgtctgtgccaaaatttgctgaaattgaaacatttagtcatgttcaccaacttgtcacttctataaaatctagaattaaagaggacttaactttttcagaattcatgacagcactctttccaggtggctctattacaggtacaccaaaaaaacgggccatggaaatcatcaaggaagttgaaaaacaaccaagaggaatttataccggaatgcagggttggcttagtcgagagatggaccttgacatgaatatcgttatacgtacattggtccatgacggtgaacattatcaacttggtgtgggtgggggaattacatttgaatctaaagcagaagccgaattttcagaaattctattaaaagctaagccttttttagatatccttggagtaaaagatgtacctagtattttgttcacaactgggattattaaaaatggggaacttcttaaccttgaaggacacgtcaatcgtttgaaaaaacaataccatcatccagaccttgaagaaaaattgcgaatttttgcccaaaatgtaacggatggagttctacgtatttcaacagatggtgattcgctatcgcctggaatacgccaactcacacattcaaatgaagcttatcgtgttaaattgagtagcattaatgataaacccagtctgttatcaaattttaaactctctggtccagatttccaaaaggtttttagacaagaggttcttgaagctaagaaagaaggttttcaagatattttgttccatacagatggccttatctcagaattaagtatcggtaattttgttgccaaaaaaggcaatcaatatgagactccagcgaaatatgctttaaaagggactttcctggatttatttgcaaaaaatcacacactcatttataaggatatcgctttaagtgatttaaaaacatatgattgtttttatatgactaatgctgttcgtggattagtagaaataaaaattgatggaattagctaa

SEQ ID NO: 2782 - DNA, 2757 bp, Artificial Sequence
  Optimized genes for Lactococcus lactis
atgaaattctaccaaaaaagcaaagaagaacttctgcatagttatgatgtcaaaattgaccgtgggcttagttctactcaagttaccgataatcgtgagcggtatggagaaaataaattgccagaagaaaaagaagagtcgtacttaaaagtattctttaaatcttttaaagaaccaattattatcgtgttgttaggagccgttgcattaagttttttttcatcgttttattcatttcaaattgtgggtgacaaaaaacatggtttagaaagtttatacgaagctattgcgattgcaattcttatcattataaacgctttcttaggtttttggcaagaaataagcgcacgtaagaatttgaacagtttgaaagaaatgaataacagattcgcttcagttttacgcgatggggctttagaaaagatctcatcaaatgaacttgttgttggtgatattgtcaaggtcacagttggagattttgttgaagcagatattcgttggttggaacttgacgaactacaactaattgaatcacatttaactggtgaagccgatgcaattattaaaaatattgaggttattaatgaaaatgtagaaattggagaccagacaaatatgggatttagtgggtctattgtatcaaatggtcaaggaattggtattgttgtagctactggggaaaatacagaacttggaaaaatttctcagttaatgaaagatgaaggaattaaatcatctccactgcaagaaacagttaaaaaacttacaaaaacccttatgaaaatttccgctggaatcgttcttttaactttcgtatttggattaatttcatcaggagagtttagtattaactcaattacatctgttttttcaacatctatcgcccttgctgttgctagcatcccggatgcattacctgtcgtgttgtcaatcgttttaacaataggtgctgtcaaaatgagcaaaaataaaggtctcatcaagacactctcaagcgtggaaacgcttggcagtacttcatatatatgttctgataaaactggtactctaactcagaatgaaatgactgtcacaaagttttatgcgaatggtcaactttataatgtggatggtcttggatatagctctattggagaaatccatcttatcgcaaaaggtgaaaaaaatataaatttcgcacaatttatgaagaatatcgttttgtgtaatgatagtagtgtaaaagaagtagaaggtcaagttaaaactttcggtaatccaacagaagttgcgctaacagttttgggttcgaaagctggttattcaaaaaacaaacttttgaagaataataaaattattcgcactttacccttttcttcttcacgaaaaatgatgtcagtcatcgtacaaaatgatgaaggtttttatgtttatacaaagggcgcaccagatgttttgatggaaaaagctagtggcattctcattggagacattgttgatcaaagtgaacagtctaaagataattttattaaagtcgttgatgattatgcagacgaagctttaagaacactagcagttgcatataaaaaagttgatgaagaagaagctctttatggtgctaccgaagatgtagaaaaagacttcatcttaacaggcgtggccggcattatcgaccctcctagagaagaagttaaggagtcaatccgacaattacatgacgctaatattaatgttgttatgattaccggagatcacgagaaaactgctagggcgattgcctatgatcttggtattgttaaagaaaaaaatgctactgttcttaaagggattgatttagaagagatgtcagatcaaaaattgtacgctgaagttaaaaatgttaacgtttacgctcgtgtaactccagaacacaaacaacgtatcgtaaaacaattgcaaaatcaccaacaagttgttgctatgactggagacggagtaaacgatgcacccgctttgcgtgcagctgatattggggtagcgatgggcattacgggtacggaagttaccaaagactctgctgatttaatactgctcgatgataaatttacaacaattgaaaaatctgtttatagtggaagaactatttacgctaacattaagaattttatgcgtcatgaattgactactaatgttgccgaggtgttagctttagttttaggactcgtattatttcgttcatctgttggcaacgtggcggcaatgacccctactttaacagcactgatggttctatgggtcaatatggtctcagacgcaattccatcatttagtcttggatatgatgtcgcggaaacggatttgatgaaagaaaaacctcggaatccaaatgaaagcattcttgccaatcatacatggtcacgagtccttattcgcggtactgtaatgggaacaatggtttacttaggcttccttttagctgctcaaaatggacttaacgcatccgaagcacaaacagttgcatttcttacgttggtttatgggcaactttggcatgttttcgatgcacgttcatccagaacactgtttcgtcgtaacccatttggtaacattcgtcttgtaggtgccgtcttgtttgcaggtgtatcatcttttctcgtgacaattattccatttttcaattctgtgatgggaacagctcaattgactcttcctgtttatttgttagtaatttttatacctgctttgccaactttgatactcagtggtatcaaagaggtttttaaaattaaaatctggtaa

SEQ ID NO: 2783 - DNA, 1242 bp, Artificial Sequence
  Optimized genes for Lactococcus lactis
atgaaatatgaaaaattgctccctcgttttcttgaatacgtgaaagtaaatacacgttcagatgaaaatagcactacaacaccatcaacccaagccctcgtagaatttgcccataagatgggagaagatatgaaggcacttggtttgaaagatgtacattatctagaatctaatggatatgttatcggcacgataccagcaaatactgacaaaaaggttcgtaaaattggattattagcacaccttgataccgcggactttaacgcggaaggagttaacccacaaattttggaaaattatgatggggaaagtgtgattaaattgggtgacacagaatttactctggatcctaaagacttcccaaatttaaaaaattataaaggtcaaactttagttcatacagatggaacaactcttttgggaagtgatgataaatctggtgtcgctgagattatgactttagctgattatttacttaatattaatcccgattttgaacatggggaaattcgggttggttttggtccggatgaagagattggtgttggtgctgataaatttgatgttgcagattttgatgtggatttcgcttatacagtagacggaggacctttaggagaacttcaatacgaaactttttcggcagctggagccgtcatcgaatttcagggtaaaaatgttcatccaggtacagcaaaaaatactatggtcaacgctctgcaacttgcgattgattatcacaacgcattgcctgaatttgaccgtccagagaaaactgaaggtcgtgaaggattttttcacctattaaaacttgatggcaccccagaagaagcaagagcacaatatattattcgagatcatgaagaagggaaatttaatgaacgtaaagcattgatgcaagagattgctgacaaaatgaatgctgaattaggacaaaatcgagttaaacctgtaattaaggaccagtactataatatggctcaaattatcgagaaagatatgagtattattgacatcgctaaaaaagctatggaaaatcttgatatcgttccaattatcgagcccatacgcggcggtacagatggctcaaaaatatcattcatgggattgccaacacctaatctcttcgctgggggtgaaaacatgcatggtagatttgaattcgtctctgttcaaactatggaaaaagctgttgatacgttattagaaattattagacttaataacgaagttgttaaataa

SEQ ID NO: 2784 - DNA, 477 bp, Artificial Sequence
  Optimized genes for Lactococcus lactis
atgcgcctgtttttatttcttatcgcgtggctacgttgtctccagttgcttgaccttgaaaaacaagtgaagtttgaattcaattttttaagaaaagagatgattaatgaaaatgacaataaagggacaacttatggatctagaattgctgcaaacaatactaaacaacgattgcgtagaattgcttgtcgtacagctcatgaatggttagaccaatcagaagaggtatttgaacaattccatgaaaaacaccggtgcgatgtctttgtagttatttatcctccaaaacgtttcaaatacgatcctccaaattatgaaccaacttcaaaggcccttatcgatggtttgacagatgcaggtatttggaatgatgataactataatgttatacgtcgtactagctttgaacatggtggattaagtggcgatacgaaaacatggaaagttgaattggttgttaaagaattaaccgaataa

SEQ ID NO: 2785 - DNA, 363 bp, Artificial Sequence
  Optimized genes for Lactococcus lactis
atggcacgccttgagaaaatttatgatgtctactttaacggaatcaaaatgggaacaggtactaaaaaagaactttctaaaatgttgttggtttctccacatagcgtagctggatgggttaaaaacggtatggctaattcacctaaaaataatgctgttaaaattgctgttgtgaatgaaaaggccatgatggaaaagtatcctggttggaaaccatatgggggctcaaaaagtaaaatatcagatgaaatcacagatcgtgaccgtagaaaacacgaaactaaagaagaacgtcgtttacgtcggaatattagagctcaaatggcaattgaagcggcacgaaaagaggaactcggtttataa

SEQ ID NO: 2786 - DNA, 210 bp, Artificial Sequence
  Optimized genes for Lactococcus lactis
atgtcttatgttgtcaacaaaaccggcgatttctcaggttatcatgaagtgcacaaaggagcttgtccaaatagacctatcgttactgatagttacctcattaataagcaatttgaaaatgacttggatgcaatggagtatgttaaagaaatttatccatctcttcaagtacgtccttgcttatcatgtatggatacaagctcacgttaa

SEQ ID NO: 2787 - DNA, 399 bp, Artificial Sequence
  Optimized genes for Lactococcus lactis
atgaaaaaaatcaaaaatattgcaatctctacagtgttgggggcttcagctttgataggtctctcagcatgttcgcaagcagataaggtttctcaaaatgtttcaaatgacgccgataacttcaaagtagagagacgtgttgtgattattaacactcgtacagataaaattgaatttgtagcgaagggacttatctctgttaatacagaagatagtaaaaaattagtcattttagctaaagttggcaaaagtcaatacaaaaaagacattattaatcttactaacaataatatgtatactgtagaagatttaagtggtgctaatgttaattcatataaatatgaagttacctggctaccagaaagcgtcgttcctgtcaaaattgttggagaaaaataa

SEQ ID NO: 2788 - DNA, 1080 bp, Artificial Sequence
  Optimized genes for Lactococcus lactis
atgtctattcttaatccatttgaacggcgtagctcaattactccaaataattactatccatttatggttcaaaatggtagtatcgtgccgaattcgttggttgacgccaccgaggcactaaagaattctgatctttatgctgtcacaagtctgatcagttctgatatagcaggaactcgttttattggaaatcaagttttcacgtccgttcttaataacccaagtcatcttacaaatgcattttctttttggcaaacggctatattgaatttattattgaacggtaatgtatttttagcgattcttaaaggtgataactcacttatgaaagaactccgtttgattccctcaaatgctatcactattgatttaacagatgacacactcacttacgaagtaaaccaatttgatgattatccatcagctaaatacaacgcttctgaaatgattcacgtaaagattatggcttatggggttgatactttgcataatttagtcggccatagccctttagaaagtttgacttcagaaattggccagcaaaaagaagcaaatagattatctctgtcgacacttaaaggtgctctaaatcctacaagtgttgttaaagttcctcaaggaacactttcatcagaagcgaaagattcaatccgcaaagaattcgaaaaagcaaatggagggaacaattctggtagagtaatggtgttagatcaatcagctgattttagcactgtgtcaattaacgctgatgttgccaattatcttaattcaatgaattggggtcgtacacaaattgcaaaagcatttggagttagtgactcctatctcaatggaactggcgatcaacagtcatcattggatcaaattaaagatttgtatgttaatgccttaaatcgattcattgaaccacttatctctgaattacgtataaaatgtgacagtagcattggtgttgacatgtcaccaattactgactattcaaactctgtatttaaagctgatattcttaattgggtcaaagaaggaatcattgaacctaccgaggcaaaaacattattggagtctaagggtatcatttaa

SEQ ID NO: 2789 - DNA, 570 bp, Artificial Sequence
  Optimized genes for Lactococcus lactis
atggtggttaaagttttcgatgcttatattgaaggtgaaaaaaaagcaactgggacaattgatgaaatcgctgattactttgatatttcacgtacatcaatttcgctttggatcaaaaatggcaaagaccctaaaaaggcgaacccaaaatataaacacgcaattttaaataaagagaaaacaaaagaactcactgagcaaaaaaagaaagaagaacgtaaattgccagcttctgtttatgattactatgacaaaggtgaatttattatcaccggaacagctcgagaaatttctcaatttttgaagataggaaaacataatgtttacagttatattcaggtaggtaaatatgcattcgattatcgaaaaactagaaaacatgccattcttaatgaagctgaaacaagaaaacgttttcctttacttagtgtctcaagcgaagaagaattgatagaaacgaaggaaaaagaacggcgtaaacatgaaactaaagaagagcgccgcctaagacgtaatattcgtgcacaaatggctatcgaagcagcccgtaaagaagagttaggactgtaa

SEQ ID NO: 2790 - DNA, 1206 bp, Artificial Sequence
  Optimized genes for Lactococcus lactis
atgaagtttttcaataacaagagatctccaaccgaggagtcgaaagctaaagatgaaatcccaaaagctccacaagtagtaatgactttgccaaattttttcaaagaactcatttctgacggttacacaaaactttctgatagcccagaagtgcgtatggctgttgattgtattgcggatcttgttagtaacatgacaatccaactaatgcaaaatggtgaaacgggagacaaacgaattaaaaatgatttgtcacgcgttgtagatatcgaacctaacaaatacctttcaagaaaaactttcatacaatggttagttagatcaatgctgttagaagggaatggaaatgcagttgttaaaccccaagtttctggtgacaaaatcattggtttgactcccataagtccatataaagtgacttttaacgtctctgacgatgatcttgattattctatcacttttgataacaaagaatatgatccatcaaccttacttcattttgtccttaatccgagtattgaacgtccttttattggaacaggctataaagtggctcttaaagatattgtaggaaatttaaaacaagcttcagttacaaaaaagggttttatggcatcagaatatatgcctaatttgattgtttcagttgacagcgattccgatgaattgagcgatgaagagggacgagaaaattttgaagagatgtacttaaaacggaaagaagcaggtaaaccatggataatccctgaaggcatggttaatgtccaacaaattaaaccactcactttaaatgacttggctattaacgatgcggtgacgttggataagaaaactgtagctggtatttttggagttccagcatttctgttgggggttggcacatataataaagacgaattcaataattttattaatactaaaattatgtcaattgcacaagttattcaacaaacatacaataaacttattgtcgaagaagacatgtattttagtttaaatcctcgtagtttatataattattctctaacagaaatggtctcagccggtgctcagatgacacaacttaatgcacttcgtcgtaatgaatttcgtaactgggtaggaatgcctcctgatgccgaaatggatgatttgctcgttcttgaaaattatttacaacagaaggatttagttaatcaaaaaaaattaattcaagatgaaacataa

SEQ ID NO: 2791 - DNA, 372 bp, Artificial Sequence
  Optimized genes for Lactococcus lactis
atggctaataaaatttcgatagacgatcttgcaaaaaccatcgaaagtgaagtacgcaattggacaaaagacgtcgtcgatgatattgatgatattaaaaaagatattactaagaatggagttaaacaattacgtgaatcttcaccaaaaagaacaggagattatgctaaaaattggacttctcaaaaattgaaaaacggtgaccaagtgatttatcaaaaagcccctacttaccgtttgacacatttactagaaaatggccacgcaaaacgtaacgggggtcgtgtttcaccaaaagttcatattgctcctgttgaagaagagctcgtttcaaattatatcagtcgagtagaaaagagacttagccagtaa

SEQ ID NO: 2792 - DNA, 1602 bp, Artificial Sequence
  Optimized genes for Lactococcus lactis
atgacagaacactttattactctttccactacagaacctaacaataacgttggtatcgtgaaattgagacatgctgatgtgaattcacaagcgattgttgcgcaaattgttgaaaatggacagccaaagaatttcgaaggtttacagccatttttttgccttatggctcaagaaatcactggtcaaggtgtatcagaagaaagcgtggtttcttttgatgcgaaaaatggtaccttaaaatatatagcttcagataatgcactgcaaatggttggcagaaacgaggcttatttcagttttcggaaacaagaagatggaaaatggattgaacaattttcaactcgcacattcaattacattgttgaaaaatcaatttattctcaaccatttaaagattcgaattactggtggacttttaaagaattgtaccgtatttttaataaatatattgaggacggaaagaattcatgggaagaatttgtaaatcaaaataaagagattttggaaagtgttgatcctggcggcaaaattttaagtgaattgttagctgctaggaatgggaaaccgaatttaaaaactcgcattgatgacctcgaaaataaaactacagcacagcttgctgaaaaagtcgatatttcagccacaaataaattcaaaggatatttcggaacaaactttgacatgcaaatgagtaaagattgggaccaaacttatcctatttctaaattcgtaacagaaattcaacagctcaaaccatatcaacttgatggagtttttattacagttgaaattcaacctctgcgtgaacaacgtttagcttttgaagcaaatactttaaccaccaacgatctccaattcactactcttcctgacttaacgagtctagcacaacttgttaatttatgtgaaactgaatcaatccctatcatgggacttaaaattcataacaattggtctaatacacaatgggccaaatttgataaaactatttggttttcgaaatatcgtgcaacaattgatcaaattatcgctatcgctccaacagaaaagattggtgtcttgaatgaaagtgacactatttggcgagacagcgctagtgaagcaaatattattgatttgatgaattatcttaaagggacaggtaaaaaggtaacattggagggtagttggtctcctcttactctatcaaaacccttgcaaaatgctatggattactttgcaatccatgcatatccaagcctatcttctaaacgtgaacgtacaactttttcagattgtctcatgggttggtctgtatcaaatatgatagacaacttgcgtaaaatcaaatttacatatccagataaggaaatatggataacagagacgggtgttcaaaacctttgggaagctttacgagcaccagaagattattatacgccagaggataacaccccatcagccgataatttagtccaaacgttgtattttgattctatgttccaatactttggaagcgatgaacttgtttctggagtttttatgtggtattttgactcaaattactcattactttttgaaaaaatgttacgtaaatatagagaagggacatttcatgcataa

SEQ ID NO: 2793 - DNA, 831 bp, Artificial Sequence
  Optimized genes for Lactococcus lactis
atgttgaataattatgtaaaaattaacggcgatatcgattgggttaatatcgattatgctactcacgctgcagcattatttagagttcgtcttgatgaaaaaaaagcattttacacatttctaggaagtaaaggtgttgttgtcgtccggctcttgcgtacatcatcttatgagaattattataatgatattatgattcgcttttcatccttagatcctactacaaaaactcctaatatttctgtatatgatcttaataaggacaaaatgtttggttacacatatgctattaaagttatgagtgatggttacgcgtatttttatgtaaaaggttcaaataagtatgattcatttaaatatcaattggtttatgcttcaaatccaagctatatcgaagctcttggaactagtgctgacgttattactgtagctgacttcgatagctctacaaatgctgttgcatattacaaaccatctagtcaaacatttaatgtgcccactatcaccatgggatacggtcagaactcaaccgatattaaaactcaacctttgactgcaattaaccatggaaactatatacaactggttgggtatatcttagtttggtcagggctcactaatcaaacagtatttacggtgaactcttcaaaaccaaatcgtgcgcatacattctttgttgacgtcatgggttctgccgatattagtaatacagcaggcactttacgagttccaatgacaattgaaaaagatggaaccgcctcaataaatcttggaacgacaatttcgactacaagacttatttatattgacacaacttaccgtttcttataa

SEQ ID NO: 2794 - DNA, 171 bp, Artificial Sequence
  Optimized genes for Lactococcus lactis
atgttatactataaatgtttaagattggtttctcgtcgtcgattcggttctcttgcccaacttgaagcaaatcgttcagttgcaggaagcagtccagctcgtacaattaacaagtggcgcgtaaaaaaaagaggtggcaatctcgctaattcatttatcattatgttttaa

SEQ ID NO: 2795 - DNA, 396 bp, Artificial Sequence
  Optimized genes for Lactococcus lactis
atgaaacgtccagtggagattgttcaagacatcatagctgcttctgatttccctcatgatgaaatttttttagatagtattcctagcgaaaaacttgactcttcaaacgaaacccaagttttattgactgaatcagataatggtccaagtgattatggcaattctgactttattagtctaatgtatggtgtatatatccaaatattttattcaaatgcagaagattccggaattaatattgtccagagcgaaatcaacttaatgaaatcttttattaataatgattggctcattgcacaatcaaagtcacactacattgatccagatacaggacaaattattaaaaatttgactgttcaaagaatcatgacactttcagaaattgccaattcgtaa

SEQ ID NO: 2796 - DNA, 507 bp, Artificial Sequence
  Optimized genes for Lactococcus lactis
atggtttcattttatgatgctatgcagctcattgttgaccgtgccgaagaacttagtaccaaaatgtcagtagaagataaggcagaagtaactaaagcgggagctaaagtttttgaacaagcattagcatacgaagtacggaatcgtcactatcgtcatcgtgatacaggggaggatcctcacttggccgattctattgtgatgaaaaataaaaacattgacggtgttaaggatggacaatcagttgttggatgggaacgaagcacggaaaaaggaacacatacaaaaggttatatcgcaaacattattaataatggtagtagattcccacaatttactactcgttctggtagaaaatataaaaaacctggtgaagttgctgtccatgcagaccattttatagaggaaacacgcaaaaatccaatcgtccaacaaggcattcttaaagctgaagctgaagctatgcgtaaaatcattaatagaaaaaagaaagaatcgaatttataa

SEQ ID NO: 2797 - DNA, 423 bp, Artificial Sequence
  Optimized genes for Lactococcus lactis
atggctgataaattagatagaatcattggtgattatgttaatggtcgcttggaagcacgtattaaaagtatcgaatctcgttacctgtataaacaaaaagtcgacaacctcggtaatcgtacagcatattcaggagggtctgaacaattatcacacgttcttaataaagaggcccttgaaaatgatgaagaatatattaaattgaaagacctaatgtatcaattttcattatggtacgagcctttaattaaggaagaaaaagaaattattaaattgaaacattgtggctatggaggatttacttggtaccgagtaatgatggaacttgataatgaaggaattgaaattagcgaaaagaaagctaaatttatatattatagatttcgtaaagatataaacccacatatcggttatttcatttaa

SEQ ID NO: 2798 - DNA, 360 bp, Artificial Sequence
  Optimized genes for Lactococcus lactis
atgattactgctatagcacaaattatgacatcaatctctattattattttactagttctgattgtttttaccaataaacgactcgcacagcttgaagtgaaaatagagcgttgtcgcgacttatacaatggtatcgatttggtaccattaagagtcaaaatcaattatttagagggaagtattaaagccttgtataagtataaggttcttttcaaacgtggctggtggagccgtgaaggtgaattgcaagaagaatatttttttacaaaaaaacaagctgataaatttattgattcaaataatcttaaagaagtagttatcattcggcttgaagataacgaaactgaaattgttaaataa

SEQ ID NO: 2799 - DNA, 360 bp, Artificial Sequence
  Optimized genes for Lactococcus lactis
atgacaaatttgtatgacgaaactgttacaattcttgaatcacacgataagacaattgctgatattgaatacatcggaagttcagaaacaaaaattaataccaataaagccctagaattgatgaaaaaaactaattatcattctggttatggaggacaagagatcgctgaaaatttaatgattaaaggtaatggattcattatgactagaggtgagtatgatggctcagaatggtgggattacatgcaaactgaccctagcctcccacaagttgaacgtgaagtaaaatcttttaaagcaaacataggttgggaaagtttagaagaaattaatgggcttgaagatacgaaaaacgattaa

SEQ ID NO: 2800 - DNA, 927 bp, Artificial Sequence
  Optimized genes for Lactococcus lactis
atgaaatttaaaaagctcggtttagtaatgacaacggtctttgcaggagccgctcttgtgacattgagtgggtgtagcagttcagattcggcaagcaaagatataattactatgaaaggagatactattagagtttctgatctttataaggaagcaaaacaattcccatctcaacctaccaatacattattgcaaaaccttacttttgacaaaattttcacaaaagatttcggcaaagaagttacagataaagatgtttctaaaaaagtaaaatcgattaaagaccaatatggttctcagtttagttctgcccttcaacaacaaggattgaccgaagcaagtttcacaccttatatgcgtacacaaatgttggaacaagcggccattgaccacgaaattaaagaaactcaatatactgatgctaatttaaaaaaagcttgggaatcctaccatccagatgttactgcatatgttgtgtcagagacatcaaaggacgcagctactaaggctttagatgctgctaaaaaagatgacgctggtaaagcaagctttgaaaaaacgaacgcggaatcaaaagttacatttaattcaacatcaacatctgtaccaactgaagtccagacagctgcatttaaattaaaaaatggtgagtttagtgatgttatcgaatcaacaagtagttctactggcgctacctcatattatatcgttgaaatggtcaaaacatcagagaaaggaaccgatatgaataaatacaaaaaggaactgcaaaatgtgattaaaacagaaaaagaacaagatacgacttttgtttcaggtgttatcgctaaataccttaaaaagaataatgtaactgttaaagaatctgcatttgcgtctctatttagtcaatttactcaaacttcttcaagctcatcatcaaaataa

SEQ ID NO: 2801 - DNA, 789 bp, Artificial Sequence
  Optimized genes for Lactococcus lactis
atgacaaaacgaatttacagcgttccatattttttatggattcttttttttgttatagttccactagctatgttactttggcaatcattctttgatttgaatggtcacttcacccttaataactatatattatatttttcatctgggacataccttttgatgacatggaatagtattttgtatgcattaatcattaccgttgctactttagtaattagttatccagtagcatacgttttaactaaattgaaaatgaaacaattttggctaatgttaatcattttgcctacatgggttaaccttttacttaaagcatatgctttcataggcatttttggaaagtatggttcagtcaacaattttctacaatttctgggaattggtagaactcaaatcctttttacagacctttcttttattctggtcgcaagttatatttcaattccttttatggtattgcctattttcaatgccttaaatgacttggatgataatctcgtgaatgcatcagctgatctcggagcgtcacgttttcaaacgtttacacaagttatctggcccttgtcgttgaatggcgttcgtgctggagttcaggctgttttcattccatccctttctcttttcatgttaacgcgtttaattggtggtaataaagtcatcactttaggaacagcggtagaagaacattttcttactacacaaaattggggtatggggtctactattgccgtggttttagtagttgctatgcttctcgtgatgcgcatgactaaagaaagacgtgattaa

SEQ ID NO: 2802 - DNA, 1068 bp, Artificial Sequence
  Optimized genes for Lactococcus lactis
atgaagaaattatcatactttttcgtgggtattttaattatcactgctagtcttggtttaataacaaatcgcatgaaagcagcggatggtgtaaaaacgcaaaataattctcttactatcttcaattggggtgaatatattgatcccgaccttattagcaaatttcaaaaggaaacaggatataaagtaaattacatgacttttgatagtaatgaagcaatgtattcaaaagtcaaacaaggaggcacagcttatgacttaatagtcccaagcgattacatgattgaaaaaatggctaaagagaaccttcttatcaaactagatcattctaaaatcaaaggattgaaggacgatgatccaaaattacttaatccagcctttgaccaagggaatcaatattcagttccttatttctggggtactttggggattgtttataatagtaaaacggtcactcgtccaccaaagacatggaatgatatatggtcaccaacttacaaaaattccattcttttaacagactctgttcgagatgttatggctatggttttatcaaaacacggatactcgttgaatacaaccaaccaaaaagaattagatattgcataccaagacttgctgaaattaactcctaatgtaaaagctattctcggagatgaaattatgaattatatgattaataacgaaacaccattagcagtggtttattctggtcaagttgctgaaatgactagtgaaaacaaaaatttgaaatatgttatcccagaacgtacaaatatttggtatgataaccttgctattcctaaaactgctaaaaatgttaaagcagcctatgcgtttattaactttatgcaagagccaaaaaatgctgcacagaacgcccaatggattggatatgctaccccgaatttgaaagcgaaggcactcctgcctaaagaaattagagataataaatcattttatcctgatgaagcaacaattaaagatgatgaagcttataaaaatcttaatccttattggacaggcatctataatgatttgtatctagaatttaagatgaacaaataa

SEQ ID NO: 2803 - DNA, 591 bp, Artificial Sequence
  Optimized genes for Lactococcus lactis
atgacttacccacaactggaacttgaaaactataaaggtacaacagcaattattaatacgaatcatggaaaaatgacagtgaaattgtttgataatttggctccaaaaaccgtcaaaaactttatcgagttaagtaaggaagggtattatgatggcgttatttttcaccgtattattaaagattttatggttcaaggcggtgatccaactggtactggtatgggagggagctcgatttacggagaaaaatttgaagacgaatttagtatggatttattcaatttacgtggagcgttgtctatggcaaatgcaggtcctaatactaatggatcacaattcttcattgttcagaataaaaacctaccctatcctaaagactcacttatacaaggtggatggccagaagaggttgctgaaacatatacaggaggcggtacaccacatctcgatggtcgacatactgtttttggacaattagttgatgaagaatcttataaggtacttgacgaaattgctgccgtaagagtgggtgctcaagataaacctgtcgacgatgttgttattgaatcagtagaaatcatcgaaccgtaa

SEQ ID NO: 2804 - DNA, 1074 bp, Artificial Sequence
  Optimized genes for Lactococcus lactis
atgtttgatcaacttgaatcaatcgttggccgctacgaagaactcggagaacttttaagtgatccagaagttgtttcagacaccaagagatttatggaattgtcccgggaagaagctgacttacgagataaagttgctacttataatgaatacaaaaaagtactagaaacaattagcgattcagaagaaatgctaggggaaggggggcttgatgatgatatgaaggaaatgctcaaagaagaattgtcaagtgcaaaatcacagaaagaattacttgaggaagaaattaaaattctgttgcttccaaaagatccaaatgacggaaaaaatatcattttggaaattaggggtgctgctggtggtgatgaagcagctctgttcgcaggtgacttacttaatatgtatcaacatttctcggagtctcaaggttggaaatttgaaattatggaagccaatattactggaatcggcggttataaggaagtaagcgcattaatttctggaccaagtgtctacagtaaattaaaatatgaatcaggcgctcaccgtgttcagagagttcctgttacagaaacacaaggtcgagtacacacatctactgctactgtgttggtcatgcctgaggtggaagagtttgaaatgactatcgaccaaaaagaccttcgtgtagatatttatcatgcttcaggagcaggtggtcaaaacgtaaataaagttgcgacggcggtccgcatggttcatttgcctacaggaatcaaggttgagatgcaagaagaacgtacccaacaaaaaaatcgtgataaagccattaaattattaaacactaaagtctttgattattatcaacaaattgaacttgataaacaaaatgctgaaagaaaatcaacagttggaactggagatagaagtgaacgtattcgtacatataactttccccaaaatcgtgttacagatcatcgtataggtctcactttgcaaaaattagattctattctttctggaaaaatggatgaggtgattgatgcattgatagtttatgaccaaacgaaaaaacttgaagaattaaataaataa

SEQ ID NO: 2805 - DNA, 1851 bp, Artificial Sequence
  Optimized genes for Lactococcus lactis
atgaaacaatctaaaatgttaataccaacattacgtgaaatgccatctgatgcacaagtcatttcacatgctcttttaatgagagctgggtacgtacgacaagtgtcagcaggtatctatgcctatcttccattagcaaatcgcgttcttgaaaagctaaaaaatattatgagagaagagttcgatgaaattggagctgtagaattacttgctccatcacttctgaccgctgatttgtggcgtgaatcaggtcgttatgatacgtatggcgaagatttatacaaacttaaaaatcgtgacaactcagattttatcttaggacctacacatgaagaaactatgacttcactagtacgggatgagattactagttataaaaaattgccattaaacgtttaccaaattgcacctaaatttagagatgaaaaacgaccacgctacggacttcttcgaggacgggaatttttgatgaaggacggttacagctatcatgctgatcaagatagtcttgacgaaacatacaatgactataaaaaagcatacgagaaaatcttcgaacgtgctggtctcaattttaaacctattatagctgatgctggagctatgggggggaaagatagccaagaattcattgccataacagatgatcgtattaatttagaaaagtggcttgttctttcaaaaaatatcactagtattgaggaaattccagaatccgttctgtctgagatcaaagaagaattaggtaaatggctaattgctggagaagacacaattgtatatgctgaaggtggagattatgctgcgaatattgagatggcttcttcacaatttgagccaaatgttgcttataccgaagaacttgaactggaaaaagttgctactcctggagcaaaaacaattgatgaagtttctaagttcttagaaattgatgaggaacagacggttaaaacattggtttatcacgcagacgatgaattggtcgttgttctcttaaacggtaacgatcagcttaatgaggtgaaacttaccaattatttaggagcatcattcattgaagcagcttcagaagcagaagttgaagaaaaatttggagctcattttgggagtttaggacctataggtttggaaaacgtcaaaattattgcggacagaaaagttgaacaaattaaaaatgctgttgtaggtgctaatgttgacggatttcattataaaaatgccaattttggccgtgattatgaagtcgaagaatttgttgatctcagaactgtaaatgaaggagaaattagtccagatggccgtggtacacttaaatttgcaaggggtatcgaaatcggccatatttttaaactcggtactcgctatacagaagcaatgaacgcaaatattttagatgctaatggacgttctattcccatgttgatggggtgttatggtattggcgtttctcgccttttatcagccattttggaacaatttgcccgtatttatgtcgaaaagactccgcgtgaagaattcaaattttcgtggagtatcaattttcctaaagaattagcgccctttgacatccacctagttccagtcaatgtcaaagatgaggcagcaatggaattgacatctgaactcgaagagaaattgcgtggtaaaggttatcaagtgttggttgatgaccgtaatgaaagagccggagtgaaatttgcggatagcgatttaatcggtttgcctgttcgagtgactattggaaagaaagcggctgaaggtgttgttgaagtaaaaattcgtgcaactggtgaagttgtagaaattaataaagacgaattggtaaacacaattgaaatacttagtaagtaa

SEQ ID NO: 2806 - DNA, 591 bp, Artificial Sequence
  Optimized genes for Lactococcus lactis
atgaccaaaaaaactgaaattaacttcggtattgacagcaaattagagataagagatgcgaataaaaaagcaggatttattggtcagattgcaggctatgctatcgtgtttaacaaaccatcagttcccaacgccccattcattgaatatatcgctcctacagccttagataatgttgatttgtctgatgttctggcactttataatcatgattatgcaaatgttttggggcgcgtcgatgctggaactttaaagttatcaatcgataatattggtcttcactttgttcttgacatgcctgatactacggtaggtcatgatgtgtacaataatattaaagctggcaatcttaaggggatgtcatttggatttgtagttgctgacggtggagattcttggcaacaaggagttagtaaaccaattcgaacaattaatcaactacaaacattgggtgaaataagtgtcgtttcgaaaccagcttatgatgatacttcaattaatgttacacggtctatcaaacaatttgaagatgaacgtacacgtaaatacaaagaaaaagtacgtgcatatttagacggactcagtgactaa

SEQ ID NO: 2807 - DNA, 813 bp, Artificial Sequence
  Optimized genes for Lactococcus lactis
atggagtatggagttttaagtgttatcttagtcattgtagtagcttttttagcaggtctggaaggcatccttgatcaatggcaattccatcaaccaatcattgcttgttctttaataggtattgttacaggacatgcttcagccggtattatcctaggtggatcacttcagttgattgcacttggttgggccaatgtgggtgctgccgttgctccagacgccgcgttggcttctatcgcatcgtcaattcttatggtccaatctaataattttgacctgacacatatcatgggcaccattgttcctgcagctattttattggcaactgcagggcttgttttgacaactttagttcgtatgcttagcgtagtccttgtgcaccaagctgatagagcggctgaaaacggaagctatagtggtgttgaaatgtggcattttattgcgctaatttgtcaaggactccgaattgcgattccagctggtttgttgttagtgatcagtcctgatgctattcaaaaagcattagcagccattccacctgttattagtggtgggttggctgttggaggtggaatggtagttgctgttggttatgcaatggttataaacctcatggctactcgtgaagtatggccgttttttttccttggttttgcattagctccaatttcagaacttacgcttattgctacaggagttttaggcgtagttattgcaatagtctatttgaatctccaagcttcagggggctcaggtaatggaactgcatcatcttccggagatcccattggagatattttaaatgattactaa

SEQ ID NO: 2808 - DNA, 267 bp, Artificial Sequence
  Optimized genes for Lactococcus lactis
atggcatcaaaagaattccatatagttgttgaaacagggattcatgcgcgtccagctactcttctcgttcacacagcttctaaatttaccagtgaaattacattagaatataaaggtaagtcagttaatttgaaatcaatcatgggtgtaatgagcttaggagtgggacaaggtgcagatgtcacaattagtgctgagggagcagatgctgatgacgccatttctactattgctgaaacgatgactaaagaaggccttgcagaataa

SEQ ID NO: 2809 - DNA, 1509 bp, Artificial Sequence
  Optimized genes for Lactococcus lactis
atgaataagcgtgttaaaattgtatctacattaggaccagctgtagaaatacgcggaggcaagaaattcggtgaaagtggatactggggtgaaagcttggacgttgaggctagtgcaaaaaatatcgctgcacttattgaagaaggagctaatgtgtttaggtttaacttttcacatggtgatcatcccgaacaaggtgcgcggatggccacagttcatagagctgaagaaatcgcaggacacaaagttggattcctgttagataccaagggtccagaaatgagaacagaattatttgcagacggtgcagatgcaatttcagtagtcacaggcgataaatttcgtgtagctactaaacaaggcctcaaatccaccccagagcttatagcccttaatgttgcgggaggtctggacatttttgatgatgttgaaattggacagacaatcttgattgacgatggaaaattgggactatctcttacagggaaagatgctgcaacacgtgaattcgaagttgaggcacaaaatgacggggttattggaaaacaaaaaggtgtcaatattcctaatacgaaaattccttttcctgcccttgcagaacgtgatgacgctgatatccgatttggtttgtcacaacctggtggaatcaattttattgcaattagtttcgtgcgtactgcaaatgatgttaaagaagtccgtagaatttgtgaagagacaggaaatcctcacgtacaacttttagcgaaaattgagaatcaacaaggtattgaaaatctcgatgaaatcattgaagccgctgatggtataatgattgctagaggtgatatgggtattgaagtaccatttgaaatggttcccgtttatcaaaaacttataatttcgaaagttaacaaagctggaaaaattgttgttacagcaactaatatgcttgaatctatgacttataatccacgtgctacacgtagcgaaattagcgatgtttttaatgctgtaattgatggtactgacgctactatgttaagtggggaatcagctaacgggaaatatccacgagaaagtgtgcgtactatggcgactgtcaataaaaacgcacaaaccatgttaaaggaatacgggcgccttcatcctgaacgttatgataaatctacagtcacggaggttgtcgctgcctctgttaaaaacgctgctgaagctatggatatcaaattgattgtagcattgaccgaatcaggcaatactgcacggttaatctcaaaacatagaccgaatgctgatattttagcaattacatttgatgaaaaagttgaacgcggtttgatgatcaattggggcgttattccaacaatgactgaaaaaccatcatctactgatgacatgtttgaagtggctgaaaaagttgcgttagcttcaggtctagttgaatcaggagataacatcattattgtggccggagttccagtaggtacgggtcgtactaatactatgcgtattcgaacagttaagtaa

SEQ ID NO: 2810 - DNA, 399 bp, Artificial Sequence
  Optimized genes for Lactococcus lactis
atgaaaaaagaaggtattttgaacagcgaactagccaaaatagcagacgacttaggacatacagatcaagtttgtattggagatttggggttaccagttccttcaggcgttaaaaaaattgatttagctttaactcgtggtaagccatctttccaggaagttctcgatatctaccttgaaaatatcctcgtggaaaaagtttatttggcggaagagatcaaggaaaataatcctgaacaattagctattcttttgaccaaattatcagctgatgttgaaattgtttttgtcagtcacgaaactcttaaacttatgaatcatgaagtaaaagcagtcgtaagaacaggagagaacacaccatattcaaatattattctgcaatctggtgtagcactttaa

SEQ ID NO: 2811 - DNA, 669 bp, Artificial Sequence
  Optimized genes for Lactococcus lactis
atgactcttgacaatcatcattgtgttcagttagtaccacttttcgaaaagctcgcggaacaagatttaaccaaagtagaaaaaatcgttgaacataaaaaaataaaaaaaggagaaatcattatttcgcctgataaagaacccttacttgtcattgttgcacaaggggcattaaaaattagtcaactatcccaaagcggcaaagaacaactattgcgtattatagaagcaggagattatgaaggtgaaggcgccttattaggtgttacaaatggacaattatatggacaagctatgattgattcaacaatttgtttccttcgccagtcagactttgaaacgttgctcactacttacccttcactcagtcttcaattattgaaacttaatgctaaaaaatatttggctgctgaacaccaagctggttttcttgctttggatgatgttgaagcgcgtctggctcattattttttaaatctgtctgccacatcagatagtatttactttgaaatcccaatgaaacttaaagagttggcaaattatattggtacttcaccagaaacaatttctagaaaaattaaagtgtttgaggaaaacaaaattatttctcgtcaaggtcgaatgatcaaattgttagataaggagaagcttgaagatgactttgcataa

SEQ ID NO: 2812 - DNA, 597 bp, Artificial Sequence
  Optimized genes for Lactococcus lactis
atgtattatcctgagccaattgcccgtttgatcgagagcttttcaaaactacccggaattggtcaaaaaactgcaacgcgtcttgctttttacaccataggtatggaagatcaagatgttaatgaattcgcaaaaaacttactttcagcaaaacgtgatcttagtttttgttctatctgtgggaatctcacagaaagtgacccatgtgcgatctgcactgacccaacacgagatcgtacaacaattttggttgtagaagaatctaaggacgtcttagcgatggagaaaattcgggaatatagaggtttatatcatgtgttgcacggcacaattagtcctatgaatggaatttcaccagatgaaattaatgtaaaaactcttattactagactcatggattcagaagttaaagaagttattatcgctactaacgctacatcagatggagaagcaactgctatgtatttggctcgcatgattaaacctgcaggaattaaggttaccagactggctcgtggtcttgctgttggttctgatatagaatacgccgatgaaattacattatcgaaagcagtcgaaaatcgtttagaaatttaa

SEQ ID NO: 2813 - DNA, 975 bp, Artificial Sequence
  Optimized genes for Lactococcus lactis
atgcttgataagatttctgtagttgtcacttgccataatcatgaagcttatattgagcaatgtctccgtagtgtgttcgctcaaacttatcgcaatatagaacttttagtttttaatgacggtagcacagatcaatcagggcaagtgattgaaaaaattcttaaagagtcaccatttagcgagactttttactttagtgaagaaaatagaggaattgtttcaattagaaacgatgctcttacaaaaatcaaaggagattttttattatttgttgactctgataattatttagatgaccaatatattgaaattttgcaccaatcactccaagaacagaatgtcgacatcgcgtattgtcaactttgggattttgttaattctcgtcaagttcttcgggatgatttagaattttcattggataaagaattagaaggcaaccttattgatatgagttcacttgttcgtgtcagtaaaatcttgaatgtacgttttgatgaacagttgaatcataaagcattagaagattatgatttctggttatctttaattctaatcaatcacgctaaaccaattttcgttaaaggaattaaattgaattatcgagtacttaacacatctcgtaccgaacgtggtaattgggacaaatactatgacagttacttctatttactagaaaaacatcaaacgctccttcctaaagaggtactgaaggcatctcaagcaaacgttaaaatttggttaaaatcatacttagaatcagatcaacaattgactgaaaacatactgaagatcaaggaaaaagataaacatattagcaatctacaaagagaaatagatttgttaaagtcgttgttggctgcaaaagaagacgaaattgataaaacaaaagccgaacttgaagaaaaaaaacaagaaattgatattatcaaaaattccaaatcatataaatttttgcaaaaacttaaaggtaattaa

SEQ ID NO: 2814 - DNA, 1644 bp, Artificial Sequence
  Optimized genes for Lactococcus lactis
atgaaattttcagaattgggtttgtcagaagggattgtaaacacactgactgaaatcggttatgaacaaccaacacccattcaagaacaaactattaaacttgctcttgaagggagagatgtgcttggtcaggcccaaactggtaccggtaaaacagcagcatttggtcttcctactatcgaaaaaattgatgcttctaatccagctattcaagccttagtcattgcgcctactagagaattggctgtccaaggacaagaagaactttttcgattcggtaagtccaaaggtcttaaagtacgtacagtttttgggggatcatctatcgaaaagcaaattaaaggtttaaaagctggagctcatattgttgttggaactccaggacgtctagttgacttaattaaacgaaaagcaatcaaattagaccaattagaaacattgattttagatgaagctgatgagatgctcaacatgggatttttagaagatattcattttattatcgagaaaactcctgaagctagacagactcttctctttagtgctacaatgcctaatgacattaagaagataggagttaaattcatgaaaaatccagaacacataaaaattgccgctaaagaaatgacagccgatcgcattgatcaatactttgtgaagaccaaagaatttgaaaaatttgacgttttaacgagactgttggatgttgagcgtccagaactcgcaattgttttcggacgtacaaaacgtcgtgtagatgaacttattcgtggattgaaattacgtggatatcgcgcagaagggatgcatggtgatcttgatcaaaataaaagactagcagttttacgggattttaaagcaggtcatattgatgtgcttgttgctactgatgttgcggcaaggggcttagatgtttctggagttacacacgtctacaattatgatatcacgcaagatcaagagtcatatgtacatcgcattggtcgtacaggacgtgcaggaaaatctggcagaagtgttacatttgtatcgtataatgaaatgggttatttgcgtgcgatcgaaaatatgacgaaaaaaccaatgaaaggtctcaaaccacctactaaagaggaagcttatcaagcaagcttgtcagtggctatggatgatgttttgcgtgatcttagcgacgacagtgcaaaagctaaattagcaaagtttgataaacaagcagcgtcattgcttgagaaatttgacgctaaagaattagtcgccttgttactacaaggtcgtgtaaaagatccagataatcaagaagaagtcaaaataactgctgaacgtccgcttccttataacggtgaaggaaaaggttttaaaaaaaagggtaaagggggcggcggacgttataaaggaagaggcaatggcgaccgtgatggtaatagaggtggttatcgtggtaaccgtgatggtaaagacggagatcgtgggggagaccgtaaacggaattggaaagatcgggatgataatagaggaggttaccgcggaaaacgtgatgaccgacgtttcgatgatcgaaaacagggagaaaaaactccacgcaagcgaacaacaggtaccgaaaaatcagctggattcgttatgagaagtcgaggcgacaaataa

SEQ ID NO: 2815 - DNA, 1038 bp, Artificial Sequence
  Optimized genes for Lactococcus lactis
atgtccttaccgctttatcaacaaatttcagatgatttgaaacagaagatagtaactaaaacatttaaaagcggcgatcaacttccaacagaaaaagaattgagtgaaacatatagtgttagcagaatcactgcaaaacgtgctcttacagaactcgaacaattaggtttggtgagtcgaacaagaggtaaaggaacgtttgttcaagaacttaataagaatcacactaaacttcttaaacgtgttctttttatcattccattcgaagggatgtcatttggcgatttcacccaaggattagtaccagctttaaaagtggaaaatacaacagttttcattacgtatgaatcatatctcaaagaaaacacagcagatgacattaaagaaaattttgacggcctcatttattacccaatgtatacagaagattacttagatatccttcttgaattgagtctacaaaattttcctgttgttttgttggataagcaaatctatgatttaggttttccatgtgtctcatcagacaacttcaatggaggtgaacaagctgcccaagctttattaaacctaggacataaacgtattgcatttgttgcatctaatgacactcaccatcctcaaacaactcgtaaccgctatttaggttatgttaaagttttgaaggaacaggggattaaatttcatactacgctcgacgattctttatacactgaaagttcagtcttggaactgattcataatgaaaaagtcactggtttgatctgtgagaatgatttagttgccttacaaactatgaaaactcttcaagattctcatttttctgtacctaatgatatatcgatcattggatttgatgatattcaagcggcttctctatcaaatccacctttaacaactattgcacaagattttattggaatgggacggattgctggtgagcttctgcttgactggattaaatcaggtcaaacccccaaagatgttaaagtaccaattaatcttattaaacgtaaaaccacagaggaattgaaataa

SEQ ID NO: 2816 - DNA, 774 bp, Artificial Sequence
  Optimized genes for Lactococcus lactis
atgtcgcaagatttgtctcaaaaaaataagccttatctaacaaaggttaaaaaaatgcgtattaataaataccttgcacacgcgggggttgctagtcggcgtaaagctgaagaattaattctcgctggaaaagtcacagttaacaatgtacctatgactaatttaggatatcaagttagcaccggtgatattgttgaggtaaacggcgttgcagtatataatgaagaaccagtctattacttgcttaataaaccacgtggctatatttcttctgtgagtgacgataagggaagacaaacagttatggatttaatgcctcaagtaaaagaacgtatctatccagttggtcgattggattgggacacttctggtcttcttttgttgacaaatgatggtgaattcactaacatgatgacacatcctagacacggggttgacaaggtttacgtggcaaaagttgaaggacaagctaataaagaaaatcttcgtccattaacacttggtatgactattgaaggaaaaaaagtttcacccgcccgttatgaaatcattaaacaagaaaaaactaaaaatcattcaattgtctcattaaccatccatgagggtcaaaatcatcaagttaaaaaaatgtttgcagccgctggtttgccggtacagaaattatcaagaattcaatatggatccttaacgctcgatggcctgccaactggacaatttcgacgccttagtaaaaaagaagtgtcacagctaataaacgctgcacaaggtaattaa

SEQ ID NO: 2817 - DNA, 465 bp, Artificial Sequence
  Optimized genes for Lactococcus lactis
atggactcaaataaagctgcagaagttttccttacaaccgtcattaaaagggggaaagccgagatgatgcatagattcaatacatattcacaaggtgaacatttagttcttggttatttgtacaaagaagctggcaagcaaattgttccatcaaaaatcgcaaaatttactcacacttctacagcacgtatcgctacaattttaaataacttagaatctaaaaatctcgtgactcgagagataagtcgcactgatcgtcgtaagatcttggttgctattacagataaaggaagacatgtagccgaagaaattcgtgttgaagcttgtagcaatcttgctcgtgtatttgaagaaatgggagaggaacggacggaaagttttattgaaaactttaaactatttctggaaattggtatgaaattggcgaaagaagataaagaaaaagaagaagaaaaaaatgcataa

SEQ ID NO: 2818 - DNA, 405 bp, Artificial Sequence
  Optimized genes for Lactococcus lactis
atgaacattaaaaaggctgcagaactctcaggtattaaaactgataacattcgttattatgaaagaatcggattgattcctaaaattacacgtacagaatctggtatacgcaactttacagaagcaaatatacgaacgttaaaattcgttaaacatatgagagatgctggcgtacaggttgaaccacttactcgttatatggccctagtcaatgaaggaaatccagaaactaaagaggaacgtattgaaattttgaaaaatcaagtggaacaacttcggaccgagattatcgaaaagcaatcagctcttgattacctgacttttaaaattgaaaattatgacgaagttatgttacctaatgagatcaatttaaatcaaagcagtaaagaaacaattaaaatctaa

SEQ ID NO: 2819 - DNA, 900 bp, Artificial Sequence
  Optimized genes for Lactococcus lactis
atgatcttgatcacagggggtaacggtcaactcggtacggaattgcggcaccttcttgatgagcgcggcatggcttacactgctacagacgccaaggaactggatattacagatggagtagctgtcgacaaatttttcgacgaaaataagcctgaattggtttatcattgtgcagcttacaccgccgtagataaagcagaggatgaaggtcgtgaactcgatgaaaaaattaatgttgatggaactaaaaatgttgcagaagctgctgcaagagtaggtgcaactttagtgtatatttcaacagactatgtttttggtggaacattaccgattggtcaggaatggcctgtcgatgcgccaaaagctccagaaagtgaatatgggcgtactaagcatcttggagaagaagctgttgttgcatcaggtgtcaaacattatataatccgtacagcttgggtttttggttcatacggacccaatttcgtatttactatgcaaaatttagcaactcgattcccagaacttacagtggttaatgatcaacatggtaggccaacttggactcgtaccctagcagaatttatggtttatttggtatctgaaaaagcggattttggattttatcacttgactaacgacgctgcacctggagaggatgttacctggttcgattttgctaaagaaattttaaaagatacagatgttttagttaaaccagtcgacagctctaaatttccagcaaaagcgaaacgtccttttaattctacaatgagtcttgaaaaagctaaagccacgggctttgtgattccaacatggcaagaagccttagcttcaatgcttgagaaaggcgatttaagagaaaacaaagatggagttaaaggagaaattaataaaaaataa

SEQ ID NO: 2820 - DNA, 696 bp, Artificial Sequence
  Optimized genes for Lactococcus lactis
atgcttaaattgcaaaaaaaactaaaaaatgactatggacttgtttttaatgatgaagatttgcttaagacagctttcacacattcatcctttacgaacgaagaacgtcttccaaaaatcgcaaataatgaacgtttggaatttcttggtgatgttgcactgagcctcgttatttcagactacttatatagaacttatcctgaaaaactcgaaggtgaattatctaaaatgcgctcgagtattgttagaaccgaatcattagcaaattttagtagaagttgtgggtttggtgaatttcttcgtttgggacacggtgaagagaagatgggaggacgtgatcgagaaactactttagaaaatctatttgaggcgttcttaggagccttgtttattgatcaaggaatggatgaagttcgtaaatttatccagcacgtcgtaatcccacatgttaaaaatgatgattacgtgaaagttattgattataaaacagaacttcaagaagtattacaaattgggggagagacaactatttcatataaaatattgaaagaggaaggtcctgcacatgaccgttcattcgtcgctgctgtttttaataatggtaaagaattaggtcggggcttaggcaaatctaaaaaggtggctgaacaaaaagccgctgaaaacgctattaaaggtcaaaaccatgtatcttaa

SEQ ID NO: 2821 - DNA, 879 bp, Artificial Sequence
  Optimized genes for Lactococcus lactis
atgaatattgtcttaaaattagaaacgaaagaacgtcaacaactagctgaaaaatataaatcttacgaacaagttagcaaaaatccttacatcaccttctttgcaaaagtgggcaaaacttcgattagtgtgtataccagtgggaaagttgtatttcaaggcaatgaagctgagaaactcgcctctgattttggacatattgcccaggtagttccacaaaaacaaactaatttaattggtactgatgaagtcggaaatggtagttatttcgggggacttatggttacagcatccttcgtctcagaagaaaaccttaattttttgaaagagataggagttgctgattcaaagaaacttacagacgaaaaaatttgtcaaattgcaccaaaattgattgacagaattcctcatgtggcattggttgtagaacccgctaaatacaacgaagtaattgcttcaggatataatgcagtttctattaaggttgcattgcacaatcaagcgatctatttgttagaaaaacaacttggtcataaaccagaaaacattgttattgatgcatttacaacagaagctaattataaaaaatatgttaataaagaacagaatcacccattaacaaaagttacattactaactaaagcagaggatcaatttttagcagtagctgtttcatctattatcagccgttatttgtttcttgaaaatttgaaaaagctctcaaaagaatcaggttttactcttccttctggtgctggaaacctgtcagacaagatagccgctcaaattatcaaaagtcaaggtgttgatgctttaaatcaacttgcgaaacttcattttgctaatactcaaaaagcgattaagatcgctcaattataa

SEQ ID NO: 2822 - DNA, 777 bp, Artificial Sequence
  Optimized genes for Lactococcus lactis
atgggacaaacaattaaggaaattaaagcaactttagcaaaattaacggatttatcagctaaagaatttttggaatatgaagctgatgaaagagcaggtgttcaagctgccttaaaatcacgtaaaaagcaaatcttagctgaacttgctgaagaagcacgtttggaacaaatgctagagtttgaaaaagaactatatggccaagaaattcaattaatcgcaggaattgatgaggtaggtagaggtccacttgcaggccctgtcgtgactgcggctgttatactgccaaaaaactgtaaaattcgaggattgaatgatagtaaaaaagttcctaaaagtaaacaccatgcaatattgtcagaaattcaggaaaaagcacttgctatcggaattggtattgtagatgccgagaaaatcgatgaagttaatatttatgaagcaacaaaaattgccatgatccaagccgtatcgaaattgtctgttaaacctgaacacctccttattgacgctatggtcctcgactttcccatagctcaaaccaagattattcatggtgatgcgcggtcagcttctattgctgctgcaagtattgtggctaaagttactcgtgatgagatgatgaaagaattcgctttagaatttccagaatatgacttcgaacataatgcagggtatggtacagctaaacatcttgaagcgcttacaaaatacggaattacacgcattcatcgtaaaagctacgaaccaatcaaaactatggttaattttaagtcttaa

SEQ ID NO: 2823 - DNA, 354 bp, Artificial Sequence
  Optimized genes for Lactococcus lactis
atggcaataaaaaaaacttatagagtaaaacgatcaaaagacttcgatcaaattttctcagcaaaacattcatttgctaataaaaaatttgttgtttataaattaaatacaaatcaacctcattttcgtgttggtctaagtgttagtaaaaaactcggtcacgcggttcttcgtaaccgtattaagagactgcttcgtcatgctattgccgaatttaaaccatatttgacagatgaggattttgttatcattgctcgctctggagtagaaactttgagctttgaagaagtgaagaaaaatcttaaacatgtcttaaaattatctaagatctacgtcgatggcgaaaatgactaa

SEQ ID NO: 2824 - DNA, 381 bp, Artificial Sequence
  Optimized genes for Lactococcus lactis
atgagtaatcgcaaactcggacgaacatcttcacaaagaaaagcaatgttgcgtgatttaacaactgaccttattattaatgaaactattgtgaccacagaagcaagagctaaagaagttcgccggactgttgaaaaaatgataactctgggaaaaaagggtgatctttcagctagacgtgctgctgcagcatacgtacgtaatgaaatcgctattaaagactttaatgaagagacagaaacattccctactgcccttcaaaaattgtttaacgatctagctaaacgttatgagggtcgtaatgggggttatacgcgaatcttaaaagtcgaaccacgtcgtggcgatgccgcaccaatggcgattattgaattagtttaa

SEQ ID NO: 2825 - DNA, 360 bp, Artificial Sequence
  Optimized genes for Lactococcus lactis
atggctagagtcaaaggctctgtagctactcgcaagagacgaaaacgtattctaaagttagctaaaggttattacggagcaaaacacaaattatttaaaacagcgaaagaacaagttatgaacagttactattatgcttttcgagatagacgtcaaaaaaaacgtgacttccggaaactgtggattgctcgtattaatgccgcggctcgtatgaatggtttgtcatattcaaaacttatgcatggattaaaacttgctgatatcgaagttaatcgtaagatgcttgccgatattgctatagcagatgccgcagcttttaccgcactcgctgaggaagcaaaaaaagcattggcaaaataa

SEQ ID NO: 2826 - DNA, 348 bp, Artificial Sequence
  Optimized genes for Lactococcus lactis
atggcagaaattacatctgcgaaagcaacggcaaaaactgtacgtgtttcaccacgtaaaacacgcttagttatcgaccttatcagaggtaagagagttgcagatgctattgcgattctcaaatttactcctacaaaagctgctgtcgaagtcgagaatgtacttaattctgccattgcaaatgcagaaaacaattttggcttagaaaaagctaacttggtagttagcgaaaccttcattaatgaaggtcctacaatgaaacgttttcgaccacgtgctaaaggatcagctagtccaattaataaacggactgctcatataactgttgttgtggccgaaaaggaataa

SEQ ID NO: 2827 - DNA, 246 bp, Artificial Sequence
  Optimized genes for Lactococcus lactis
atgaaacaaaacattcaccctaattatcaaccagtagtttttatggatactacaactgggtttaaatttcttacaggttcaacgaagggtagtaaagaaactgtcgaatgggaagacggaaatacatatcctttaattagagttgaaatctcaagcgattctcatccattctacaccggacgacagaaatttcaagctgccgatggccgtattgcacgtttcgagaaaaaatatggtaaacaataa

SEQ ID NO: 2828 - DNA, 135 bp, Artificial Sequence
  Optimized genes for Lactococcus lactis
atgaaacgtacctatcaaccacacaaaaaatcaagaaaaacaacacatggctttcgttctcgtatggcaactaagaatggtcggcgtgtattagccgctagacgccgaaaaggacgtgctagtcttactgtttaa

SEQ ID NO: 2829 - DNA, 117 bp, Artificial Sequence
  Optimized genes for Lactococcus lactis
atgaaagttcgtccatcagtaaagcctatctgtgaatattgtaaagttattcgccgaaatggacgtgtcatggttatttgcccagctaatcctaaacataaacaaagacaaggttaa

SEQ ID NO: 2830 - DNA, 939 bp, Artificial Sequence
  Optimized genes for Lactococcus lactis
atgatcgaatttgaaaaaccaaaaatcacaaaatttgatgaaagcgaaaattatgggaagtttgttgttgaacctttagaacgtggatacggtacaacgttaggcaattctttgagacgtgtgttactttcaagtctcccaggtgcggcagttacatcaattcaaattgagggagtccagcatgagttcgctacaattccaggtgtgcgggaggatgttatacaaatcgtactagcggttaaaggcattgcaattaagtcatacgttgaatctgaaaaacaaattgaattggatgtcactggacctatggacgtaactgctggcgatattctcacagactcagatattgaaattgtcaataaagatcactatttatttagcatcgctgaaggtcattcaatgcgagccgttatgacagttaaaaaagggtatggatatgttccggatgatgaaaataaggttgatggagcacccattggtacgatagctgttgactcgatctatacccctgtttcaaaagtcaattaccaagtagaaccagctcgtgttggaggtgatagttcatatgacaaattaactttggaaattactactaacggtactattgttagtgatgaagcactgtccctttctgcaaaaattctaactgaccatttaaatttgttcgtcgatttaagtgaagtagctgctgaagccgaaacacttgttgttaaagatgaagtaaaaacagaacgtgtacttgacaaaataattgaagaaatggatttttcagtaagagcttataacggtcttaaacgtgcaggtatcaataccgttgcagatattgttgaaatgtctgaggctgatatgattaaagttaaaaatttaggacataaatctgtggaggaagtgaaagtaaaattgactgaacttggacttagtttgaaaaagcgcaaataa

SEQ ID NO: 2831 - DNA, 564 bp, Artificial Sequence
  Optimized genes for Lactococcus lactis
atgaagatcacagctttagaaggtcaaaagatttctgaactttcaatgattgaggttgcccatgcactattagagcaaaatgggaaagaaatgcaattttcagaaatcattcgtgctattcaggattatctcgaaaaaagtgacgatgaaatcaaagcttcaatatctcgattctacacagaaattaatacagatggatcatttattccattgggaaacaatatttgggcccttagaagttggtatgctatagatgaaattgacgaagaagtaatcgcattagatgaaattgaagatgaagaagaagagaaaccagcaaaaaaacgtaaaaaagttaatgcgtttggtattgaggatgagattgaccctgaagatgaagaaggcacgaaagaaactactgaagaagatatgtcttatgatactcaagctgaagatgaagataaagacgatgtggcagcttatgatgctgaacttgcagaagtcgaattggataatgttgacgaagaagttgatattgacgtagaggatgatgaagacgatagcgatgataccgacgaagattaa

SEQ ID NO: 2832 - DNA, 1227 bp, Artificial Sequence
  Optimized genes for Lactococcus lactis
atgaatgaatttgaaaccttgttgaactccgtagaagatgtcaaagttcgggatgtggtaaaaggggaaatcttgtctgttgaaaatggacaagctacagttgctattgttggtactggagtagaaggtgtacttacacttcgtgaaattacaaatgataaagacgctgacattaatacattcgttaaaccaggtgatgtcttagatctcttggtcattaaacaaattgttggaaaagaagcagaaggtgctaacgtttatttactgagccttaagagattagaagctcgcaaagcttggactcaactcgaaggtaaagaaggtgaaattgttaccgtaaaagttactaaagatgttaagggtggattatcagttgattataatggggttcgcggttttattccagctagcatgattgatacatactttgtgaaagatacaaaaaaatttgttggtgaagaaatcgaagcgaaaattatcgaggtaaatgcatcagaaaatagatttattctctctcgacgagccgtagttgaagccgaagccattgaaatgcgtaaagaggccttcgcacaacttcaagaaggtgacatcgtggagggaacagtcagtcgagtgactaattttggtgcatttgttgatcttggaggcatcgatggattagtacacgtctcagaactatcacatagtcgtattaaaagaccaagtgacgctgtgaaaccaggagatgtagttaatgtgaagattctaaaattagatccagaagctggtcgtctttctctttctcttaaagcaactcagcctggtccttgggaacaagttgaagaaaaagcacctgttggatcaacagttgaaggcactgtcaaacgtttaacggactttggagcgttcgtcgaactgtatccaggcgttgaggggttagttcatgtttcacaaataagttgggaacgtgtagagaatccgaaagatgtcttgaaggttggacaagttgtaaatgttaaagttcttgacgttaaaccagctgaggaacgtatttctttatcgattaaagcacttgaagaagcaccagcaaggcctgctagaaataacgataatgatggcgaaaaaagagaccgtaaacctcgtgctccacgtaaagcggcaaagccctcatatgatttacctgaaactcaagaaggattttcattggctgattttttgggtgaagacttcgatataaacgatttgtaa

SEQ ID NO: 2833 - DNA, 294 bp, Artificial Sequence
  Optimized genes for Lactococcus lactis
atgaccaaatatgaaatcctatatattattcgcccaaacatagatgaagaagccaaagcagctcttgtagaacgttttgatggaattttaactgataatggtgctgcaaatctcgaaagtaaagattgggaaaaaagaaaattagcttatgaaatcaatgactttcgtgaaggcatttaccacattgctactttcgaagctgagacaacatcagaggcattgtctgaatttgatcgattggcaaaaattaatcttgacatcttacgtcatatgattgttaaggttgaagcgtaa

SEQ ID NO: 2834 - DNA, 393 bp, Artificial Sequence
  Optimized genes for Lactococcus lactis
atggctcaagtacaatatgccggaacaggtcgccgtaaaaatgcggttgcacgtgtgcgtttagttccaggaactggtaaaataacagttaatgggcgagaagtcgagtcatacattccacacgctgatatgagattagttatcaatcaaccatttgcagcaactcaaaccgaaggatcttatgacactcttgttaatgtaaacggcggtggcgttagtggacaagcaggtgcgattcgacatggtattgctcgtgctctcttgcaagtagatcctgatttccgtagcgctttaaaaagagcaggtttgctaacacgggatgctcgtatggtcgaacgtaagaaacctggacttaaaaaagccagaaaagcttctcagttttcaaaacgctaa

SEQ ID NO: 2835 - DNA, 309 bp, Artificial Sequence
  Optimized genes for Lactococcus lactis
atggcaacaaaaaaaattcgcatccgtctcaaagcctatgaacatagaattttagatgcagctgctgagaaaattgtggaaactgcgaaacgtaccaatgctgaagtttcaggtccaattccattgccaacggaccggtctgtatatacagtcatcagagcaactcataagtacaaagatagccgtgaacaatttgaaatgcgtacacacaagcgacttattgacattattgaacctacacaaaaaactgttgatagtttgatgaaattagatctaccttcaggagttaatatagaaatcaaactttaa

SEQ ID NO: 2836 - DNA, 186 bp, Artificial Sequence
  Optimized genes for Lactococcus lactis
atggccaaaaaaagtatggtcgtaaaaaatcaaagaccagcaaaattctctacacaagcttacactagatgcgaacgctgtggacgaccacattcagtttatcgtaaatttaaactctgtcgtatttgtttgcgtgaacttgcatataagggtcaattacctggcgttaaaaaagcttcatggtaa

SEQ ID NO: 2837 - DNA, 270 bp, Artificial Sequence
  Optimized genes for Lactococcus lactis
atggctatttcaaaagaaaaaaaacaagaaataattgctcagtatgctcggaaggagggggatactggaagtccagaagtacaaattgcagttcttacatgggaaattaaccatttgaatgatcatatcaaatcacacaaaaaagaccatgccacccaacgaggactcatgaaaaaaatcggtcatcgccgtaatcttttgggttatttacgtggtaaagatgttcaaagataccgtgaattaattgcatctctaggcttaagacgttaa

SEQ ID NO: 2838 - DNA, 261 bp, Artificial Sequence
  Optimized genes for Lactococcus lactis
atggaacgtaaacaaagaaaagtttatcaaggtcgcgttgtgtcagataagatggataaaactattacagttgtagttgagacaaaacgaaatcatccagtctacggcaagcgtattaattattctaaaaaatataaagctcacgacgaaaataactcagcaaaaaccggagatatcgtacgtataatggaaactagacctttaagtaaagataaacattttcgtcttgtcgaaattgttgaagaagccgttatcatttaa

SEQ ID NO: 2839 - DNA, 279 bp, Artificial Sequence
  Optimized genes for Lactococcus lactis
atggggcgtagtctcaagaaaggtccatttgttgatgaacatttgatgaaaaaagttgaagcacaagtcaatgccgagcgtaaatcagttattaaaacatggtcaagaagatctacaatttttcctaattttgtgggacttacaatcgcagtatatgacggacgaaaacatgtcccagtatatgttcaagaagatatggttggccacaaattaggtgaattcgctcctacccggacttaccgcggtcatgctgctgatgataaaaaaactcgtcgttaa

SEQ ID NO: 2840 - DNA, 177 bp, Artificial Sequence
  Optimized genes for Lactococcus lactis
atgagtaaaacattggttcgtaaaaatgagtcattagatgacgctcttcgtcgttttaagcgtagcgttaccaaagctggtactttacaagaacttcggaaacgcgaacattacgaaaaaccatcagtaaaacgaaaaagaaaatctgaagcagccagaaaacgtaaaaagtattaa

SEQ ID NO: 2841 - DNA, 1197 bp, Artificial Sequence
  Optimized genes for Lactococcus lactis
atgacttatcacatcaaaactattggtaataatattgaccaaattgctcttgacgaaattggtgaaggtttccttgttaatcaagtttcagaagccgagagtgatgctttcatttgcagagctcaacctttccatgattatgaatttagcaaagccttattggcaattgggcgtgccggcgcaggttttaataatattccaattgaaaagtgtgcgtctaaaggaatcgtggttttcaacgcacccggtggtaatgcaaatgctgtaaaggaattagttttgtcaatgatgatttttgggacccgtaatttaaaacctgcgaacaaatggctaacaggccaaaaaggtgatgataataccatagatggagctgttgagcatggaaaaaaagctttttctggatcagagatatcaggaaaaacattgggtgtcattggacttggtaacatcggtagtaaagtagcaaatgatgcacaacgacttggaatgcgtgttattggatacgatccgtatcttagtattgaacatgcttggaacttgtcacatcatgtaaaacgggtcaatgatttggccgaaatatttgaaaaagccgactacattactgttcacactccagcaacagatgaaacgacaaagatgctcaattggaaaaatctttccaagtgtaaaaaaggagttattttgttaaattacgctcgtgatgagattacagataaagaagctgtattaaaagcaattgatgaaggaatcgtgagattttttggtacggattttggctcagaaaaattttatcatcatccacaggtctttcttactccacacctcggtggaagcactgctgaagcttcactcaattgtacacgaatggcactagactctgtccaaacttatttaaaaactggcgaaatcattaattctgtaaactttcctcgtgttcttcaagaattaaacacaccatatcgtgttacacttattaataaaaatgttcctaatgttgtggctcaaatttctttagcagttgcggcagaaaatattaatatcgctaacatcgtcaaccgtgggcaaggagattatgcgtatacattattagacctggatgaaaaagatgaaggtaaacttgctgcattggtttcgcgctttgaagctgctgacaatattatcagagtacgcttgattgaaaatcaaagtctggtttaa

SEQ ID NO: 2842 - DNA, 651 bp, Artificial Sequence
  Optimized genes for Lactococcus lactis
atggccgcaaaagggttattagttatggacgttgattctacattgattgaagaagaggttatcgatctccttggtgaaaaagccggtatgggtgacaaaatctcagaaattacagctgctgctatgagtggagaaattgattttaaagaatcattacgtgaacgagtggcactattaagtggtcttccaacaactatttttgatgacgtttacaaagaaatacatttgacgaaaggtgctactggactaattgaaacccttcacgctaaaggatggaaagtaggacttgtatcgggtggatttcatgaaattgttgacaaaattgcgcgtgatttgaaaatcgattatgtcttcgctaatagactttcagtagaaaacggccatttaactggaaagactcacggtacagtggtcgataaagactttaaagttgatcgtcttaaacaatgggcaaatgagaataaacttaacctctctgaagttatcgctgtcggagatggcgctaatgatattcctatgttgaatacagcagggattggtattgctttctgtgcgaaaccagcagttaaagccgcagttagctatcatatagataagcgcaatttactgactgttttagaatttgtagataagttggcagataaagaataa

SEQ ID NO: 2843 - DNA, 1098 bp, Artificial Sequence
  Optimized genes for Lactococcus lactis
atgatttataattttggtgccggaccgagtgtcctgccaaaagaagtgcttaaaaaggttcaagaagagctccttgactttgaaaagtcagggatgtcagttatggaaatctcacatcgtagtaaagcgttccaaaaagttattgatgaagcagaaaatgatttacgagacttgatgagcatcccacaaaattacaaaatattatttttgcaaggtggtgcatcatctcaattcagcatggtacctatgaatttggctattggcaaaaaagcttactataatatttcaggtgcatttggtgaaaaagcatatgatgaagctgttaaattatctcattttttagatttaatggctattagccttggtagtacaaaaaaagacaactataatcatttgttgaaaattgacaagagtaaaattgatgaaaaaaatggggcatacttgcatctaactacaaacaatactatcgaaggtacatctatatttccagaaaatttacctgaatttgcttctcttcctcttgttgctgatatgtcttcaaatattcttgcagtagattacgatgtttcaaagtttggacttatttatgcgggtgcacaaaaaaatttagggattgctggcttaacaattgttattatccgcgaagatctccttaacgaagctgaaagtctttcatctatgatggattatcaaatcttggtagaaaacggatctatgtataatacgccacccaccttcgcgatttatgtcgccggattagtatttaagtgggttaaagcccaaggcggtgttaaaaaattagaagagatgaaccaacgtaaagctcaattactttatgatcttattgatcaaagtgatttctatcagaatccaattaaaaataaagatgaaagatcaatttgtaatgtggtatttacttctccatcgcaggaactcgacgaactgtttactcaaaaagcagaagaaaaaggatttaaatcattgaaaggacacagatcagttggaggaatgcgtgcttccatctataatgcttttcctttggaaggagtcgttgagctagttaaattcatgaaagaatttgaggaaggttataaataa

SEQ ID NO: 2844 - DNA, 648 bp, Artificial Sequence
  Optimized genes for Lactococcus lactis
atgaaaaataaaattctggatctccgtgcgtacttcattgctggtccccaagactttcctaaattgagcatcgatgatgcaattgataaaatcagcgtcattataaaatctggagttactgtttatcaatttcgtgacaaaggaacaatttataaaaataaaaatcaaagattagaggtagcaaagcgccttcaagaggtagctcagaaagctgctgtttcatttatcgttaatgatgatgttgaattggcaagagaactttcagctgacggcattcatgttggtcaagatgatgactcagtgagtaaaattcgtgaacttataggccaagaaatgtgggttggactatctgttagtaacgatatggaattagaatcagcacaaaaatccggtgccgattatttaggtatcggaccaatttatcctaccaattcaaagagtgatgctgccgaaccaattggagtagatcatctccgtaaaatgttagaacacaatcaacttccaactgtgggtattggtgggattacagaaaattcacttactgaattgtctaaaattggattggggggtgttgcagtcatttctttattaacagaatcggaaaactacaaaaatatggtccaaaaaatcaagcaaaacattcgataa

SEQ ID NO: 2845 - DNA, 1176 bp, Artificial Sequence
  Optimized genes for Lactococcus lactis
atgacccaattcactaccgaattacttaattttcttgctcaaaaacaagatattgacgaattttttcgcacatctcttgaaacagcaatgaatgatttgctccaagcagaattgtcagcatttctaggttatgaaccttacgataaggttggttataatagtggtaattctaggaatggtagttattctcgtcaatttgaaactaagtatggcactgtccagctctcgattccacgtgatagaaacggaaatttctcaccagcgcttttaccggcttacggccgtcgagatgatcatttggaagaaatggtaattaaattatatcaaacaggagtcactactagagaaatctcagacattattgagcggatgtatggtcaccattactccccagctaccatttctaatataagtaaagccacacaagaaaatgttgcaacgttccatgaacgtagcttagaagcgaattattctgtccttttcttagacggtacgtatttacctcttcgccgcggaactgtttcaaaagaatgcattcacattgcgctggggattacaccagaagggcaaaaagctgttcttggttatgaaatcgcaccaaacgagaataatgcatcttggagtacactcctagataaattgcaaaatcagggaattcaacaagttagtttggttgtaacagatggattcaaaggacttgaacaaatcatttcacaagcttatcctcttgctaaacaacaacgttgtttaatacatattagccgtaacttagcctcaaaagttaaacgtgctgatagagctgttatattggaacagtttaaaacaatctatcgtgctgaaaatttagagatggctgtgcaagcccttgaaaattttattgcagagtggaaacccaaatatcgtaaggtgatggagtcattggaaaacactgataatttgttgactttttatcaatttccatatcaaatctggcattcaatttacagtactaacttaattgaatcacttaacaaagaaatcaaacgacaaacaaaaaaaaaagttttatttcctaatgaagaagcactagaacgttatttggtaactctgtttgaagactacaattttaaacaatctcaaagaattcataaaggttttggacaatgtgctgatacacttgaatcattatttgattaa

SEQ ID NO: 2846 - DNA, 1029 bp, Artificial Sequence
  Optimized genes for Lactococcus lactis
atgaaaactagatcacatcaaatgaaaaacgagttagaaaaagtgatgtctggtcgtgacatgacagagaacgaaatgaatatgcttgcgaattcaattattcaaggagaactgtcagaagtccaaatagcttcgtttctcgttgcattaaaaatgaaaggagaggctgcctctgaacttactggtcttgctcgtgcgttacaaaaagccgcaattcctattcctactaatcttacgaacgctatggataattgtggaactggcggggatcgatcattcagttttaatatttctacaactgctgcttttgttttagcagctggtggtgtaaacatggccaaacatggaaacagatctattacaagtaaatccggaagcgcagatgttctcgaagcgttggggatcaatttatatctaccagctgaaaaattagcacaagtttttgataaagtcggattggtttttttatttgcccaaaatttacatccagcaatgaagtatttcacaccagtccgtagacagttagaaattcctacaattatgaatctcaccggccccttgataaatccaattcctttagatactcagttgttgggaacatcacgtccagatcttttagaattgacagctaatgttctaaaaggtttgggtcggaaacgtgctcttgttattactggcgaaggaggcatggatgaagcgactccgtttggtcttaatcactatgctcttctagaaaacgacaaagtaactttacatgaattccgtgcttcagaagtgggtattagtgaagttcaacttaatgatattcgaggaggagaggcaccagaaaatgcagaaatcctgaagaatgtattagaaaatcaaccatcagcttttttggaaacaacggttttgaatgctgggctcggtttttacgcaaatggtaaagttgatagtattaaatctggtgttgaccttgcacgcgaagtaatcagcacaggtgcagctcttaccaagttgcacgaacttcaagcagaacaaatcggataa

SEQ ID NO: 2847 - DNA, 1188 bp, Artificial Sequence
  Optimized genes for Lactococcus lactis
atggctaaagaagtatatgatcgtagcaaaccacatgttaatatcggaacaattggacacgtggatcacggtaaaacaacattatcagctgccatctcaaaagttttgtcagataaaggttattcgaaagcgactgactttgcatcaattgatgctgcacctgaagaacgtgaacgaggaattaccattaatactgcacatattgaatatgaaactgaaaagcgtcattatgctcatatagatgctcctggacatgcagactatgttaaaaatatgattactggcgcagctcaaatggacggagctattttagttgtagccgccactgatggaccaatgccgcagactcgggaacatatcttattgtcacgtcaagttggtgtgaagtatttaattgtattcttaaataaagcagatcttgttgacgatgaagagctgatggaactagttgaaatggaagttcgcgatcttcttagtgaatacgattttccaggcgatgacatacctgttattgcagggagtgcgttgggtgctctcaacggagaaccacaatgggtcgctaaagtagaggaattaatggatatcgtcgacgaatatattccaacacctgaacgtgatacagataaaccacttcttctccctgttgaagatgttttcagtattactggaagaggcactgtcgcgtccggtagaatcgagaggggtaccgttaaagttggggatgaggtagaaatcgttggaattaaagaagagactaaaaaagcagtcgtcacaggtatagaaatgtttcgtaagactcttactgaaggtttggctggtgataacgttggcgctcttctacgtgggattcaacgagatgaaatcgaacgtggacaagtcattgctaaaccaggttctattacacctcacaaattatttgaaggtgaagtttacgtattatcaaaagaagaaggaggccgtcatacccctttttttgataattacagaccccaattctattttcatacgacagatgtgacagggtctgtaaaattgccagaaggtacagaaatggtaatgccaggagacaatgttcatattgacgttgaattgattcacccagttgcaattgaacaaggaacaacgttttctattagagaaggaggtcgcacagttggttctggtattgtggcagagattaaagcttaa

SEQ ID NO: 2848 - DNA, 1371 bp, Artificial Sequence
  Optimized genes for Lactococcus lactis
atgaaaaaaaaaatcatttcagcaattttgatgagtacggttgtcttatctgcagcagcaccattgtctggcgtctatgcagatacaaatagtgatatcgctaaacaagatgctaccatttcgtcagcacaaagcgccaaagctcaggcacaagctcaagttgattcattacaatcaaaagttgactctcttcaacaaaagcaagcctcaacaaaagctcaaattgctaagattgaatctgaagctaaagctttaaacgcccaaatcgcaactctcaatgaaagcatcgccgaacgtacaaagactttagaagcgcaagcaagatcagctcaagttaattcaagtgcaacaaactatatggatgctgttgttaattcaaagtcattgaccgacgttattcaaaaagtgacagctatagctactgttagtagtgcgaataaacaaatgcttgaacagcaagaaaaagaacagaaagaactgtctcaaaaatctgaaactgtcaaaaaaaattataatcaatttgtttcattgtcacaatcattagattcacaagctcaagagcttacatctcagcaagcggaacttaaagttgctacacttaactatcaagctacaattgctactgcacaagataaaaaacaaagtctcttagatgaaaaagcagccgccgagaaagcagctcaagaagcagctaaaaaacaggcagcctatgaagcacaacaaaaagaagccgctaaagcccaagcggctagtactgcggctacaacaaaggctgtggaggaagctacaagcacagtatcctcttcgcaagcatctcaatcatcaagcagcagtagtaatacgagttctaataatacatcctcgaactcatcttcatcttcttcaaatagttctagttcaaattcttcatcaagttcaaattcatctaatggaggtgggtcaacaaatactggaaataataatgctgcgggcacaggaaacaccggtggaagttcatcatcgggtattaatagcacgccaattgcaaacccttacgctggagggggatgtaccgactatgtatggcaatattttgcagcgcaaggtatttatattcgtaatataatgcccggaaatggtggccaatgggctactaacggtcctgcacaaggagtacttcacgttgttggcgcagctccaggtgtaattgcttccagcttctcagctgattttgtgggttatgcaaatagtccatacggacatgttgctattgtcaaatctgtaaattctaacggaactattactatcaaagaaggtgggtacggtactacttggtggggtcatgaacgaactgttagtgcatctggtgtaacttttctaatgcctaattaa

SEQ ID NO: 2849 - DNA, 468 bp, Artificial Sequence
  Optimized genes for Lactococcus lactis
atggcaaaattcggctttttagatgtacttgaagaagtccttgaaaaaggtttcacatatgactttgaaatgaattgggataaaagaaattttgcagttgaagtttcgtttttattagaggctgaaaatagttctggagcattgttgactgatgctgaaggtgtagaaagcgcagagaatatcgtttatgaagacgccgttcttttttataacccagctaaatcacgatttgatgaaaatgactatctggcaactattccatatggagaaaaaggtctttcacgtgaatttttggcatattttgcgcaattcctacaagaatctgctgatcaagggttagatgatttgatggatttcctcgctgacgaagccgctgaggaatttagtgtgaactgggataaagaagcgtttgaaaatggaattgctgatttatcagaaacagatttttataagtaccctcgttactaa

SEQ ID NO: 2850 - DNA, 300 bp, Artificial Sequence
  Optimized genes for Lactococcus lactis
atgatgaatatgcaaagtatgatgaaacaggcacaaaaacttcaaaaacaaatgcaagtgtcacaagaagaaattgctaatactacttttgtaggaaaatctgcacaagatttggttactgtcgaattttctggcgaccgtacactaaaatcattagatattaaaccagatgttattgacccagaagatcctgagacattacaagacatggtaaccgatgctgttaacgatgccttgagccaaatcgaaaaagttacggaacaaaaactcggtaaatttacaaagggtcttcctttctaa

SEQ ID NO: 2851 - DNA, 5952 bp, Artificial Sequence
  Optimized genes for Lactococcus lactis
atgaaatctcgtaaaaaagtaatatctataatccttgggttgatgttacttttacaatatgtgatcactccagtgggagctattgctggtgcaattaatgaggaaacgaatgatagtgatatcacactgagtcaatttaaaatcgacgaatcagaaagtaatgctgatcttatgacatttgatttatctctcaaaattaatcaaagtattctaaaatcaaaaaccacaatcatcgaacttgataaatctatcaaaattaatgagccaaacgaagccaatcgtcaaaaatctactgcaagttatactgctgacgaaaatcgacttacaatagatttaaacagtttaaataccggagaagttaaggttaatttctcaattagtaaagaactattaaaaaattttgaacgtcttactgcaaagcttaatgacagccaagttgatgtcttgctcccaaaaactagtagtacttcagaaacaccatctcaatctacgtcaacagttactcaaaatacagtaacaccagaaatcaaagaaaaagaaagctcaaccactaaacattcagaacaagcgattaaaacagtggaatcacaagacattagaaaattattggaagattcaggtatttctccagcaacgattattgattctgccaaagttatttacttggataaagaaggaaaaccatatcctgatcaaacagacgtccctattgacgcagaagtgcaaattgattatacatggagtattcctgaagatattcttcccttgaaatctggagactattttgattttaaacttcctgatggggttacaattgaacaggcaacttcgagtttaggtgactatggtacttatactatcaatgcggacggtacagttcgctttgtatttaatgagaaagtagaaacttatcacgatattaaaggaacattccactatgacgcacactttgataaaactattgttccaggagaagttgtagtagacaccccaaccgaagaaaactttccgccatcagaaattcacgtacgtccaacctacgatcaagcaatagataaatcaggtcactttgataaaacacctaatccttccgaagtcatttgggagattaatattaatcgacctttgaatactatggagaatgcaacattaacagatccaatgccagaaggtacaacttacgaaagcgtagagatttaccctgagacagtcggaaaaaatggagaaattatctctattgataaagaacatccacttgttaaaggtaccgattatactgtagattcaaacggtaaaatcacttttattggtaaatatgcaacaactgatcaggcttttaatgttgtttacacaacaaccattgacgaatcttcctttccagaaaaagaaggagctgtatcttttaaaaatacagctactctcaatgatggtaaaacagatacgaatgaatctgcttcagtaacagcacaatataaaggtccaatcaaaaagaatggcccatttacaacaggaaatgatcaaatttacaattggaatattgaatataattataatgaaaaaaatcataaagctggttctttcatagaagacacaatgtcagatgcgattgaacttgttaatggttctgttaaattatataaaattacctttgattctaatggaaaagagatcaaaggggctcaattaaaagaaggtgaagattataaacttgttcaagaccccgataacccccaaaaatttaaaattgaatttattactgatatagattatgccgttaaggttgagtatcagacaaaagtcaaagatattgttgatggaaatgttacaattgacaattctgtgactactgatacaggggataattcggaaagtgggggtaatgctacacaacaaggtattgttaaaaatatcgacggtgatatcgactacgaaaacagagaaatcccttggaaaattgatatcaactctccaggatattggatggaaaattggagtcttgaagataaaatgtcagaaggccttaccttcttagaaaacacatttcaaatcatcgataaaactgctggtaataaagtcttgtctccaaccgaatatactttgattaagaccacagcaggattttcagtcagctttaattctccattgaaggaaggtactgatcataaataccaaataaaatacaaaacaaagtttgatacttcagttatcgacaatggttcaggtcatgaaggcgatattaagtttgttaacgacgcaagtatgacctggaaggacaaaaatggaggggatcatacaaacaatgatcataaagaattcaaacctattccaccatttcaatataatggacaaaaatcaggatcatacaatgcaacaagtaaaaaaattacttggaccattgcagctaattttaatcaacaagaactcagcaatgcttctattacggatcctatcagtgatgatcaaaattacgtttcaggatctgccaaagtttatgaagctactatcaataagaatggtacttacactcttggtgctgaagtcacttcagacatgggaattaagattgtagaatcaaaggggtctgttaaagtagaattgcctgatggctctacgaaagcatatgtgttaatctttgaaacttcattagaaggtaatttaattaaccagaaagaatataaaaataaagcgacatttacaaataaagatatttcacatgatctttcagcgtcggtaacacctgctcatcagggagaatttgtaacaaaggacgggagccaaagtagcacagattcaaattatgttaattggaagttaacggtaaatgcttctcagtcaactttgaaaaatgttgaagtaacggacaatccatcctcgaatcaatatattgttgcaaaagatattttgatttacgggacatcaattgatgcatcaggaaatattacggaaaataagaatattattctggaacagggaaaagattattctgttgatatccaaacagataattcaactggagcgcaaactgtcaaaatcaaatttttgtcagaaattaacactgcctacgttgtggagtatagggcattaattactagcgataaagctaacgatgtcgttactaatcaagctcatatcacaggagacaatgaaaaaataattgaacaagatgttgaaaaagatgttccagtgacaaaccataatggaagtgcgaatggttctaaaggatcggttacacttgaaaaagttggtcctggtaaagctaaacttgcaggtgctcatctacaactatggagtatagggacagatggcaaaaaagataagttgattcgtgaaggggatactgataaaaatggggacttgaagttaggaaatttgcgtgttactgattatttattaatcgaaactaaagctcctacaggttatacgttggatgaagaactagttaaaggaaaaaaaattacagttgctaaagatggagaggttagcaatttcccaattcaagacgttgaaaatgagcctactaaagttatccttaaaaaagttgggcttactattgaaaacggcaaggaggttaagaacccacttcaaggagctgaatttaaggttttagacagtaacggtcaagttgtttcaggttatgaaaaattgacttcagactccagcggcaatgtgactattgaaaaattaactccaggtaaatattcactagttgaaacaaaagcaccagccggttatattcttgatccaactccgattgactttgaattgaaagccaatgaagagggcatcattccggatattaatctggagaaagttaactatcaaggttctgctcaacttatcaaacataactctaatggtcaagcactctcaggtgcaattttcaaagttatcgataaagacggaaacactattcaaacaaatctttctagtgacaaagatggaaaagttaccgctactggcctctcaccaggtgattattcttttgtagaaacaaaagcacctactggttatattttaaatacgattcctgttcacttcacaatctcagccgaagaagaagggcaaccacaaatggttattgctagtgataacttcattaactatcaaggatcagcagaacttataaaacaagataatgaaggacaacccctttcaggagctgtattcaaaattgttgacaaggctggaaaaacaatccaagcaaacttgacatcaggtaaagacggaaaagtcgtcgttgatggcctcgctcccggagagtatagcttcgtagagaccaaagcgccgactggatacattctaaatactaatcctgttcatttcacaatttctgataaagaagaaggccaaccaaaaactattatcgcctcagattcatttgttaattatcaaggatccgctcaacttataaaaagagacagtcagggacaaccattattaggtgctattttcaaagttgtagataataccggaaaattagtcaaagaaggtttaacttcagacaaagctggtaaagtgaacgtgacaggtttggctccaggagattattcatttattgaaacacaagctccaactggttatattctcaatacaattcctacaccttttacaattcttgctgaatcagaaggacaacctcaattagttgtcgcttcagacaatttcatcaattatcaaggaagtgcggaattgattaaacatgatattaacggccaagccttaagtggtgcgattttcaaagttattgatgcagatggcaagacaattaaagaaggcttaacatctgacgaaacaggcaaagtactaatcgaaggattggttccaggggattactcttttgttgaaacaaaagctccggaaggttatattttaaacactttgccagttaatttttcaattagtggggaagaagaaggaaaagtcaaagtagtgatggctagcgacaattttattaactaccaaggtagtgctgagttgattaaacacgattcacaaggtcaagctcttgaaggcgcaatttttaaagttgtcgattcaaaaggaaaaattatcaaagaagatctcgccagcgacaaaacgggtaaagtattgattgacaatttggcacctggagattattcgtttgttgaaacgaaagcaccgtcaggttatatactgaatacttcaaaggtcgatttcacaattagtacaaaagaagaaggacagcctaaagttgtaatggccagtgataatttcattaactatcaaggttctgcagaacttattaaacatgattctcagggacaagcactggaaggcgcagtttttaaagtcattgattcaaaaggtaaatcaattaaagaaaatcttgttagcgataaggaaggtaaagtgctcatcgaaaaccttgtaccaggcgattactcttttgttgaaacaaaacctcctagtagttatattctgaacacttccaaggtggattttaccatatcaactaaagaggaaaataaacccaagatagtgatggcttctgaaaactttattaactatcaaggtagcgctgaattaattaaggtcgatgagaatggtaaatcgttatcaggtgccgtgtttaatgtaacgaatagtgaaactcacgaagttgttattaaaggtataaaaactgatgctaatggtgtcattaaagcaaatcatttaaaaccaggtaaatacacatttgttgaaactgaagcacctgctggttatcaacttagtcaagagactcgcgcttttgaaataaaagcatcagcggagaataaaccacaagtagtaaacacgggtaagtttgttaataaacggcttccaattacacctaaaaaacctgaattaccaaaaactggagaagaacgtaatacttttcttcctattgttggagtcggtttattaatggttggagctactttgtatgtttttttcaaaagacgtaaaatgtaa

SEQ ID NO: 2852 - DNA, 291 bp, Artificial Sequence
  Optimized genes for Lactococcus lactis
atgcttaaaaacatttgggaatggttcctctggtttacaggggtgactgacgcgggatggtctgcatggtggggtggttttttttcatgtttgccacttttcggagtttttgctgttgtttggcgtcgtcttaaatgtcacgctccaggctgccatcaaatcggtttgcatagaactgccgatggactatatgtcttatgtcgaaaacatcatcctgatgtacctaataatttaacattaaaacacattcaaaagagtcatgttaatgctaaagcaaaaaaagataaataa

SEQ ID NO: 2853 - DNA, 642 bp, Artificial Sequence
  Optimized genes for Lactococcus lactis
atgtcatctcctaaaattgattacaaaaaaagtgacaaaaattattatttaccaaaaggaatttcgttaattgaactccccgctctgaattatttgatgatcgatggtaagggtgctcctacttctccagcttttcaagaagcgattcaatatttgtatgcaacagcatacatgatttcaatgtcatacagaaacccagatttcatcatagaaaatttccaaccattcgtagtccctccattggagggcctatggacttcaaaaaatgagcctcgtgcaggtaaactcgataagaatgactttatatggcgtcttatgattagaatgccggactttgttgacagtgaaattgttgaaaaagccaaaaaacttgtggaaagcaagaaagggttcgatctttctaaagttaagtttgaagctattcaggatggtttatgtcttcaaactatccatttgggaagttttgatgatgaaggagaatcatttgaaaaactttttgaatatgctaaagaacatgatttaaaagccgtacacaaagagtttcatcatcgtgaaatttatatctccgattttcgaaaaacggcaaccgaaaaattaaaaacaacattacgcatttttgttgaacgtggacaagaaaaataa

SEQ ID NO: 2854 - DNA, 1074 bp, Artificial Sequence
  Optimized genes for Lactococcus lactis
atgcctcttaaattaaaattgaaaccatctgttcctaaatggcgtattaaacgtatgattaagaaattaaacattgcatatgtcgggtttggaaaatctactaaccgctaccacattccatatgtcaaagaaagagaaaatatcgttattaaacgtattgttaatagaaccttgggtaaacgtccagagcaagctgaattggaagccaacggtactcttttctctacagatatcgcggacattatcaatgatgattcaatcgacctcgttgttattgtaactccagcatttgctcattatgattatgctaaagaattgctttcagccggtaaaaatgtcctgtgtgataaacctttagtcgaaacgcttgaacaagctaaggaactagtagcgcttgcaaaagagaaaaatttatttttcatgccttttcaaaaccgacgtttcgactcagattttctgactgtaaaaaaagttattgagcaagggtatcttggtgatttggttgatattacagtgaacatggatcactttcgcccaaatgatgcttcgcaaggaggaaatttcgatggagcgtggtatggtcatggggttcatttggtagatcaaatggttagtttatttggtgctcccaaagaagttcagtatgatattcgtgctacaagagactatgattctgttgacgattacttttccgtaaatttactttatccaaatttacgtgcaacagttgctgcaacagaagtcgcagctctccctcatccgaaatggctagtttatggaactcgtggtacatttatcaaaatggatgttgaccaacaagaaaatgatttaaaagtaggaatgtttccaggtgatgaaggctttggccaagatagcccagcagatttcggccaacttacatactttaatcaaaatggagatcgaattgttaagcatatacctaccgttgctggagattacggtcgggtgtatgacagtgcttatgaatcaattataaatggagcagacaaattggttagtgacgaacagattcttgccgtgattaaaactttagaaaatggtttttcaaagtaa

SEQ ID NO: 2855 - DNA, 867 bp, Artificial Sequence
  Optimized genes for Lactococcus lactis
atgattaaatttgaaaaggttaattatacttatcaaccaaattctccttttgcgtcacgagcacttttcgatattgatcttgaagttaagaaaggttcatatacagctctaatcggccatacaggttctggtaaatcgacattattacagcatctcaatgggcttcttcaacccactcagggaacagttcgcgttggcgacattgtagttacatctacttctaaacaaaaagaaatcaaaccagtgcgtaaaaaagtcggagttgtctttcaatttcctgagtcacaactttttgaagaaactgttcttaaagatgtagcttttggtccgcaaaatttcggaattagtaaagaggaagcggaaaaaatagctgccgaaaaattggaaatggttggattatccaaagaattttgggagaagagcccatttgaattgtcaggtggtcaaatgcgtagagttgccattgctggaattttagcaatggaaccagaagtattggtattggacgaaccaaccgcaggacttgatcctaaagctcgtatcgaaatgatgaaactatttgaatcaattcaccaaacggggcaaactgttgtattggtgacccatctcatggacgacgttgcagattatgctgattacgtttatctgttggaaaaaggtcatattattagttgtggaactccaagtgatgtttttcaagaggtcgatttccttaaagctcatgaattaggagttcctaaagctacgcactttgcagatcaattacaaaaaactggtgtgtacacattcgaaaagctgccaataacaagagcagaattagtaaacttgttaacaagtttatcagtcaaaagcggtggcgaaaattaa

SEQ ID NO: 2856 - DNA, 348 bp, Artificial Sequence
  Optimized genes for Lactococcus lactis
atgaaaaaaatctataatatcggggttgaagctacaatggacgtgatcggaggtaaatggaagcccattatactctgtaatcttagacataatccttcacgtccaggagaattacgacgtcaaattcctggtatttctcagaaaatgcttactcaacaattgcgcgaattggaaattgataacattattgtacgtaaagtatataatcaagttccaccaaaagtcgaatatagtttatctccatacggtgagacacttaatggacttttggatattttatgttcatggggtgaaggccacgttcaaactttaaaaagcatgggagaagaagttcaagttctagagtaa

SEQ ID NO: 2857 - DNA, 1380 bp, Artificial Sequence
  Optimized genes for Lactococcus lactis
atggagaaccttcaagaaaaacatgaggctcaacgaggactccaaaatagacacattcaactcatcgcaattgcaggtacaattggaacaggattgttcctgggagctggaaaaactattcaaatgaccggtccatctgttatatttgcttatatcttaataggtattgcaatgttttttttccttcggactatcggagaaatgttgtacaatgatccatcacaacattcttttcttaatttcgttacgaagtactctggggtgcgcacaggttatttcacacaatggtcatattggcttgttattgtatttgtatgtatttcagaattgaccgcaattggtacttatattcagttttggttacctcaagtccctttatggcttattgaaattgttatgttagcgctactcttcggtttaaatactttgaattcacgtttcttcggcgaaactgaattttggttcgccatgattaaagtcgctgctattattggaatgattgtaacggctattatattggttgctggaaattttcattattcaacagtactttcgggaaaaacagttcatgactctgcgagcctgtctaatatctttgatggttttcaattgtttccacatggggcttggaactttgttggtgctctgcaaatggttatgtttgcatttacatctatggaatttattgggatgactgcagctgaaactgtaaacccaaaaaaatcacttccaaaggcaattaatcaaattcctgttcgtattcttttattttatgtgggtgcacttcttgctattatggccatttttaattggcactatatccctgcagataagagtccattcgttatggtatttcaacttatcggtattaaatgggctgctgcgttgattaactttgttgtgttaacttccgctgcttctgctttgaatagttcattgttcagtgcgacgcgtaatatgtactcacttgcccaacagcacgacaaaggtagattaacaccttttactaaactaagcaaagcaggaattccaataaatgctctttatatggcgactgcattaagtttattagcacctgttcttactctaattccccaaataaaaaatgcttttgattttgctgccagttgtacaacaaatttatttttggtcgtttactttatcacattgtatacctattggcaatatcgtaaatcagaagattataacccaaaaggctttctcacaccgaaaccacaaattactgttcctttcattgttgctatctttgcaattgtctttgcctcattattttttaatgcagatacattttatccagccttaggtgcaatcgtttggacaattttttttggcttatacagtcattataaaaaaatctaa

SEQ ID NO: 2858 - DNA, 813 bp, Artificial Sequence
  Optimized genes for Lactococcus lactis
atgaaatttattgcaattgttggtacaaacgcatctttcagttacaatagaaaattactttggtatatgaaaaagcattttacaaaagaagctcaaatagaaatcgtcgagattactgaccttcctcttttctccgaagatattcgtgaaattcccgaaggtgtgcaaaaaatcgcagaagcaatccgtgaggaagatggattgattttttcaacaccagaatatgaccatgctattacagctgcgctaaaaagcttaattgaatggttgtcttggattaaaccacaaccattaaatagtctgcctgttatgattgtaggcgtttcacttggtaatatgggaaccgtatttgctcaagaaaatttaagacaaatactatcatctccaggtttggacgcttttgtcctcccaagtaatcaatttcttttgggccgagctgcggaagccttcaatcaacaggatgaattaattgatgaacgtacaatttcatggcttgaacactgttttaataattttatgatttactctaaaactttaaagccaatgcgtttgccttcattaaaaaaagaaaacaataaagaaattatcgagagtgaagaatcaaaaaattctacggaaacagatgaagtttggtggactaaagaaaccaaccaaggattgcctgttttatcagacgcagatactggagcctcggagtatgaagaagttattgaaccggaaaattcagcttatcttcaatttcttgaagaaggagaaacttggaagtttgatgatatcggggaactccgcggtaaaagcgaggaagaagattaa

SEQ ID NO: 2859 - DNA, 606 bp, Artificial Sequence
  Optimized genes for Lactococcus lactis
atgtcaaaactcttagttgttaaaggacacccattgactgccgattattctctttcgttgaaaggattagatgcattcgttaaggcttataaagcagcccatcctgaagatgaaattgaagaactagatgtctttagtgcggacatcccaacacttaatacggaattagtttcagcgatgtttgctggtgaaaacgctgagcttaccgctagccaaaaagacaaactcgcacgttttgcaggctttacagaacagtttcttagtgctgataaggtggtaatcgctaaccctatgtataatcttatgattccagctgaacttaaatcttgggttgatactgtaaatgtcgccggtaaaacattcaaatacactgcagagggtcctgttggattagctaatgggaaaaaagtattacatctgcaagctaatggaggtgtgtatggtgcacaagacccagctacaatttacatgtcagcaatatttaattttattggatcagattttagacaaattgcagttgagggccatgcttatgatcccgaaaaaacagaagaattgttatctgaatttattaataaagttgaattggaagcgcaaactttctaa

SEQ ID NO: 2860 - DNA, 192 bp, Artificial Sequence
  Optimized genes for Lactococcus lactis
atgattcacgaattaacagacagagctcgtcaacatttttcaacccgtaaaatcgatgccttttggatttttgaagaaccaactacaggcgctttattcgaaggaggtcttgtatctgaaaacaaagcaattacattcgaaattaatgcaaagactttggaagtttttgagaaaaatgaaaaaatactttaa

SEQ ID NO: 2861 - DNA, 879 bp, Artificial Sequence
  Optimized genes for Lactococcus lactis
atgactgacttcaatcaattttttaaccttgaattttggcaaaagattttcgaactgaatgaatcacctttgcgtattgctattgcaatattagatatcgctattatttccttttttctataccaagcgattcgttttgttcaaggcactaaattgatgactcttgttcgaggtgtaattatttttatctttattcgtattatcgctggacttattggattaacaacggtggaatggttactcaaccaagttattacttatggagttatcgctggagttataattttccagccagaaattcgtcgcgcgttggaatcattaggtcgtacaactacactttttacaccaacaagaaaaagttcaccagatggccatatctctgcatatgagaaaagttttgcttatatgtcagaacgtaaaataggagcattgattgctattgaacaaggacaaaatctaaatgagttcgtttcaaccggtattcgattagacgctgatataaccagtgaattattgatcaatatttttattccaaatacacctttacatgatggtgcagttatcgtccaaggtaataaaattgcagtcacgtctgcttatcttcctttaacagaaaaatcggggatttctaaacaatttggtactcggcatagagcagccattggtttgtctgaagtttcagatgcacttatccttgttgtcagcgaagaaactggaggtattagcatcgcccataatggtgaattctttgctgacattagtaaagaaaaatttcacgatattcttgtagccattctcgtacccaaagtggagaaaaatgaaaaaggcacagggaagaacagaaaaaataaagctggtggaaaaaaaaatggaaagtaa

SEQ ID NO: 2862 - DNA, 3543 bp, Artificial Sequence
  Optimized genes for Lactococcus lactis
atgtatcgttctaaacatcaaaaaggctatactacctcacacgaagtaaaaacaacacgttttagaacatggaaaagtgggaaaaaatggctttatggagctactgtgctgaccttaacagcgtcaacattgctacctattggtaatttagcatttcagccaaaaacagaaaaagcacaagctgcttctgtgtcaagtggtacattggttcctggtaatacaagctatgacacaggtgggcatacatacagtggtacggaatttgccaattcaagtaattatgctttatacggtaaagctgttgttgctagtaattggatcaatttagtctcatcaaccgctaatagcgtagggctcggcatttttaatggttcggtttcagctataagtgctactactggttttacccttaagtcaacaattaaagtagattcaggaagttccttgacagattttaccaaatctggtgatgcaattggagttatccttactggtgcttcaaaggctcaattagccgcaaatgcacaatcaagccaagctaccaatgacggccttggtatccgcggtcttcctaatacagtctttttaggacgtgatctatattcaaacttatcaaatgtttcaacagggtctcttacagggattgatggatctgcgacagttaacggctggactgatggtccaggagttgtgatggctattcggaatacagatagttcaggtactcttcaagctgcaaattatccctcattaggctcagcggcaccatattctcctgttacaaatactcaaaacggtactgcttatacattcgctactgatacttcttatgcattgggagtagcatcgcctattacgtcaagtgttcaagaaccgattacggtcacttggacaccagatgcaacaaatacggcttccaccggttacacatcagggactcttacattcaatcttattgcccaaacgacatcaaatggagctcttattggtgctagcgccgtcaacggtggtacaggtgggtatacattaaccactcatacaaacctccaaaactcactaacagttggatttgtaggtggaactggaggtaattatggtaatttatcagtatcacttaatggagcaactatcactggatcaaaaggaactgaaccggtgcctattaattatttgaataaagtaactggtcagcccattccatctatggcgcaatcttccatcacagcaaatgtaaatgacacaattggagcagcgcttacagctccaagttctacttctcctgataacaatacatatacttatgttgttccagctgcaccaacaggttatcaagcaaacagtgctacaacaaccactgtcctcgccgccaatccagcttcgactaccaacacgtctgccacgactgtttctaattttattgtaggcacgactaatcccaatgcattaaacgtttcatatacaccatcacagcaaactgttcttttcaattgggcgaaagcttctggaacaactttagcaaatttgcctaatcaaattgcatatggagctactggtatcaccgatgctagcgttgttacggataaccctttttcgaacactacattgctctcttcgtatgcaactgcgcttagtaatgctgttcctaccggatataacattacacaaatctccaatggaacaactactgtgagcggcgcaactactgctgctacattggctgcctttacatcacaaaatccaactgttggagcaacaagcacattaaacacttatacagtcaccttaacggcagttagccaaacagctacatatacttatggatacactagtacggctttaaatactccggccattcctgcaatacttacatctactggaacgactggtggatctgttactacaccaacaggttacaatacttctccacaaatcccaagcggctattacatttctgcaatttatgctggaacaagtgcatctggaacacttatttcaagttcaaccaccaatggaaccaatgcagcttggccaagtggacaagtatatgcgccaactggcaatcaatactatatccaactcgctccaaatactgtaaacgttacttggtttatttcaatagacccaaatcctgataatgaccctctaaatgtcgctcaaggtggtttcacacctactgtcggttcaattcttggcggatcaacaacaactaattaccaaagtcaagtgattgacaatatgaattcattaacaggcaatactttgtctacaactgacaacgttacttacacagatggagctactggcattaaatacatagttacaggttatcagtaccaagagggaactactaccactgcgacgaattcagcaccaattactacatataagacgttttcagatcttcttgccgctcacccatacgtattagctgggactaaatctaaccgtacccaactcgttcatttgctgatgactgttgatcaaacaacaattacatcaaactcaacatcaggtcaacatgttaatcctgccactaattatattccttcatctgaaattaccagcagtacagacatcgatggtgcagatgatgacgggttaagttacgctattaatggctataacgccattgtgaatattacaggtggtcaaactgactactggggggatgcgactaattccttgcaattgtcaataggcacatatacagaaaattattatgctttaaattatcttggtgttcaagcttatactaattggctgccaagccattctggaggtactgtatcacaatttttgcaaactttggatgctacatctctggcgaatgatactgtaacatctcaaacaactcttgaagttcaggatgctactgcaattactactaataaccatcatattatccctcgagcagcctcttataatccaagttcagatttagtaggtgcaagtaacgccgatggatcttctgtcgaaaatattgaaactaatcccatcgttaatggagatgctattggagttcttattacagactcaagtggtaacattctatgggtcaataattcagatattagtctaccaactaacaagttacaagaagttacatatatcgaaaattactacgctttgacagctcaaggtctcgttgattatacgaattggcaaacaactacggcttctggaggacacactgtcggagattttatcaatagtggtcaagcaacaactagtgattatgttaaatcaaccacagaattgactgttactaatttcgtgttaccatttgctggtggtgctggaaatcaatttttatatttgatgattggtcttgcagcatttggagcattaggtttctattttagccagcgccgtaaagcagagatggatttggaagttataaataaagagattttagggaaaaacgacaataaaagatctaatatctatcttaccagtagacatacacgaccatatgcgaaaattttccatacaaaaaatcgtacacacttggctcaagcacaacgtaaaggaacgaatgaataa

SEQ ID NO: 2863 - DNA, 240 bp, Artificial Sequence
  Optimized genes for Lactococcus lactis
atggcattgaatgataaattagatgctacaaaagataaggttagtggaaaggtaaaagaaaccacagggaaagtcactggagacgaaaaacttgaagctaaaggtaaaacagaaggtttaatgggcaaagctaaagaaggtctcgaaaacattaaagataaagcctctgaccttgcggaagatgttgcagaaaaatttaatgatactgtggactcagttaaacataaaaatgagaagtaa

SEQ ID NO: 2864 - DNA, 255 bp, Artificial Sequence
  Optimized genes for Lactococcus lactis
atgaaaaagtatgataaaaagatgaaaaatcgtttaaaacgtgcaaccggccaactaactggtattttaaaaatgatggaatcaggtgaagaatgtatcgatgtcgttactcaacttacagccgttagatcttcacttgatagtttaatcggattgattgttgctgagaatcttaaagaattattgttggacaaagaagtaacagataaagaagaaaaacttgaacaagctattaaactcattataaaaaaataa

SEQ ID NO: 2865 - DNA, 939 bp, Artificial Sequence
  Optimized genes for Lactococcus lactis
atggttcaagcttataaaaaattttggcttggagctttcacatttaataagaaaacttcaagaaaagacttttggagtgctcttttgacacacattattatttttgtgatcttatttaaagcatatcatttttttaaccttttagacttttatcaacttactacattatggcaaactttcgcatcattctttcaacttattttcaatctttatttttttggttcacttttgtcctttatagccctaactgttcgacgtttaaatgatgctgatcttccttggggactcatctttctaaactttattttaggtttgggtactttagttctcttgattttaaatctgttcccaagctcgccacgtgcgttaaaatttaaagaatatgaaattaattcatctcaagaatttaataacttgccagagacaaaaacattatctgggatttttaaggattattttaagaattacttcgaatttcgtggtcggacgactcgtcgtaatttttggtgggtacaattattttggggcttgaccgttatcttatttctttttcttatctatttgttcaatcaatttgaacagattatgttcggatacaatttcattggcagtatggttttaagattatttttctttttgtttattcttggtactttttttcctcaattgacaatccatgtacgcagattacgtgatgctggattgtctaatcttggtttgtcattattgctcggtggaacatctgggattctgatattttatcagatgttcaccaaaacgctgaaaattacttacacaacaggacattatcaacttgttcaatatcttctttttttacttgttatgatcgcagtattaagtctcattctagtcgaagtcatggcaacaggtgaattgaaaactaataaaaaaaactcactatttgaaaaaattgattaa

SEQ ID NO: 2866 - DNA, 684 bp, Artificial Sequence
  Optimized genes for Lactococcus lactis
atgcccggttcagataaaacagtggattcaggtgccatttatattagtaatacggaacctgaatataaagcttatgtaccatatttgtctggcaacccaaaacaacttattaatggagaacaagcgttagtatttgctcgcgatcgtgatacacttgctaatggcaattacggacgtgcagcacatcaacgagaagtaatgacagaactaatgaacaaaatgttgagtttaaacagtgtcttcaagtatcaatcttttttaaatgatatctcatctgattttaaaactaatatctcaattaacttggcgaatttaactgcactcatggcttataaggattgtcttaataaagttgttagcattcaatatcaaggggtctctcaaatggttgacggaggatcatatgagttcattccagaaaatgttgatcttgcaattcaaaatatcatgagacaagccaatgatgaatctgttaatgacaaattggatcaatcggttattacctacgagaattactttgggagcgaaactgaccagtattatatgccttcagctacagtcactattaaaggtgaaaaatcagaaacttacggtgttgatacaaaaggatcattagtgaaaataaataaagaaaacgctcaggactatgttagttcccaaggtggtgctctggttgcaaattaa

SEQ ID NO: 2867 - DNA, 447 bp, Artificial Sequence
  Optimized genes for Lactococcus lactis
atgacttatgaagattttattaaagaagccggtttggcccgtgaaaacttccgatgggcttgggctttttgtaatgaggtcgatggcccaattacagaaccagagctcgctgataaattattggacttggttctagaaggaaaaaaaagtgctacagcgtcagctgtcgcagaatatggagaagatgaacctttcccatcagttgacggtaagtttgatatccttttagatggtaaagggcaacctagagcagcaattactaccagtaaagtatatgttcgtaatttctttgatgtttctgcagaacatgcttttaaagaaggtgaaggagaccagagcctggactattggcgcaaagttcaccaagatttttggtctgatcttaaagtgtactcacccaatatggaggtattatgtgaagaatttgaagttctttaccaaaattaa

SEQ ID NO: 2868 - DNA, 558 bp, Artificial Sequence
  Optimized genes for Lactococcus lactis
atgaaccaaacggaaaaaaaaaaaaaagccattcttgaaactactttccatctacttaatcagaagacaattcgtgaaattacagttgatgaaatagctcacaaggcggatgtttcaaaagtaactctttttaaatactttcattctaaaaatcaactaattaatcaagtgattagacaaaatttaaatcaactctcattggaaattaaaacattaatcgaatctaacttggattttaatcaaacatatcaagctattttgcaacttaagattcagcaattggaacattatcaaccaatcttttcggagaatatgatgactcaatataccaattcacctgaacttctcgacgacgatgctcttagcctgcaaaaacaaatttacttattgctttttcaaaaaggacaagcagagggaaaaatctcaagtgattatagtcaagaagatttcttattaattttaagtatatttaactctggcgtcaaaggtctttccatgaatttgttaattgaaaaagcagaaatcgtttcacgtttctttttaaatggttggaaataa

SEQ ID NO: 2869 - DNA, 450 bp, Artificial Sequence
  Optimized genes for Lactococcus lactis
atgacagccatctggaaagaaaaatcattcaaccagctcactttagacgaaatgtaccaactattaagcttaagaactgctgtttttgttgtagaacaaaattgtccatatcaagaattagacgggaaggatcaagtcgcaaaacacttgtggctcgaaaatgaaaatggtcaacttatggctctgtgtcgtttacttcctaaaggtatatcttttgcagaagcttcaattggtcgcgttttggttaacccagaatttcgtggacaaaatcttggacgaggccttattgaaaaagcattggaggtcttgaaagaagatggtgaggaagctgttacaatcgaagcgcaatattatttacgtgatttctacgctagttttggatttgtggagaattctgaacctttttatgaagatgatattaaacatgtaaatatgattcttaaattttaa

SEQ ID NO: 2870 - DNA, 657 bp, Artificial Sequence
  Optimized genes for Lactococcus lactis
atgaataaaaaaatttattacattagtggggcaattactacccttgcatttcttattttagcattgttcgtaaaaatcgatttcacacacggaccatttcctttcgatcgtccaatacagacttgggcttttcatttacaatcttcttctgggttgacatattttttttcacatatgaccaatattttcggtgacaaaggaggaattattgtggctgttcttttagcattagttttgtatctgctatttaaacaaaaagaggctacgatctggtttgctgctactgttgtcttatcgttagctctcaatactgttattaaagccatcattggtcgtgaacgaccagatattcatcgtttggcagcttttgcgaatgaagccggtaaatcttttccctcaggtcacagtatttttgcaacaatcatttttggctcaatattttttatctgtctcggaaaattaaaaaaccgcagttcaaaaattctattgggtatattatgtatcattcttattgcgcttatcatgttctccagaatttttgtaggagttcattatccttcagatacaattggaggttttttggaaggcattagcattcttcttcttacatatccaacatacattaagtatcaagaaaagtcaaaaaaaactaattaa

SEQ ID NO: 2871 - DNA, 336 bp, Artificial Sequence
  Optimized genes for Lactococcus lactis
atgattgaagcgtgtatccgtaccaaaagagataaaattgtgagttatgaaatttcagggcatgctgaatcaggcgaatacggacacgacgttgtttgtgctgcagtcagtgttttgtctattactactgcaaataacatttatgaaatggcccatatcaaaccagttacacaaatggaagatggttacctttatgttgaaattcctctttctataccagagaagcaaggtgtactcgcacaaacattgttagaagctttcgctaatagcatgaaagctgtagaaaaatcatatggacagtatattacattaaaatttgagaatggaggtcaataa

SEQ ID NO: 2872 - DNA, 375 bp, Artificial Sequence
  Optimized genes for Lactococcus lactis
atggttttaattggttttagttctgtttttttgatttcttttaatgcttttgtcttcttcggcttaatgttattttttgaagtacttctcgggttcattactatcctggttaatgtgccaatgacaagtttctttcaatcacaagttcctctaaatattcaatcacgtttttttgcccttttatcattctctgctaatcttatcgtcccattgggtatcctttatacaggttttttggcaagcgctattggagcagatgtaacttacattattaataacatattagtaattgttattgtttgttttgcattttggaaagaaataggacgtggatttagagcgtttttgcttaaaaaatggaaaatgtcaaagtaa

SEQ ID NO: 2873 - DNA, 321 bp, Artificial Sequence
  Optimized genes for Lactococcus lactis
atggttgaaaagaatgaaattattaaatcaggggaaatcgttatttctaacccaattggtggaaaactcgttatgaaaagaactagcacatctaaaaaaggaatgaaattcaaagaagtatttgcttcagaggcgtctttaatagccggtaatttaactcaaggatcattgcaaattgcaaatcaagctatgagtgtggctcaaatttttaaacaggctccaaatggtctttttacagcaaccgtcgatcctgctaagctttcaaaatttaaaaaatggaatatctattaccatggcagtcgttggcgtaaaaaagcataa

SEQ ID NO: 2874 - DNA, 564 bp, Artificial Sequence
  Optimized genes for Lactococcus lactis
atgtcaagtcctcgaaaaaaagaaggtaaaggtattcaaaacgtctttattcatactattgcattgcgtattgctgaaaatgacacaccagttcacagcgaactaattggaggcgacgttaagatcggtcaagaaaatttgcacaatcaagtgagtatggctataagaaacccacaggcaaaattaatgtcacaattaaatggagatttcattattactaagaaaggggaaaccaaacccctcgtcaatatccaaaaacaaaatctttctattgccccaaattcggcttttgaattaccagtttctcttaatgatcattttaaacctggaacgtacacatataaaatagtattaaagaacgaccatgaagattggcaatttctgaaagatttcacaattaaagaaagtgaggcgaatatgtataaccaaacttcagttgattacactaaaaaaacaaatctcaattggattcattatatgcttgtaggtattacactttttttgttattaatccttttttatttttggggaaaacgttcaaatgatgttatcttgaaatcttaa

SEQ ID NO: 2875 - DNA, 834 bp, Artificial Sequence
  Optimized genes for Lactococcus lactis
atgaaaaaacaatcacagttaacaaataaaaaaattaataaaagtgaaccaaaaatgacaatcattaatcttaaaaacatcaatctcactagaaataaaaaagaaatcctaaaagacattacttggaaggttaaccctggtgaaaattgggttatattgggactcaatgggtcaggtaaatcttccttacttaaactcatcttggcagaagaatggaaaaccagtggtgagattactgtgcttaacacacaatttggaaatggagagattcccaaactgcgtaaacgtatctcagttgtcggctcatttattgcagaacggtttcagcctaatataaaggcggaaaatcttgtatatacagggaaattcaactcttcaatgttatataaaccatatacagatcaagaattagatgaagctcgacaacttttgagacaaatgggtgcaaagagcttaattggacgcaattacgcttctttatcacaaggtgagaaacaagtcttgcttattgctcgttcgctaattttaaaaccagaattgttaattctggacgaagctactaatggcttggatctttttgccaaagaaaaattattaaaacaattgcaacaaattaatcaacttaaaacggctccgacactaatatatattagtcaccatccagatgaaattactgatatttttacccatttattgcttcttcgtgaaggtaaagttatccaatctggaaagaaagaaaatttacttaacgaaaaaattttgactgatttttatcaagaaaaggtagaagttcatcgtttcgaacaaaaatactttgttattcctgcaaattaa

SEQ ID NO: 2876 - DNA, 303 bp, Artificial Sequence
  Optimized genes for Lactococcus lactis
atggaacacgaatatctttttgtttacagtcgccttaaacttttaattaaagatgctcataaatcattcaatcaagtcgaacgtgaactcggttatccacgtaacacattaaaaaattataaatataaaaaaaaacctagcgtaggaagagtttttgagatggccaattactttaatgtttcaattgaatttttattaggcatcgaagaaaaagataacaaaaattctttggcatatcgattggagaaattggaccgtgaaaaaaaggaactggaaatactaattcttgaaggtcaaaagtaa

SEQ ID NO: 2877 - DNA, 171 bp, Artificial Sequence
  Optimized genes for Lactococcus lactis
atgaatcgcacattcatcaaaggctttcttgctggaaatgcattattgattgcgggactcgctgctactgctataggtattaaagccaaagttattaacccaattaagaaaaaagaagaacaaattgaaatgggtcgaaaacgtgcagctcgtaaaagaatcgcaccttaa

SEQ ID NO: 2878 - DNA, 948 bp, Artificial Sequence
  Optimized genes for Lactococcus lactis
atgaaaaaggttagcattattataccattcaaagggcagacagaagcagaattaatgcttcctctctcttcaatttacaatcaaatcggtgttgacttatctcaattggatattcatctggtcaatgatgggggaaaaacaatcgatttaagtaaatttgacgttctagctgatagattagaaatccattaccacgaaatcccaaacggtggtcctggtgttgcgagacagtacggtattgataattcaatttcagagtatattatgtttatcgatgcagatgatgttttgtattatgtaggagcactttggccattttataatgcttcaaatcaaggacatcaaatgatccgtgcatcatattgggaacaaattgccggtaatccatacacctatactgtgcacggcaacggagatcggaaagctgcatatggtaaatggtataagcgctcttatattgaaatgttgggtttgcgttttatgcccgatcttcctatttatgaagatacctattttgttggattagcatgtgaactcgccacagatacatgcttcttagaggaaaaagtttatatgtggttagctaacccgaatagcattactcgtacagtagaaaataaatttaactaccaagctcatatttatgctcgtgaaaatcgatattggtttgaaatgatacgtaaatggaaacctgaatgtcttgtaactgatttcgagaattaccttacaaatatgtatcttaaaagtcaaaaatatccacctgttgacgaaaaggcttggtgggaagaacaacataaacttattacttcagtgtctgacattttttcgggatggactcaagaactacaaaaacaagtcgaagacaaatccgcgaatccacaaaatgaatggcatggcattgagacggatggatttaaagaatgggctactcaaagtttgccatggtaa

SEQ ID NO: 2879 - DNA, 2154 bp, Artificial Sequence
  Optimized genes for Lactococcus lactis
atgaaaatcaataaaattgatacacgtcatggcacagcgaatcaatctacattttctcatggtaattgtctgccatatactggttttccttggggaatgaattacttttctccatctactggagctgctcgtggcgcttggtggtttcatcctgaagaccgtacgtttgaaggttatcgtattacacatcaaccatcgccatggatgggtgatttttctcatctcacaatgactccagttgcaggtccgttaccagaaacaagtttatggcatacagtaagctcataccgccccgaagaatctacattcaatccaactcaacttaaaataacgcaactaagatatcagattacttctcaacttattccatctatgtacggcggtattttatcaatgaattaccaaaatctctcattgaaagataatggtcttatgctccatcttcctggatcatatgaattacagcaattagacgattattcattggaacttagtatcattaattttgcaggttgtgaagatgaaaattttactttttatttgaaatttacggcggatcaaccttttgttctttcaggaaatttatcagatgaggattctagtgttagactggatttcaaagcggcaaaacaagttcaaattcactttgcaacatcatttattagcaaagaacaggctgcattaaatttggaacgtgagcaagacaattcagcagaaacatatctagaaaatgcagaatcagcttggaataatttattttcacgcattgagattgaacatcacaaccaacaagaagtttcgactttctatcataatttgtatcgttctttcctttttcctcagacattttatgaattcgatcaagaacaccaaaaaatacactatgatacctcaagtaagacagttaaaaaaggacccttgtatacaaataatggtttttgggatactttccgcactgtttacccattatattcacttattgcagttgatgaatacggggatatgttagaaggatttttaaactcataccgagctactggttttcttccaaaatggctaagcccagatgaacgtggattaatgcccgggactcttattgatgctgtaattgctgacgcagcttccaaaaacatccgacctgatttgatgcctgaatttctcgaagctatgaaaaagggggctacaagtcaatctgaaaacagtaactatggtagacgtggcaccaaagattatctcaaattaggttatgtacctctgactcatcatgaatcagttaatcataccttggactatgctttcagtgattattgcataagccaagttgccaagcaaactggtgacaaagaaatcagtgatttttatgcacatcaagctaaggattatcaaaacatttttgacagtgaaactggttttatgcgggcaaaagatgcagacggaaatttccgtgctgattttttggatattagatggggtagagattacgcagaaggatcagcttggcaaacctcctggtcagtattacatgatttcgcaggtttgattaaattgcacggttctcgtgagaattttgaaaacaaacttatagagttatgtaaccaacgtcctaactttaatgttgaaggatatggatttgaaatccacgagatgtcagaaatggccgccattgagtttggacaggtggcgatttcaaatcaaccatcatttcattatccatatcttttcagttatattggcaagccatggatggccacaccacttatcaaaaatcttcttactgaaacatttaatgattctcctaaaggatatccaggagacgaagacaatggaacaatggctgcttggtacatttttagttcacttggattttatccagtcactgctgcaagcaatcaatatgtacttggtatcccattgtgggataaagcccgaatcaacttatcgtctggacaacaattgactattttggcggaaccgaatgctcctcaacaagtttttgtgaatcaaattacgttcaccgataaaaaagtcaatgacacattcatcaaacatgaagaattaattaaaggggggacacttaaatttgatttaggtattgtccctaatcctttgaaatacacaaatgaacaattaccatatagtctaactgaaaactaa

SEQ ID NO: 2880 - DNA, 402 bp, Artificial Sequence
  Optimized genes for Lactococcus lactis
atgaataaaaaagaattagaaaacgcccttatttttccacaaggggaaaaaaatccttatggagcttattttacaggacaatcatacttggaaggtatgattgctgacaaggatcttcctttcggtgttggcaatgttacatttgaaccaggttgtcgtaatcattggcacatacataaagacggttatcaagtgttgctcgtaactgctggtgaaggttggtatcaagaggaaggaaaagaagcacagttactacatgctggggatactatcgttactcatgcaggagtaaaacactggcatggcgcaacaaaagatagttggttttcacatgttgcgattaccgcaggagaggctgtttggcttgaagaagtctctgatgaacaatacgaaaatttataa

SEQ ID NO: 2881 - DNA, 753 bp, Artificial Sequence
  Optimized genes for Lactococcus lactis
atgagtaataatattgaaaacaaggtcgttttgattacaggtgcttcgtcaggtatcggacaagctactgcggaattacttgctaaaaaaggtgctaaaattgttttagcagctagacgcgaaaaccgattacaagaattggcagataaaattaaaaaagctggaggacaagctatctaccaagttactgatgtgacgaatcctgaagaatcaaaaaagcttgttcaatacgctaaagaaaattttggaaaaattgacgctatctttttaaatgcaggtattatgccaagttctcctttatctgcccttcacgtggaagaatgggaaaatatggtagatattaatttgaaaggtgtactaaacggattggctgcagtacttcccgaatttactgctcagaaaagtggacatgttataacaacatcaagcgttgccggtttaaaagcatatccgaatggtggcgtatatggagccactaaatgggctgttcgtgaattgatggaggtccttcgtatggaatcagcacaagagggtacccatattagaactgcaacaatttatccagcggcaataaatacagaacttctgaatacaatcacagacaaagatgcggctgagggcatgaccgcactctatgaacaatatgggatttcacctgaagctattgcccgtattgttgcattcgcactcgaacaaccagaagatgttaatgtctctgaatttacagttgggccaactactcaaccatggtaa

SEQ ID NO: 2882 - DNA, 1047 bp, Artificial Sequence
  Optimized genes for Lactococcus lactis
atgaaatctgtatattttgtagaaaaaaataaaatgcaggttagagaatttcctaaggctcaattagtgaaagaaacagacgcaattatcaaaatagtacgcgcttgcgtttgtggttcagatctttggtggtttcgtggaatttcagaacgccaaccgggacccgtcggacatgaagctatcgggttgattgaagaagttggtactggagttaaaaattttaaagtgggggattttgttattgtaccatttacacatggctgtggtcattgtccaatttgtctagccggcttcgaagctaattgtcctaatgctaaggacggtgttaatggcggttatcaaggagaattttatcgtgctatcaatactgacggagctttggtcaaaatcccaggtcaaccatcagattattcagatgatcaacttgcatccttaacagctctcgcagacgtcatgcctacgggatttcacgcagccaaagccgctgatgttcacgaaggtgatactgtagttgtattcggtgatggagcagttggtttatgcgcagttatttctgcaaaacttctcggggcaaaacgtataattgctatgagtcgacatgaagatcgtgctgctcttgcacgtgattttggcgcgacagacattattgatgagcgtggagaagaagcaattcaaaaaattatgtcattaaccaacggttatggtgcggatgctgccttagaatgtgttggaacaaaacaagcaatcgagtctgctttccaagcggtaagagctgggggacgagttggtcgggttggcgtgcctcatgatgttgactacaatgagtggattgattctttgttttggaaaaacatccagcttggaggtggtgttgcttcagttgctcgttgggataaggaaattcttttggaagcagtcttatcgggagagattaatccaggtcgtgtttttactgccgaattcagtttggatgaaatacaaaaagcgtacgaagctatggatcaaagaactgcaattaaaagtttactgagaattagcgaagtctaa

SEQ ID NO: 2883 - DNA, 165 bp, Artificial Sequence
  Optimized genes for Lactococcus lactis
atgacctctcaaaatgaaggcgttgtagaagctgaaattaaaaattttggtcgtcaaatgataatcgaaggagaaattcatgaatgtgaattgaattggaacaaaacttggcttattgagaattgtatgacacaagcaggagccttttcattaggttttttctaa

SEQ ID NO: 2884 - DNA, 600 bp, Artificial Sequence
  Optimized genes for Lactococcus lactis
atgaaactttcaaaagttgcaatttcgaccggattggtagcttcatttatgtttattggaggtggtattgctcacgctgatactccaaagagtacacatgaagttgcaatagaagttatcaatggtaattacggtaatggcgatacacgtgttacaaatttacaaagtaaaggttttgatgttaaagctattcaaactgaagtaaataacattttaacgggtacaacaactcaagtttcagcaacgacaaaaactgcggaagaacaacctactaaagttacttcagtggctccaacacaagcaacccaaagtgtctctggaggacttaatatgagccagacttcaggacaagttgatatccaagctctagctaattacatggcctctaatacagcaaatgcagctggttattcagcttcagaatgggcatatatcattacacatgaaagtaacggaggaattgactctgtgaactcttcctctggtgcatatggtgcgttccaacttctcgggcatggagaatatgctggcatgactttggctgagcaaattgccatggcgagcaaattacctgccgggtcatgggtcgtatataattaa

SEQ ID NO: 2885 - DNA, 1539 bp, Artificial Sequence
  Optimized genes for Lactococcus lactis
atgaaattaaaagacatcgaaaaatctactaataaaaatttgtacctcttatttctttctgtgttagtcggccttacagctggatttcttgcaagtctttatagacttgctttagaaaaagctgaaacatggggactcagcatttaccggtttgtatctagccatcttatttttattcctcttttgattcttggtcttgcttttcttgcattcgttgtcactttttttatgaaaaaatatccaatgagtagtggatcaggaattccacaagttaaaggtcagttgcaaggttattttaaaaacaactggttcactacagcgtttgctaaatttattgcaggaacgttggcaatgttcgccggactttcattgggacgcgaaggtccttcagtccaattaggtgcttccatgggacaaatggttagtagccgattggcggaaacagaacgtcataagcgtattctaatcgcgtctggagcatctgctggtttgtcagcagcttttaatgcacctctatcaggagtaatgtttacactagaagaagtatttaaatattttagtcctttgatacttttgacctgtatgacatctgccatggtagcggatatggtggcccgtattatgttcggatctggtccagtttttcattttcaaatagttggttcaatcgaactttctaactattggttattgattattctgggtataatactcggcttttttggagcattttataattggactctgttaacaagtcagaatttaatgaaaaaaatcaaatcaccatttcttcgcgtactgcttacttttcttgttgttggtgctactggccttctttttcctaatatcattggaagcgggcaccgtcttatggatagtttttcattaggtatgggtttggcatttttatgtcttattttgattgggaaatatctcatttcaatggtttcctatgcttcaggtgttccaggggggattttctttccgctcttagttttaggagcatcgcttggtgcagtttttgcaacgatcgtgatttcactcttccatttgcccagtcacttgttcgcaaatttggttatcctagctatggccggcaccttcactgctattgtccgtgctcctatgacaggtattttattattagtagaaatgacaggctcatttgatcatttattaccattagctttagtttcattgattgcttatgttgtagccgatcttctgcaatctgagccaatctatgattcgttattggataatatgttgaaggaaaaagagattgacgttgatgactcagataaacaaatgatgttcgaaacaattgttcaattcgacagtgtcgctgatcgtaaaaaattatcagaaattcatttgccagaaggttgcttattagtttctgtgcatcgttctggtaaagatattatcccacacggtaatactgaattacaagctggagattacctcacttttcttattcgtagagaggatgaagttattgctagagaacaattacgacaagttctaaatgaaaagtaa

SEQ ID NO: 2886 - DNA, 270 bp, Artificial Sequence
  Optimized genes for Lactococcus lactis
atgctactgtcaattgctatcttattgattatttggggtgcatatttaattgggaaaaaatacaaagattctttctttatttcgtatggccgtagtaaaagaggattaatcatcattgtttcttcattgttacttcttagtttttttgtttttgtaaagaatgattctctttttccagtcgttttgttctcaatatttcttattggtttaggaatttattatctcattcatgactcaaaacgtgatagcgaaggtaaaaaagaaaattaa

SEQ ID NO: 2887 - DNA, 267 bp, Artificial Sequence
  Optimized genes for Lactococcus lactis
atgaaaaaagtattagttaaagctgtccatggttatcaacgttggatttcaccggctttaccacccgcatgccgttattatccaacttgttcaaattatatggttcaagccattgaaaaacatggaccagcaaagggccttgcgatgggtacagctagaatcctccgatgtcaccctttctgtcaacctggatacgatcttgttcctgaccattttagtttgcgccgtaactgggcagagccagaaaaagaagaagattctaattaa

SEQ ID NO: 2888 - DNA, 714 bp, Artificial Sequence
  Optimized genes for Lactococcus lactis
atgaagaacatgaatgataacaatgttatctttgaccaaagaagtgatggacttaatgcattcttttcaaaaatctacgctctgatgggcgctggagttcttgtttctgctcttgtttcatggattatgattactttttttcttgataatatgaccgctattcttcaatctggatcattattctttttagttttgtggattatacctttggttatggtagttagtttgcaaggtctagcaatgaaaaattcaaaaatggcgttaccaattttcattgggtatgccgcctttatgggttttttaatttcttttactttattgatgtacacagctactgacatcacactcgctttcgtaacagcagcagctatgttttttggattgagtgtgtatggtcgatttacaaaacgtaatttgtcagctatgggcaaagcttttggcgttgccgtatggggtcttatcattgcaatgtttctcaatttcttttttgcttcgacagggcttacgattcttatttcattggtcggtgtcgtcatttttgcaggattaattgcatgggataatcagaaaattactcaagtgtataatgcgaataacggtcaagtttccgacggttgggcaatctctatggctttaagcttatatttagattttataaatatgttcctgtttttactacgtcttttcggaattgcgggtggaaaccgcgattaa

SEQ ID NO: 2889 - DNA, 933 bp, Artificial Sequence
  Optimized genes for Lactococcus lactis
atgacattaaagatcgataaagttcgtaagagtttcggtgataaaatcgctgtagataatctaaatatggtcgttaaaccaggagaagttatgggactcattggacaaaatggcgcaggaaaaacaaccacattcagaatgattcttaatttcattagtgcagatcaaggtaaaattacttggcaagacggtcccatcacacaggaaattaaacaaaaaattggttttctcccggaagaacgtggtctttatcaaaaaatgactgttgaagatcaaatattgtattttgcggaacttcacggtatgaaacgtgctgacgctcgtattaaattacaagattggatgaaacgactggaggtcgttggtaaacctactgacaaagtgcaaacgttatctaaaggaaatgcacaaaaaattcaatttatagcaacattgatacatgaaccagaatttttaatcctagacgaaccttttacaggattggatcctgttaacactgaattgttgcggaacgaaattaagagaagtcgtgacaaaggagccgctgtaatcttttcaaatcataatatgtcggatgtggaattattatctgatcatcttcttatgcttaaaggaggtcaaactattttaaatggaactgttgaggcgattcgtgcttcatatgggagaacacgaatttaccttgaatctgatcttccaaatgaagaattgtcagttattaccggtgttgaaagtatcgagaaacgcggcagcgggcgttcaattaaaatttctgaagcagaagtaggccgtgaaatttttcaaaaggtagcaaaagatggttatgtccaggcctttgttcaatcaccaccatccttagatgaaatttttagaatggaagctgctgaaaataaccaagagaatctgagcgctcgctcagaagaaattaaataa

SEQ ID NO: 2890 - DNA, 399 bp, Artificial Sequence
  Optimized genes for Lactococcus lactis
atgaataaattcatatggagtatttttattcctgtgttgatttttgctggtttacttactgttattggattttcactagaatcacaacatttctattggcttcaaagtgtagaattaatctatctctttggatcgcttatttttacatttgctgccttttggatctggcacttgggtattaaatctagaaaaatgaaatcattgaaagtcttatggttgattctaagtttagtttttcttatcgatttaattaataccggggtttacctggcacaaggccaaggatggttatggggtatgtcaagcttctcatctgcgggaccagcattttttgcttctatgcttctcttgtctctttccttcttaggttttcgtggtcagatgaaaaaggaaaactaa

SEQ ID NO: 2891 - DNA, 909 bp, Artificial Sequence
  Optimized genes for Lactococcus lactis
atgacatactaccttctcgctaacccgaattcaggtgctggcaaaggggcgcgtacacttgaaactcttattccctatttggaaaaaaataactatgaatatcgtctttttaaaacaaaagcagctggagaagaaggagcactcgtaagacaaatacttgatttaaaaaatccagatgatcaccttgttattattggtggagacggtacgatttctttggtcataaatgaattaccagaagaagaagcttttagttatattccaagcggttcaggtaatgatttcgctagaagtctaaaacttaaattagatcctatcgaatcctttgaagctgcccgccgtggaatcaatcatgaaattttcattatgaattatcaatcaaagggattaagtggctatgcgttgaataatattggcattggtctggacgccacaatcgttaaatcggcaaatgaaggaaaacttaaacaagttctcaataaactgaaacttggttctttttcatacattttgacagcattgcatgtattaattactaaaaaaccttttccagctttgattgaggtcgaaaaccaagagatttctttagagaatgcttttctaatgacttttaccaaacatccttattttggagggggtgtaaagatttctccagaagcaactaacgagaatgctgatattcacttggtggaatataataagcatcacttattacgtacattttcattaataccttcagttttacggggtatgcatcttaaacatccattgttcttgcatagagtttctccacaattttcagtggaattagcagaatcacaacctgttcagatcgatggagaaatccatgaacttgttgccgcagaccgtttaagtattagcactgaacgacgtatgattatctattaa

SEQ ID NO: 2892 - DNA, 588 bp, Artificial Sequence
  Optimized genes for Lactococcus lactis
atgacaattaacacaaacaatttaacaataactattagtgctgcaagcaaaaagcagtaccctgaaaacgattggccagagattgcgcttgctggacgatctaatgttgggaaatcaagttttataaatactttgcttaatcgcaaaaattttgctcgtacctcaggtcaaccaggaaaaactcaacttttaaatttctataatattgacgatcaattgcattttgtcgacgtacccggttatggttacgccagagtttcgaaaaaagaacgtgaaaaatggggcaaaatgattgaagaatatttaacaacacgtgaaaatttgaaagctgtagtttctctcgtggatatccgtcatgaaccatctgaagatgatttaatgatgtatgagtttttaaaatattatcatattccagttattctagtcgcaactaaagctgataaggttcctcggggaaagtggaataaacacgaatcaattattaaaaaagcaatgaaatttgactcaacagatgatttcatcatctttagttcaactgataaaacgggttttgaagaagcctgggaagcaattctgagatatctttaa

SEQ ID NO: 2893 - DNA, 183 bp, Artificial Sequence
  Optimized genes for Lactococcus lactis
atgggtcttacttttcgtaaaagagatgactttgataaaatgatggatgacttaggagtcagtactgtagacttggttacagatgatgataaaaaatcagttccatctccagaaaaaaaagaagatccttttgctaaattcctcacaccaaaagaaaataacaaggagaaagatcctaattaa

SEQ ID NO: 2894 - DNA, 927 bp, Artificial Sequence
  Optimized genes for Lactococcus lactis
atgactttgaattcgcttgatgttcaaaataaaacctttaatcctcaatttcgtggtttttcaaaacatgaggtggacgagttcttagacatagtagtgcgggattatgatgaatttgcgcaaacaatcaaagaccaagaaagagaattaaaagctcttcgtgaacgagtcaaatatttcgatgatatgaaagattcattgaataagtctattgttgttgctcaagatgcagcagacaatttacgcgaacaagcaaaatctgaagcggatactctcagaattaattcagaaaaagaaagtgctgatatcattgccaacgctggacagaaatccagccttattattgaagcagcaaaaaaagaagcaggctttattcttaatgcagcttcagacgatgctcgtaaacttgttcgagacacagatgacttgaaacgtaaaatgagactataccatcaacgtatgacatctatcatagaaaatcaattagctagtattcaatcagatgattgggccgaaatttttcgtcccacgcaagattatgcaatcaatccagaagaaaaattacagtctattattgaagaacacctggaaaacgctgaaagtacattggctaaaacacaagctatcaagccattgactgatgaagatattgcacaagcgaatgaaacaagcgacgaaactgaaacgattgtttctgaagaaattgttttcgaaactgaggttccagatgaagtcaaagaggaagttgaaataactgatgaagcaaacactacagatgattcaaacgaagagtcagaggtagaagctccaaaagccgatgatagtgagatttttcctgaattagactcaaaggcccctgctgaaacagctgaagttgtagaaaaagataatcaagaaaccattgatcttagtgaactcaaaaattaa

SEQ ID NO: 2895 - DNA, 678 bp, Artificial Sequence
  Optimized genes for Lactococcus lactis
atgacaattaaagaaaacgtcaaacgtattctttctaatgtagatgcggcaaaagcggcatcatcatatagtaatcaatcagtttcagtggttgctgttactaaatctgtagacgccaatcttgcacgagaagtttttgaaaatggggttagccacttagctgaaaatagaacagaacttttcctggaaaaatatgaagctcttaaagacttggaaattacatggcatctcattggtaatttacagcgtagaaaagtaaaacaagttatcaattatgtggattactttcatgcccttgattccttaaagctcgctcaagaaattaataaacgtgctgagcatactattaaatgttttattgaattaaatatttcaggcgaagaatctaaacatggattttcagttaacgagctaatggaaatacttccagaatttagcgaattggaaaatatcgaaattgtcggtttgatgactatggcaccatttgatgcaacggaaagtgaatgcaatgatatcttcggacgtatgaaaaaattgcaagttgaaatttctgaaatgaatttatcgcgtataccttgtacagagttgagtatgggtatgagtcgcgattatgagattgctatcaagaacggagctacttttgttcggattggtaccgaatttttcaaaaacttataa

SEQ ID NO: 2896 - DNA, 522 bp, Artificial Sequence
  Optimized genes for Lactococcus lactis
atgtttgaaaaattcgatcttcttaaacatttcggtgtttacggggtcgcaatcgataatgaaaaattgcttgtaattgaaaaaaacagtggtccttatcaaaatcgttatgatttaccaggaggaagtcaagaagtaggtgaatctatggttgacactttggaacgtgaggttttagaggaaacaggctttactgtgttggcatcaacaaacaacagactgtattctgcctggatctacgaaaatgatcgacgtgttgttggacatcatatttttaatctttttgacgttaaactaaattcagttgctaagaaattaccacaaattgtcgcagatggtaaaaatgattctgatagagcggtatggaaaagtattaaaaacttatcagtcgaaaattcgagcccactcgtattgaaagttatagctgaaattaataattatccccacgttgataaggctgaaatttatcgcgactggaaagttaattatggatcaaaaaattatccaaaacctttagtgtaa

SEQ ID NO: 2897 - DNA, 714 bp, Artificial Sequence
  Optimized genes for Lactococcus lactis
atgaaaaaaattataactaaagactatgcaacaatgtcagaactcgcggctgctattgtacttgacaaaatgatgcttagcaaacgtgttaatttaagtttgacagccgggaataccccattgggaatgtacgaaattctaattgataaactgcaaaaaatgaatttcgatcgttctaatattcactattataactttgatgaagttccactagcaggagaacgttacggcttaacaatgtctgctctcaagactgcgttttatgatagagtacatattgatgatggaaacttgcacgaacttaatgctcaaaataatcaagtgtttgatcagaaaattcttcaagatggtggtattgatttaatagtcatgggtatcggagaagacgggcatttctgtgctaatatgccaggacatacttcatttgagcgagaaattttcgctgtcccttttgaagaaggtgacgaaatctatcaatcaatcaaaaatttaactgataaggaaccggcctcaccttatgttacatttggtcctagaacggttcttgctagtaaacaattacttgtttttgctgatggtaaaaagaaagcagagattatgaaaaaagtattggagggcccaattacagaagaaattccagcatctatcttacgcacacatcccaatgttacttttattttagatgaagaagctgcagcattgcttgaaaactaa

SEQ ID NO: 2898 - DNA, 507 bp, Artificial Sequence
  Optimized genes for Lactococcus lactis
atggtacaggaaaacacaaagacagaagtcacagaagtcaaaggatctttaacttatgaagataaagtaattcaaaaaattgttggattggcccttgaaagtgttaatggccttttatctgttgatggcggtttttttagcaatttaacaggtaaactagtaaatacggatgatgttacagctggagttggtgtcgaagtggggaaaaaacaagtggcagttgacctcaaagttgttactgaatacaaaaagaatgttccagacatctatagaaaaataaaagatgtgattcgtaaagaggtatcagatatgaccgatcttgaagttgttgaagtaaatgtgactgtcgtcgatattaaaacaaaagaacaacaaaaagacgatgaaaaatcattgcaagatcgagttgttggtgcagctcaaactactggaaaattcacctcagatcaagttgataaggttaaagagaaagttgacgacatgggtgatgatgctcgtgtaaaataa

SEQ ID NO: 2899 - DNA, 1005 bp, Artificial Sequence
  Optimized genes for Lactococcus lactis
atgatcctttctgttcttccatcaaatttgcttggagttaccaaagtcaatgcggaaagttcacaaacagaggttaatcaagaattaactaactttcaaacagaattggatagtaaactcgctcaagctaataaaatctatagccaagctcaagaagcccaagaaaaagtaaagcaatcaaaatctaaaattaccgaatacgaatcaaaaattgctgaaactgaaaatgacattgttcaattaaaagcaagtgtcgctaaacaaatgcgagccgtgcaaagtaatggtggggctactttttcttatatcgatgtcgttgcttctagtaaaaatttgtctgagatgattactcgtttaacaaatcttaacgtggttttaacagcagaggcagaccaggctaaatccctaatagaaaaagaagcttctttaaaaacgatgaaggttaaacttgaagaaacgcaagaatcgcttgttaagaatcaaaatgattatcagggacaagtagattcactgcaatcatcaattagttctttaaaagataaaatttcttctaataaacaattactttcagaaatgcaagaaaaagctgcagctgaacaaaaagctcgcgacgaagcattggctaaatcagtagcagaagttaaagcaaaagcagaaactgttaagaatacaagcagcaacccgcccacagttccagatccaccaaaacagactacaccaacaactcctagtggaggtagaacactaaatgtagaagcaactgcctatgcgcttaatggcattactgccacaggaatcgatttgtcaaaaaaccctatttgtattgcggttgatccatcagtaattcctttaaattcattggtcgaggtgcctgggtacggaatagctatcgctggtgatacaggtggtgcgattattggtaatattattgatgttcatttcccaactaacgaccaagcaattgcatggggccgtaaaaatattcaaatcaccgttctctcgtaa

SEQ ID NO: 2900 - DNA, 576 bp, Artificial Sequence
  Optimized genes for Lactococcus lactis
atgaaaagcaaaaaaacattaattgggttgatgactagcgtaacattcctagtatttgcgactccacttatggttaatgcagacactgatagttcaactcaatctaataatcaggtacctcaaattgtcatcgaaaatgttgacaatagtttagtttcaactgttgatgttcttgattcgtcagaaagcgcagtatttgatcccaccattttaccagtttctggcgcagttcaaactattaaagacaagaatggtgctgtctctaatatatcactgacccctctttttaatccacgtacgcgagtttctaacggatcatatacaattaatgcttggggtattggatggaatgttacttactatatcaatataagttcaaacaaaattacatccgccaacaacctcgattatatcattgcaatgcctgtgaacagtgctacggttactgtcgattcatctaaacaagccacagctagattttctttctctactccaatctataatattttgagttggacaggttgggttcgtgctacaattaattcatcaaataatattgtgattacaacaaattaa

SEQ ID NO: 2901 - DNA, 1233 bp, Artificial Sequence
  Optimized genes for Lactococcus lactis
atgccaaatggtctaacagtgtactatttgcctaaagcagactataatagaacttatggattgtttactacaaattttggatcattagatactagttttgttccattgggagagtctgaatttcaaacgttcccagaaggaattgctcattttcttgaacataagctttttgaaaaagaagaaggcgatgttatgtataaatttggagcacttggagcccaaactaatgcattcacatctttttctcgaacctcttacctcttctcaacacgtgaaaatagttacgaatgtacagagcttctgctggactttgtccaaaaaccttattttacaaaagaaaatgtcgagaaagaacaaggtatcattcagcaggaaatacaaatgtatcaagatgatagcgactggagattgtttgcaggtttattagaaaaaatgtatccagattctccactcgcagctgatattgctggtactccagcaactattaatgccataactgctgacgatctttataaaaattatgaagtattttatcaccctaaaaacatgaacttatttcttacaggaccttttgatattgaaatgatgagcgatttcgttcgttctaatcaagcgaaaaaagatttcgctgatttatctgagattcaacgcaaagaaattaaagcttcagaaccaatctcaggggaatcacttgaattagaagttgctatgcctaagtttgcgttaggacttagaggtgaagatcaactttcttcagatagtaaaacattgtttaaatacaaacttgcaaatcaactttttttagacttgctttttggccgtaccagtcaacgttatgaggaattatataattcaggtttgattgatgattcgttcgggttcagttttgatctagataaacggtttcattttgcagtattaacagctgacactgaaaacccccaaattttaggtcaaactcttcaagaagccatcaaaagttataaaattgatcgtgatttttcagaagaacatctcgatttgttgaaacgtgaaatgttgggtgattatttctcatcattgaattcccttgaatacatcgctaaccaatttagctcagaaatttatggtgacttaacatttttcgattttccggagatcttaaaagaattatcactctcggaaattgaaaagtttgctgaccaattcattagtgaaatgaagaaagttgaatttacgattctaccaaaataa

SEQ ID NO: 2902 - DNA, 282 bp, Artificial Sequence
  Optimized genes for Lactococcus lactis
atggaattgaaaaatttaaaagatttttatgaaaagcaagaatatgttgactataacgaaagtaaaaattttgaacaaagacaagtcaataaacgtattgaggaacttagcttctttaccaatattgcagttttttcaatctttttggtattcacaacttatattttagtgtcacttttagcaagttggatcgctataccagtttctattgtactatcacttgctctctacatttctgttaaaaaaggtattgctaaagccattaaatttatgatgaaataa

SEQ ID NO: 2903 - DNA, 594 bp, Artificial Sequence
  Optimized genes for Lactococcus lactis
atggttgaacgtagagtagtattcccagttattggtgacgacgaagcgcttcaaaaggacactcgtgttatctttactaatcaacaactcctaacccgtaatccaagtttacaagatgaagcaagtattgaaaataacaaaccgaaaacagatgctaaaagaccagaatcgtttaaaccttacaaagctaaaacatcattttcaacacaacatcggccattaaacagcaatcacgatggtgtttcctcatatgataagatgcctaaaaaaactagtgttgatgaatcaaaagaacgagctaaacgtgctgcagcgacgttgccaaaacctcccaaacaatatgtgtcacctttggagcgcgataaggaggacataacagtacgtcgatctacttctgcaatccttaataaaagaccatctgccaatgataatccaattcgtgatatgaaaaatcaaggtatgaacgtctcagatgcagttgctaaaggaggaatgaaaaaagccgttcctcatggggcagctgctaatgatacacagaaaggctcttatttcgaaaataaacgtaaaaatatttttgatcgcggaattgtctaa

SEQ ID NO: 2904 - DNA, 4353 bp, Artificial Sequence
  Optimized genes for Lactococcus lactis
atgattaagaagtggactgtgtgtctttctatcattattttagttcttaactttgttcctaaccttctgcaagggcatcaagtatttgcggaaaaccaaaaaaattataaagataaagttgaactcatcaatgatgaatcattcaacatatcatatagtatgcaagcccttgaaaatcaatacgaatgggaaattgactatcgtatcaataaaacagaaaatgacaaagaattaaaattaaaattctctttcgaaggcaatcaacctattgagattgaagaaaatgaaagttggacgcttaaggagaaaaatactattatttctgactttgagaaagaaaatgaaggcaaaattgttttacgtgctaacaattcaatatcacttttgaatctagaaattcaagcagatgcaaaactaattgaaaatgatcaagaagtcatttctgaagacattcttgccaaaaaagaatctactattttctctctatacattcctgaaaataataaggcagattcaaaagaaaaagataataaaaatactgaagaagtgctaaataatgaaagttcacaggaggaaaccgtgtcgcaacttaaaaaagactcacaattggcatttagttaccctagtaatttcgggattaaggcttcttttaacgatttagcccaaaattatgaaaacatttctccagaatacagacaagacgaaacaggtatttctccgaaccactcatggatacccacaggtaataccacggttgtaaatcatcaaggatggaattctttttcttcacaatgggatggagtaaatagttggaatggagaagctactaatcttgaaaattcttacatagaatatgctggtgttaataatccagtggattttgccttgagaaaatatgcaaaagaaacagaaaccccaggtctttatgatgtttatctgaatgttcgtggaaacgtccaaaatccaataaagcctgtggatatcgtattagttatcgatatgagtggttctatgcaaggagcaaaagaaactgccgtacggcaaggagtttcagatttcctttcaacaattcagaatacagcttacgccgattacgttaatgttggcattgtagggtattcgtcacctgggaactatgtaactggagcttcaggttatattactgttcctatcgataaagtctcaagcgaatcgcatgtaaaatcaatcaatcaagctttagcaccacaattttcgggaggtacttttacccaattaggacttagaaaagggacggaaatgttagagcaagattcatcagataatcagaaaatgatgattttaatgactgatggagtacctacattttcatataaggtgaactctgcttcaaaagttgacaatgttatctatggacaatcatttgcagaaagtagggatgaaccaggcaatacaagcaaaattcaatctccatattatgtaaaagacattaatggcggtagtaatattgaaatacgcgacacctgggctgctacattgggtgaagcagagatctcaaaacaagaaataagcgaaattcatactcttggaattcagttaggtaatgatggtagctacctaagtcaagaagaggtaaaatcacgaacgtctctaattgcaactactggtttatatcaagatgcaaattcagctaatgatattaccgactatcttaaaaatcaggctaacgttgtcctttcccgcttcaatacaattacaaatgggttaatcttagatcctttgggagcgcaatttgaatataaagataccaagtttgaaattacatcagtcggtgaagattccattgataatttgcctacaggtaaaattaatgaaaaaggacttgaaatttcaaaccttaacataggaaagaatcaagaggttcaaattcattaccaagtccgtttgaatacagagaccgatgatttcaagacgaattattggtatcagatgaatggtgaaacaactcttactcctaacggctcaaatccagacaacaaagttaattttggtgttccgtcagctaaatcatctggtatcaaccttactttggaaaaacaatggttagcgaatagtgaaaatattccagaaaacgtagaactattaattggacgtagaagtgctcaaatttcttcagactggacaaaaacagtcactcttaaagaggatgatgagtggcggagccaacttgagaacttgcctaaatatagcatcttgggtgaggaatttatttacgagattaaagatgaaattgttttaaattcagaaatttatgattggatcacaattggtgaagataaaactacaattgctaatatcgaaaaattccgtcttcaattaattaaaacttcaaatcacgataacgaaccacttagcgaggtcgaatttgttttaaaaaactcacaaggagaggaaattgacaaggccgtaactaatgaaaaaggtgaaattctttttgataaaacacgattaaactatggtgaagaatatcaacttcacgaaattaaatctcctggtcattcattggaagggccatggaaaattaaaacagaatttgaaaatggacaacctattattaaagtcgacggtgaacaaattgcattagacgaacattataataaatttatgattagtctcaatatcactaatgatattaatgttgaagaatttcgtaatagtgttacaatcgataaaagagctgttgatagtgaagaaaaactcgatggagctgtctttaatttataccaaatagaatcggttgatgatgaacttactcaattgaagcctttggaaataactaataatcttctgcctggtttgtatgctttacaagaatctgtttcaccaaatggttattatagagatgatgaagttcatttttttcgtgttaaatttaatggatctattgttgctattgggtcagaaggaatcgatatcccctttctggatgaaaatgaaagtggtaagaatggtcttgttttgaacgaagaagaaaatggagatcttcatttaacattaattttctataatcaagctgttcctccattacaattggaagttgataaaattgatgatgattttacaagtccactcgccggtgtttcttttgaacttacacgtttaggacgtaaatcaactgattctgactctgttaagcgtattaactcattcgatagaatccttaaaacatttaataatgaatttaccggtgaaactattgcactcaaatcaaatttggacggtaaattaacagtgatcgataatgaaaataacgggcaagaatcaacatctccaatttctttagaatatgatactcaatacaaacttgtaaaaaaatcaagtattggattgttcccaaactttggtgaaactagtcagtggattattactacaccaaacatggatgaactcaaagaacatgaagaagataacaacattgaaatcgacggcggggacttgcttgagacaccagacgaatctattttggaaagtatcaatcaaacaccaagcactttaggagttgtatccctcattaaaacaaaaaatccagaattcaaagcgttggaatccacagacagtcaagttgaaaaagtcaaatctgattcatcgtttcaagagaaaatttctgaatatctaattagctttgaaattcactcaaatattacacatagctttacgataaaaaaagttgatggagagagcaatcgtcccatggatacacaattcgcattacgatgggttgaaaaatttgaaccaactcaagactttgatagcttagaacgtttaaatttggatacactggacctttcaggtaatgatattagtactagttctaaaactagtatcgatgcaaaagcgggagcaaccctctcaactgagaaaggttcccgaacattggaacatatggctcgtggtaatctctacattatctcagaggaggaagttccaacgggttatcaaaaaactaatacggttattgtagcttatatggataaagcacagggatatgcggacaaagctactattcatatccgcttagctaaacgcagtgcaacacacccagaaattttagaatttggttcattggaagattttaaagaatataaaggcgacttggaagacgaaataggaatcgtgtttgctaattacaaaattgcagaaggaggctctgaggaaaaagaaaaagaaaaagaagaaaataatgaaatgcgtaataagcaagaaacaaataaaccgaacatcgaactcccagctttgggcgctattggagttggtggagtgggcttacttttgattatcagtgcatatttgctgaaaaaatatcgtggtaaataa

SEQ ID NO: 2905 - DNA, 780 bp, Artificial Sequence
  Optimized genes for Lactococcus lactis
atgtctgaaattatcaatcatatcacggcttttcaacctgtatatcgcgtccttaatcgagaagaaaacttagatttttaccgtgaagttctaggattcaaagtgcttgttgaagaaggcgccatggtttggcttggtggtcacgaagctaaaaaagaccgtttccaacttgaagaaagtcccggatttcgtccagtggaaggacttaagaagcatggacaaactgtaattaaagcaaactcatcagaaattgaacaacttattgtcagaaatttagataaaatatcaaaagtttataaaggtaaaaatgggtttgcgttttcagcattgtctccagaagctgaactttttttggttacaagtgatttgttgactgatctctctagcttaacagagattgataaaagtgaaatagaattggaagaagataaaacttttaaaggtttatcagactttgagattattgccatggaccttaatgtagcagatcaatcaattattgaattttatgaatcggttttcggattaaaagctattaataatcagatcgaatttccatttgttacactcacattctccgtagaagagagcgaagatctagcagctggcactgacgaggttttagatttagaattcttagttttcatgatcgataaggattttgacttgaaagactttgcacatcaatttagtgatgttgatggtacctatttggatggttctgctaaaacattttcattagaagtacctgatcatgtcgagctgtggtttgttaaataa

SEQ ID NO: 2906 - DNA, 843 bp, Artificial Sequence
  Optimized genes for Lactococcus lactis
atgaaaaaaattaaattgttgactctagctactgtaggaatcgcatctattggattactggctgcttgtagtagcaaagataatagtagctcaaaatccaccgataaggtcacgactgttacggtagcaacaagtgcagctagtgttccatatgagtattcagaaaatggtaaaatgactggatttgagtacgatattttaaaagcagccgacaaagatatgaaagattataaatttgattttaaggtttacgaagattctgcaatattggcggcccttgatggaggtcgagctcaaattgcggctaacaattttggaaaaacaaaagcacgttcagaaaaatatctcttttcatatcctgttcgtcagggtatcgacgctatcttttcgacatctaaagaaaacattacaaaaatttcacaattggcaggtaaaacaactgaaattccagcaggcacaaattatggggacatgttcgaaagttggaataaaaaccatccagataagaaaattaatgtgaaatattctcaaagaccccttgctgatcgcctttcagctatatctagcggccaaattgacttcctctttgctagtaaagctcctgccgaaaatctaattaaagaacatgcgatcaccggtcttgttgatacagtcccgactgatttagacaaacaacctgaatttaaaacttacgattatttcattttagataattctcaatcaaaattacaaaaggatcttaatgttgaattgaaaaagttatatgataatggtacattaaaaaaactttcagaacaatattttcacgactcacatattccagcagctgatcaatttaaataa

SEQ ID NO: 2907 - DNA, 495 bp, Artificial Sequence
  Optimized genes for Lactococcus lactis
atgaacgaaattacctatactcaaattatgcccaacgatattgacgatgtgattcgtattgaacgagcgacattttctgaaaatgaagcattatctgttgaatcaatgatagaaagaatcaatcttattccagatagctttatcgctgcccgcaattctgagggtactgttgtaggatatgtttcgggaccagtaactgaaggacggtatcttgacgatgaaagttttgagcgtacggaagcaaatccaaaaacaggtggtttccaaaaaattatcagtcttacagttgaccctgattaccaaggtctgggaattgctactaatttattattgttgctagaaaaagaagctaaatcaaagaaacgtttagggattagtctcacttgtcatgattatttggtcccttactatgaaaaacacggtttcacaaatgaaggcctttcagaatcaaaatttggaggcgagacatggtataatatggttatggaattttaa

SEQ ID NO: 2908 - DNA, 1086 bp, Artificial Sequence
  Optimized genes for Lactococcus lactis
atgagacgttggattatccatctcgtcatgactgttattggagcatcattaggagttgcagttgttccatcaattcttaaagtgtttggctgggacacaggaattcttcaaaatgaagctgtggatgcggtaattggcgcaattattttcatcattttgtcttttatcttcgcaggttcaatgttaaacggactcaaaaaaatcgacagtcgtatttcaaaaatgaatatgtctaaaatggtatttaatataattggaattgtattgggtttgttagttggggttattggttccattccactaaggtttttgaatgttccaatcttgagtaacattatctcatttattcttgttttggttatgatttatttaggatatgtcctttttgatcggcgaggtgatgagattgctcgtgttctttttagaaaaagacgagaagcaatggctacggaacctgccgaagttgctgaagaagtagttggtgaaagtaaatctgacaatagcatactgttagacacctcttcaattattgatggacgtattttagatgtaataaaaactgggtttatcagcgataaaattattgttcccaactttgttattttagagctacaattgatttcagattcttcagacccattaaaacgcgcaaaaggtcgtcgtggtttagatttagtcaatgaattaacaaagtttgatcaagttgaaatatcgcaagttgattttgctgatgtacgcgaagttgatactaaattactcaaatatgccagttcaacaggtagtaaacttgttactaacgatttcaatcttaataaggttgctgagatacagggtgtacaagttcttaatatcaatgaccttgcgaatgctgtgaaaacacaacttgtggtcggtgaacacattaatgtgcaaattattcgtgctggaagcgaacgtcaacaaggagtcgcataccttcctgatgggaccatgatcgttattgaagatactgccaagttgattgataaaacagttacagtcgaagttgcaaaagtattgcaaacttctgctggcagaatgatcttcgctgatctggtaaaaaaataa

SEQ ID NO: 2909 - DNA, 210 bp, Artificial Sequence
  Optimized genes for Lactococcus lactis
atgaaatataaattaaatccattattcactttgcgtaaaaccgacaaggccgtttttaacttttcaagagctgaacttacacaatttaatgatactggtttcgatattttgcttgcagttttagaacaagaatctgatcgtgagtggacagatgatgaagacgaatttctcaaagagctaattaaagaaaaaatcgtagaagaaagttaa

SEQ ID NO: 2910 - DNA, 474 bp, Artificial Sequence
  Optimized genes for Lactococcus lactis
atgaacaagaaatcatcagcattattgacaatgggaacactcacccttttagctgatggtggcgttgttctaacaaatttaccagactcttttaaaattcaaagagtttatgctgcaacaagccgtgatataacagtttatagtaaagattttttgacttattttcaacgtaatggatctgccgcgggctttgactatgatttagcaacatacactcaaacgttgacacctgatttgggtaatcaggcagggaacgtaactttaaaaactaaagtcgatatgtctcaaaattttaccttcactggtcaaattaatctggggaataaatcacaacaaaatggaggagccgatggagttggtttcctttttcatccaggagacacttcagtagttggtgctcctggtggtgctgctggtcttgtcgtgcttatggaacacttagtactcagttggattcttactatcatggaataa

SEQ ID NO: 2911 - DNA, 309 bp, Artificial Sequence
  Optimized genes for Lactococcus lactis
atggctttcagcaatactcgccgtagatacgcttcattcgatacagttgcatctattcctggtgaagtgattgatgctttttggtttataattgaccaccatttgaaaggagtttttccacttgagacaattatcaattttgatttagtaaattctggcaacttgctttcaatccgtttttcacaagataatagtccaaccacaattttagtcgattttggatatccctttaatccagaatggcctctccattatagagcagttgacaacatgggtcgagaaactattatgactgcccgtgaaatgtaa

SEQ ID NO: 2912 - DNA, 441 bp, Artificial Sequence
  Optimized genes for Lactococcus lactis
atgaatcatattccagtttttggtgaaaaaaacgaggaaaaaaattatcaagctcgttatggagtttattctattgtcgcacgtgaaaataaagaaatctgtctcgttcaagctccaaatggtgcttacttcttacctggtggagaaatcgaagcgggtgaggatcaggaaaaagctctacatcgcgaattaatggaagaattgggtgcaactgcagaaattggcgaattcttggggcaagctgacgagtacttttattcttcacacagagataaatattattacaatcccgcctatatttataacaccaaaaatgtgcgttttgatagtaaaccacttgaagactttaatcatatttcatggtttgatcctgaaacagcaataagcaaacttaagcgaggatcacataaatggggagtacaagaatggttaaagaaataa

SEQ ID NO: 2913 - DNA, 1320 bp, Artificial Sequence
  Optimized genes for Lactococcus lactis
atgccagtttcaagaatcaaagtcaaaaatagacacttgaaaaaaaaagctaagaaacccttagcattttataagccagctactaaatttgctggagctgtgctaatagccgggactttaactacgactcatgaacttcttttgcaacaaacaagtccaatggttcaagcagcgacaaatagcacagaagcttttattgaatcaatcgctgcaagcgccaaaccggtagctgattcaaatggactttatccaagtgtcatgattgcccaggcgattttagagtctaattggggatcgagtcaactttctcgagcaccttattataacctttttggtatccaaggaacttaccaaggtaaatcagtagtttttaaaacacaagaatatcttaacggaaaatgggtaacaaaagatatgcctttccgtgtttatccttcatttaatcaaagtttccaagataatgcttatgttcttaaaactactaattttggaaatggtccttactacgctaaagcatggcgtgctaatgcagctacctatcaagctgctacagcagcactgacaggaaagtatgcaactgacccaaattatggtgcttctttgaatcgtattatttcacaatataatttgacacgctttgatggtgcatcaagtgcgggcacctctaactctggtggaagtaccgcaacaaacactaacaataatagcaatacaagctcaacaacttatactgttaaatcaggtgatactttgtggggtatcagtcaaaaatacggaatttctgttgctcaaattcaatctgcaaataatttaaaaagtacagttatttatattgggcagaaattagttttgactacaagttcatcgtctagtaatacaaattcatcaacttcgtcagggaattcagctggtacgacgacaccaacaacttcagtcactccagcaaaacctgccagtcagacaaccatcaaagtaaaatcaggagataccctttggggactaagtgtgaaatataaaacaacgattgcacaattaaagtcttggaaccatttaaatagtgacactattttcattggtcaaaatcttattgtttctcaatcagcaggttcttcatcctcttctactggttcaagctctgctagtactagttcaacatcaaactcatccgcggcctcaaatacttctattcataaagttgttaaaggtgacacattatggggcttaagccaaaaatctggctctccaattgcttcaattaaggcttggaatcatctctcatctgatacaatcttgattggacaatacctccgtataaaataa

SEQ ID NO: 2914 - DNA, 1428 bp, Artificial Sequence
  Optimized genes for Lactococcus lactis
atgactacttttggtgtagctggacatgctgatggtgtcactgttggtagctcctctgatgcttcttctagcactggttcttcatcgagctcgtcaggtactggcggaagtagttcaagcagctctacgggctcatcttcgtccagttctaactcaaatgcatcaagtagttcaagttccacaggaaattcatcgagtagctcaaaaccatcaacctctggttcaacttctaaacctagtaatccatctagttcaacaaataataatagtacaagtaactcttctacgacaacacaggcaccttcaacttctgtcagtacaatcgcacccagtgccagcacctcaacagttgccccgagcaattacagtcaagataatgcttattatcagacttcaacagctgcccaaattccaaattcttcagcagatagtgctccaagtatttatgcgggtcctgtattgaaaacaattgaggcggctaaatcaatcgataaaattgatacatcatctacagaagcttttattaagtcaattgctgaccgtgtgagaattttagctggtaaaaataacctttatgcttcaataatactcgcgcaagcaatcttggaatcaggctctggacaatctaatatgtcacaacaatattttaatattttcaatatcacaggggcctatttaggaaaatctatttcatttaaaaccgaagaattttcaggaaataatccttattacatcgaacaatcattccgcgtttattcaaattatgaccaagctttagatgattatattaacttgatgattaaaggaacaacttggaattcagagatttacgcaggagcttggaaatcacatgcaaaaacttatcaagaagcagcacaagcacttcaagggatttttgctactgacccagcttacgctcaaaaattgattgaaattattcaagaatataaacttgatgcatatgataatgttgattcaactacacaagttgttgacagcaagattcctgaatctcctctggcagctagtaaattagacaactcagcttatccagaatacaatggtgttgaatatcctggagccgattcttatgctttcgggaattgtactcaatatgtttataatcgaatcattcaacttggtggacttgttggaactcatatgggaaacggtggtgaatggggaattaatgcgcaggcgcaaggatactttacaaccacggttccaactgaaggttatgcagtttcttttccaccaggtgtggctggttcaagttctgagtatggtcacgttgcatttgtagaaaaagtttactcagataacagtatactagtatcagaaatgaatgtaaagggcaacaatattgttagtgaacgtcatatttctgccggggtcgctgcattagcaacatatatccaaccaaaataa

SEQ ID NO: 2915 - DNA, 1086 bp, Artificial Sequence
  Optimized genes for Lactococcus lactis
atgaaacaaaaacataaattagcactcggtgcatcaattgttgctttggcaagcttgggtgggattaaagcacaggcagcatctgtgcaagaaatcatcaatgctgctgttcctgtggccaatgattatggtttatacccaagtgttatgattgcccaaggaattttagaaagtagtgggggtcaatcagctttagctagtaattataataatatttttggagtaaaatatacatcagggacaccagtttaccttccaacacaagaatatttaaacggaacaatgacaaacgttgttgaaccattccaagcttattcttcggtgtatgatgcctgtgtcgctcaagcaaaaatgctcagagcaagtagctattatagtggtgcttggcgtgaaaatacatcctcttatcttgatgcaactgcttggcttgaaggacgttatgctactgaccctacctacgcgtcgaagttaaattctgtcatttcagaattgggcctgtcagtctacgaccaaggtggtgaaatttctggaggaactgcggtaacaaccagttcatcagcttcaactaactctgctggtacttataaagttcaagagggagattcactttcagccatagcggctcaatacggtacaacggttgatgctctagtaagtgctaactcactagagaatgcaaacgatattcatgttggagaagttttgcaagtagctggcgcttctaccacgacaacaagtacaaatacgacttcaaatgtttcttcttcatctacttacacagttaaatcaggtgattctctttattcaatcgctgaacaatatggaatgactgtatccagcttgatgtcagcaaatggtatttatgatgttaattcaatgcttcaagtcggccaggttttacaagttactgtttcaacatctgcgaccacttctaatactacaactagtaatagttatactattcaaaatggagacagcatctatagcatagcaacagctaatggcatgactgcagatcaacttgcagccttgaatggttttggtattaatgatatgattcaccctggacaaacaattcgaatttaa

SEQ ID NO: 2916 - DNA, 222 bp, Artificial Sequence
  Optimized genes for Lactococcus lactis
atggcagtctttgaaaaagttcaagatattattgttgacgaacttggtaaagaaaaggaagaagtaactttagaaacttcttttgaggagttggatgctgactcacttgatttattccaaattatcaacgacattgaagatgaatttgatgtagaagttgatacagaagctgatatgaaaacagtggcagatttggttaaatatgttgaaaataataaataa

SEQ ID NO: 2917 - DNA, 2712 bp, Artificial Sequence
  Optimized genes for Lactococcus lactis
atggcaaccaaaaaagcagctccagctgctaaaaaagtactatcagcagaagaaaaggctgcaaaattccaagaagcagttgcttacactgacaaattggtcaaaaaagctcaagcagcagttttgaaatttgaaggctatacccaaacacaagtcgataccattgttgcggcaatggcccttgctgcttctaaacatagtctagaactcgcccatgaagcggttaatgaaaccgggaggggggttgttgaagacaaagatactaaaaatcattttgcttcagagtctgtctataatgctataaaaaatgataaaactgttggagtgatttcagaaaataaagtcgcaggttcagttgaaattgcctctccacttggcgtgcttgcaggaattgttcccactactaacccaacatcaactgctatttttaaatcactcttgacagctaagacgagaaatgcaatagtattcgcctttcatccacaagcacaaaaattttcaagtcatgcggcgaagattgtttatgacgcagcaattgaagcaggcgctcctgaagattttattcaatggattgaggttccaagtttggatatgacaactgcacttattcaaaatcgaggattagcgacaattttggcaactggcggtcctggcatggttaacgctgctcttaaatctggaaatccttctttgggtgtgggggctggtaacggtgctgtatatgttgatgcaacggccaacattgaacgcgccgttgaagatttgctcctctcaaaacgatttgataatggtatgatttgtgcaacagaaaattcagctgttatcgacgcatcagtatacgatgaattcattgctaaaatgcaagaacaaggtgcctatatggtaccaaaaaaggactataaagccatagaatcttttgtttttgtggagagagcgggtgaaggatttggtgtaacaggaccagtcgctggacgtagcggacaatggatagctgaacaggctggggtaaaagttcctaaagataaggatgttttattgttcgaattggataaaaaaaatatcggagaggctttatcatctgaaaaactttcgcccttgctttcaatttacaaagcagagactcgtgaagaaggtatcgaaatcgttcgttcattactggcttatcaaggagctggtcataatgctgcaatccaaattggtgcgatggatgacccttttgtaaaagaatacggagaaaaagttgaggcttcgcgaattttagtcaatcaacctgattctatcggtggtgttggtgatatctatactgatgcaatgcgtcctagtttaacccttggtacagggagctggggaaaaaattctctttctcacaatttaagtacttatgatttattaaatgttaaaacagtggcaaaacgtcgtaatagacctcagtgggttcgcttacctaaagaaatttattatgaaaaaaacgcaatttcttatttgcaagaattaccgcatgttcacaaagctttcatcgtagctgacccaggaatggtgaagtttggattcgtagacaaggttcttgaacaattagcaattcgtccaactcaagtagaaacatctatttatggttctgttcaacccgacccgacactttccgaggccattgcaattgctcgtcaaatgaaacaatttgaaccagatacagttatttgcctggggggtggaagtgctctcgacgctggtaaaataggtcgtttaatttatgaatatgatgcccgtggtgaagctgacttgagtgatgatgctagcttaaaagagctttttcaagagcttgcccaaaaattcgttgacatccggaaaagaattattaaattttatcatccacataaagcgcaaatggttgccattccaacaacaagtggaactggtagcgaagttacaccatttgcagtcattacagatgatgaaactcacgttaaatatcctttggctgattatcagttgactcctcaagttgcaatcgttgatccagaatttgttatgactgtcccaaaacgtacagtttcttggtcaggaattgacgccatgtcacatgctttggaatcatacgtatcagtcatgagttcagattacacaaaaccaattagtcttcaagctatcaaattaatctttgaaaaccttactgaaagttaccattatgatcctgctcatccgacgaaagaaggtcaaaaggcaagagaaaatatgcacaacgccgctacccttgctggaatggcttttgctaatgcatttttaggaatcaaccactccttggcgcataaaattggaggagaatttggcttaccacacggcctagcgattgcgatcgctatgcctcatgtaattaaatttaatgctgtgacaggtaatgtcaagcggacaccttatccacgttacgaaacatatcgtgctcaagaagattatgctgaaatttcacgctttatgggtttcgctggcaaagatgattcagacgaaaaagctgttcaggcactagtagcagaacttaagaaactgacggatagtattgatattaatattactttaagcgggaatggagtagataaagcacatttagaacgtgaacttgataaactagcagatttagtttatgatgaccaatgtactccagcaaatccaagacaaccacgaattgatgaaataaaacaacttcttttagatcaatattaa

SEQ ID NO: 2918 - DNA, 564 bp, Artificial Sequence
  Optimized genes for Lactococcus lactis
atgtcattggtaggcaaaaaaattgaagaattttctaccgatgcttatctcggtggaaaatttatcaaagtttctgataaagatttttatggtaaatggtcagtactttgtttctaccccgcagacttctcatttgtttgtcctacagaacttgaagacctagaggaaacttacccaacattgaaatctttaggagttgaagtttattctgcatcaacagatactcattttgtacacgcagcttggcatgaacattcagatgcgataagtaaaattacttatccaatgcttgccgacccaagccaaaaaatcagtagagcttttgatgttttggatgaagaggctggtttagcacagcgtggaacttttattattgaccctgatggtgtcattcaagcattagaaattacagctgacgggattggtcgtgatgcaagtcaacttgttgataagattaaagctgctcaatatgttcgaaatcatccaggtgaagtgtgccctgctaaatggaaagaagatggagcctcgctgcacgtcggaattgatttagttggtaagatctaa

SEQ ID NO: 2919 - DNA, 711 bp, Artificial Sequence
  Optimized genes for Lactococcus lactis
atgactgaaatcactcaattattccaatataatacacttggtgctttgatggcaggactttatgaaggaacaatgacgattggtgaacttttgaaacatggagatttagggattggcaccttagattcagttgacggtgagttgattgttttggatggtaaagcttatcaagcaaagggcgacaaaacaatcgtggagctgacagatgatattaaagttccatacgccgcggtagtcccacatcaagctgaagttgtttttaaacaaaaattcacagcttcagataaagaattagaagaccgcattgaaagctactttgatggacaaaatctattccgttctataaaaattactggagaatttccaaaaatgcacgtccgaatgattcctcgtgcaaaatcaggaactcgttttgttgaagtaagtcagaaccaaccagaatatacagaagaaaatgttaaaggtactatcgtgggaatttggacacctgaaatgtttcacggtgtttctgtcgctggttatcatcttcattttattagtgaagattttacttttggtggacatgtactcgatttcattattgataatggtaccgtagaaattggggccattgaccaacttaatcaatcatttcctgttcaagatagaaaatttttatttgctgaccttgatatcgaagcattaaaaaaagatatagatgttgcagaataa

SEQ ID NO: 2920 - DNA, 1665 bp, Artificial Sequence
  Optimized genes for Lactococcus lactis
atgtcagaaaaacaatttggtgctaatttggtagtcgattctttgattaatcataaagtcaagtatgtctttggaattcccggggcaaaaatcgaccgtgtttttgatttacttgaaaatgaagaaggtccacaaatggttgtgactcgtcatgaacaaggagcagcttttatggctcaagcagtcgggcgactgacaggtgaacctggtgtcgttgttgtaacttctggaccaggtgtttccaatttagcaacaccacttttaactgctaccagtgagggagatgcaattctagccatcggtggacaagttaaacgttcagaccgcttgaagagagctcatcaatcaatggataatgctggtatgatgcagtctgcgacaaaatactcagcagaagttttagacccaaatacattaagtgaaagtatagcaaatgcttatcgtattgccaagagtggacatcctggagcgactttcttaagcatccctcaagatgtaacagatgctgaggtttctatcaaagcaattcaacctttgtcggatccaaaaatgggaaatgcttcaatagatgatatcaattatttggcacaagctataaaaaatgcagtattgccagtcattctcgtgggggcgggcgcatcagatgcgaaagtagccagctcacttcggaacctactcacgcacgttaatataccagttgttgaaaccttccaaggtgctggagtaatttcacatgatttggaacatacattttatggacgcattggtctgtttagaaatcaaccgggcgacatgcttttgaaaagaagcgaccttgttattgctgttggatatgatcctattgaatacgaagctcgtaattggaacgccgaaatcgattcaagaattatcgttatcgacaacgcaatcgctgaaattgatacttattatcaaccagaacgtgaacttattggcgatattgcagcaacgcttgataacctccttccagcagttcgtggttataaaattcctaaaggaactaaagattatttagatggacttcacgaagtagcagagcaacatgaatttgacactgaaaacacagaagaaggacgtatgcatccattagacttagtaagtaccttccaagaaattgtaaaagacgatgaaacagttactgttgacgttggttctctttatatttggatggcacgccattttaaatcttatgaaccacgtcacttgcttttttcaaatggaatgcaaactttaggagttgctttaccttgggctattacagctgctttgctccgacccggtaaaaaagtttatagtcattctggtgatggtggttttttatttactggtcaagaattagaaactgccgttcgacttaatctaccaattgttcaaattatttggaatgatggccattacgatatggtcaaatttcaggaggaaatgaaatatggtagaagtgcggccgtagattttggctacgttgattatgttaaatatgctgaagcaatgcgtgctaaaggttaccgtgctcactcaaaagaagaattggctgagattttaaaatcaattccagatacaacagggcctgtggtgattgatgttccgcttgactattctgataatattaaattagctgagaagctacttcctgaagaattctactaa

SEQ ID NO: 2921 - DNA, 1476 bp, Artificial Sequence
  Optimized genes for Lactococcus lactis
atgaaaactatattacaagcttttgagtggtacttgccaagtgattcacagcattggaataatataaaagagaatattcctgatttagggaaattaggtttttcaggactttggcttccaccggcaagcaaagcagcttcaggtgttgaagatgttggatacggaacttatgacctcttcgaccttggagaatttgatcaaaaaggaacaatccccacgaagtatggtacaaaagatgaataccttgatttgattaatacacttcaccataataatatcgaagtttacgcggatatcgtcttcaatcatatgatgggtgctgatgagacagaaacaattgaagcagatattaaagccgaggataaccatttacacaacattgaaaacaataaaacagttgaagtatggaccaaatttacttttccaggacgtcaaggtaaatatgataattatatttggacttggcataattttacagggattgattacgatgaaagaaaaaatcaagaagaaatcttggagtttgaaggtcacgaatgggatgaaaatgttgattctgaaaataacaactttgattatttgatgggagccgatttagatttttctgtaagcgaaacagtagaacagttggaaaaatggggacattggtttagtgaaatgactaaaattgatggtttccgtttggatgcaatcaaacatattgactttaaatactttgataaatggttagaacaaagagctaaacaattagaccgtaaactttttattgttggcgaatattggtctgatgatctcggcaagctggagtattatcttgaacaatcaagtgaccgcattcaactttttgacgttccacttcattttaatatgaaagaagcgtcgtccaccaatggtgaattcgatatgcgtactttatttgaccacacgctgacagcaagtcaacctgaattaagtgtgactttcgtcgataatcatgatactcaagaaggacaagcacttcaatcttggattccagcttggttcaaagaacatgcatattcattaattttactacggaaaaaagaaactcctactgttttttggggtgatctttatggaattccttcacacaatgtcaatcctgttggtgacaacttgcgaacaatgattgctttaagaaaggactcagaatttttgcgtgaaaatgattattttgatcatccagatattattggttggacaaatattttgaaaatagataataaggaatatgggctttcttgtattctaaccaacaaaaatggaggttcaaaatatatgattatcgataaagcttatgctggaaaagtttatatcgatttgtttggtcgtcatgaaattccaattactctcgaccaaaacggcggcgctgaattttatgttaatgacggttctgtgtcagtttgggttgacaaagaaattgtaagtaaaatcgaccaaatgaatttccaaaattaa

SEQ ID NO: 2922 - DNA, 645 bp, Artificial Sequence
  Optimized genes for Lactococcus lactis
atgcaagaaattattattcaagttatgaatcaatttggctattttggagtagctttccttatcatgattgaaaatatctttccaccaattccctcagaggtcattttaacttttggtggttttatgactacttattcagaacttgggattatcggaatgataatcgcagcaacaattggttctgtacttggtgctttaatactatactttgttggtagattactgtctgttgaacgtcttgaaaagttagtttctggtcgtttgggtaaagtattgcgattaaaacctgaagatattactaaagcagaaaaatggtttttgaaaagaggatatgccacgatttttttttgtcgctttattcctttgattcgtagtttaatcagtattccagcaggttcagctaaaatgaaacttccaagttttttaattttgacaaccctcggaacacttatttggaatattgttcttgtttgtttaggcgctgctttgggagataattgggaaatgattgctggaattcttgattcatacagctcagtcgtggtggttattttagggatcatttttatcttggcgattctcatattcgttaaaaaacgtttcttccctaagaacaaaaattattcttcggacacagaaaaataa

SEQ ID NO: 2923 - DNA, 1473 bp, Artificial Sequence
  Optimized genes for Lactococcus lactis
atggatgcagaaaataaaaaaggaattggtcttgctgctttggtagctattatcgtctccggagcgattgggggtggagtctttaatttaagtaatgatttggcaacaaatgcaagtcctggtggtgtcgtgatttcttggattgtcattggcttcggcatcttaatgttggttctttctttaaatcatttagtggtaaacaaaccagaattgagcggggtttctgactacgctcgagctggatttggaaatatggttggctttatttctggatggggttattggttatcggcttgggcaggtaatattgcttttgctgttctgatgatgacttcagttgattatttttttcctggagttttccaagcaaaaaatggttctcttacaattttgagtgttattgttgtttcgattgtttcatggggattgacattactcgttatgcgtggtgttgaaggtgctgcggccattaatgctatagttttagtagcaaagttaattccacttttcgtattcgtgatagctggtatcgtgactttcaaagcaggggtattttcagctcacttttggcaaaattttgttgctaatactaacgctgacggtgtaattaaatcactgacttggtcaaacatgacaggaggagatttatttagtcaagttaaagggagtttgatggtcatgatttgggtttttgtggggattgaaggagctgcaatgatgggtgacagagctaaacgtaaatctgatgcgggaaaagcttcaattctcggcttgatagccctgctagtaatttatattttactctcactattacccttcggttttatgtcacaacaagaattagcaaatacaggtcaaccaggattagttcatattcttaacgccatggttggaggttggggaggctctttgatggcaattggacttgtaatcagtttattaggagcatggttatcttggacaatgcttcctgttgaggcgacccagcagctttcagaacaaaaattgcttccaagctggtttggtaaattaaacgataaaggtgcaccaaaaaattcacttcttttgactcaattaatcgttcaaatttttttgattgttacttatttcgtcgctgatgcttataatgtttttgtttacctttgtacagccgtaatcatgatttgttacgcccttgttggtttgtatctttttaaacttggtattcaagaaaaaaaaacatcaaatatcattattggttttatcgcggcagcatttcaaatcttggctctttattattcaggttggcaatttgtttggcttagtcttatcctctacgcagtcggattcattttatatgctctaggcaagaaagaatatggtactaaaatgagcacggctgaacttattgcaacttttgtattaacggttttgggaatacttgcagtttttggtgtttatgggaattggctagcccgctgcacctggaattaa

SEQ ID NO: 2924 - DNA, 1131 bp, Artificial Sequence
  Optimized genes for Lactococcus lactis
atggaattggttcaatttggttgtgaagattggttgaatgtttgggaaaaatcagcaacaattgatattgctcaaagtaccatagactcgctctctcttgaagaagttcttgcatttgaggaagacaacggtgaagcttttatgagtcaaatgatgaaagaaaaattctcatacggatggattgaaggttcacctgcctttaaaagcgaagtggcaaaattatataaacgtgtaccagaagataatattctaagcacaaatggtgcgacgggcgcaaattttttgactatcttgggattaattggacaaggagatcacgtgattgcgcaatatccaagttatcaacaactttatgactggccaaaaacacttggtgcacaagttgattattggcatattaaagaagaaaataactggttaccacaaattgaggaactgcgcagacttgtaaaatctaatacaaagttgatctgtttaaataatgcagcccagcctactggagcaatcatgtctcctaaatttttatcagaagtcgtagaaatcgctcgttcagtcgacgcttatattctttgtgatgaggtttatcttccgcttgatgaagaaacaccttattctccaattgctgatctatatgaaaaaggtatctcaactaactcaatttcaaaaacttattcagttcctggaattcgcgtcggttgggtagccacacaagaccgtgatttgtgtaatgaatttcgtaaaatacgagattacacactcatctgcactggtgtttttgatgatgctgttgctgctttagtattaaaacataaagataaagttttagagcgggcaagaaaaattgttaaagggaatttatccatattaaaggaatgggttgaaaacgaaccactcgtctcaatggtttaccccaatgctgtgagtgtttcttttgttaagtttgaagaacttgacccaacaaaaaccgaggattttgctattcaattattaagagaaaaaggagtattgattattccaggaaatcgtttcgatttaagtgggtatgctcgaattggttactgtactgatgaaactactttgcgtcaaggcttgaaacttttatctgaattccttcgtgaatatcaggtttaa

SEQ ID NO: 2925 - DNA, 1023 bp, Artificial Sequence
  Optimized genes for Lactococcus lactis
atgacttttaaagaactttctaataaaatcaatattaaagatgtccgtgaactcaatcatttaaatgatgagcaacaagaaaaaaaagagaaacgtgataaggaattagaagcaattatcaaaggtgaagatgacagaattttattagtaattggtccttgttcttctgataatgaagctgcggtccttgaatatgcccaccgtttgctaaaacttcaaaaagaagtggaggataaaatttttattgttatgcgtgtttatacggctaaaccaagaaccaacggagatggctacaaaggacttattcatgaaccagatgcagatggtcatactgacttaattaatgggataaaaatggttagagatttgcattataaagttattactgaaactggtttgacaactgctgatgaaatgctttatccagaaaacctaccgttggttgatgatttagtttcttactatgctgttggtgcacgttcagtagaaaatcaacaacaccgattcgtcgcctcaggaattgatgctccaacaggaatgaaaaatcccacctccggaaatttaaaagtaatgtttaatggcatgtatgcagctcaacagagtcaagattttttatttggtaatgctgaagttgaaacaagtgggaatcctttggctcacgcaatcctgcggggcggtcaagacgaaaatggaaagaaccatccaaattattatacagataacttacttgagagcatagagatttatgaaaaaatgggactccaaaatccttttatcgtaatcgacacaaatcatgataattcaggtaaaaagtatatggaacaaattcgaattgtgcgtcaaactcttgttaaccgtaattgggatgaacaaatccataaatatgttcgcggtttcatgattgaatcatacttggaagacggacgccaggacaaacctgaagtttttggaaaatcaattacagacccatgtcttggttgggataaaacagaagaattgattaacgaaatttacaatagttaa

SEQ ID NO: 2926 - DNA, 564 bp, Artificial Sequence
  Optimized genes for Lactococcus lactis
atggaattccgtttggcaaaaaaatctgatgctaaacgtttacttgaaatttacaaaccttacgtagaaaaaacagctatcacttttgaatatgaagttccaacaattgctgaatttgaaaagagaatcgagaaaatcggttcaagatatccttatattgtggcgattgaaaatgataaaataattggatatgcatatgctggtgcttaccgtgaacgcgctgcttatgactgggttgttgaactttcaatttatcttgatgaaaacgaacgtcaacacggagcagggtctgcgctttatcaaaaactcctgacagcactaagcgtcttgaattatcagcgtgcctatgcctgtattacttatcccaatccagcttcagtagctttccataaaaagtttggttttgaacaaattggcttatttccaaaagcaggttataaatttgagcaatggtacggaattgtttggttagagcgaagtcttcaaacaactgacaaagttaccgcaattaaattgttgactgatttaagtgaaaatgaattagaaaaaattttagcaaattaa

SEQ ID NO: 2927 - DNA, 1023 bp, Artificial Sequence
  Optimized genes for Lactococcus lactis
atggcaatcaatttagattgggaaaatcttggattttcataccgtaacctacctttccgttatattgctcgtttcaaagatggtaaatggtcagctggagaattgacaggtgacaatcaattgcatatttcagaatcaagtccagctttgcactacggtcaacaaggttttgaaggattaaaagcttatcgaaccaaagatggatcaattcaactttttagacctgaccaaaacgctgcccgccttcaaaatactgcaagacgtctttgtatggctgaggtcccgactgaaatgtttattgacgccgtgaaacaagttgttaaggctaatgaagattttgtaccaccttatggtacaggggcgactttataccttcgtccactcctgatcggtgtcggagatgtcattggtgttaaacctgccgatgaatatatttttacagtttttgctatgccagttgggtcttattttaaaggtggacttgctccttctaaatttgttataagccgtgattatgatcgggcagctccattaggaactggtggtgcaaaagtaggcggaaattatgccgcctcgttgcaggcagaagtgggggctaaagcaagcggttatgctgatgctatttatcttgaccctagtactcatacaaaaattgaagaagttggagcggcaaatttctttggaattacggcagataatgaatttatcacaccactttcaccaagtattttaccctctattactaaatattcactactttatttggctgaacatagactcggcttgaaagcgattgagggtgaagtttatgcaaaggatttaggaaaattcgttgaggctggtgcttgtggaaccgcagcaattatatctccaattggacgaattgatgatggcgaagacagttacatctttcattctgaaacagaagtaggcccaacagtaaaacgtttatatgacgaattagtaggtatccaatttggtgatgttgaagcaccagaaggttggattgttaaagttgattaa

SEQ ID NO: 2928 - DNA, 1053 bp, Artificial Sequence
  Optimized genes for Lactococcus lactis
atgaaaaaacgtgttatcgctgtatcagctttggctttagcaagcgtggcagttttggcgggttgtagaagtcatgatgctgctggaagtggaaaagctaaaactgatttaaaagctgcaattgtgactgagataggcggcgtcaatgatcgctcatttaatcaatccgcttgggaaggactccagtcttggggaaaagaaaataacctgaaaaaagggacgggttacacttatttccaatcaaatagtgcttcagattatacaacaaattataattctgctgaacaacaaggatacaaattactttttggtacaggtttttcacttcaagacgcgacaagcgccgcagctaaaaataatcctaaatctaattttgtgattgttgattctgtcattaaggaccaaaaaaatgttgcttctgcaacattcgccgataatgaatcagcttatcttgctggggttgccgctgctaaggcaactaaaaccaataaaattggatttattggtggaatgcaaagtgatgtcatcactcgttttgaaaaaggttatgaagcaggtgcaaaaagtgttaatccagatatcaaagttgacgttcaatatgctgggagtttctcagacgcagcaaaaggaaagacaattgcagcggcaatgtatggtgctggtgatgatgttgtttatcaatgtgccggtggtgtaggaactggtgttttttctgaggctaaagcgctaaactcgaccaagaacgaagctgataaagtatgggttattggcgtagaccaagatcaagaatatttgggcaaatataaatcaaaagacggtaaagatagcaactttgttttagtttcaacaataaaagaagttggaaatgtcgttaaagatattgctgacaaaacaaaagatggtaaatttccaggaggaacaatcgttacttacgatttgaaaaacggtggggtaaatttaggacttgattcagcaaattcagaaattaaagatgcagtagcgaaggccaaagcagatattattgatggaaagattactgttccttctaaataa

SEQ ID NO: 2929 - DNA, 1503 bp, Artificial Sequence
  Optimized genes for Lactococcus lactis
atgaatcaattaatatctactttccaaagtcaacaaggacaattttggcaagctcttttagaacatattcaaatttctttgattagtatctttattgccattcttatctcaattccacttgctttgttattaagacgacttcctaaaattgctgaaccagttcttcaagtgacaggtatttttcaaacaatccccagtcttgctttactaggacttttaattccttttataggaattggttctcttccagcgattgtcgccttagttgtttatgcaatttttccaattgttcaaaacacctacactggtttggaacaaattgagccgtccctcatcgaagcagcaacagcttttggaatgaaccgtcgtgaacgtttgatgaaatttgaattaagcctcgcaatgcattttatcatggcagggattagaacttcaacagttatggttattgggacagcaactttagctgcccttattggtgctggaggcttaggtaactttatactattaggaattaatatgaatgatgtttctttaattttaatcggtgcaatctcaagtgcgctgttggctattattttctcatctctactcaaatttcttgaaaaagcaaaaataaaaactattttgatttcattttttattggattgcttgtccttggtggttcatattatcgtcctcagacttctaatcatccacaaatcacgattgcaggtaaacttggagcggagcctgatgtattgatcaacatgtataaattaatgattgaaaaagattctaatattcgtgtaaatttaaaatctaattttggtgacacaacttttttatacaatgctttaaaagctggcaaaattgatttgtacccagaatttacaggaacaattacatcgacgttcttgaaagatccagtgagttcaaccgacccaaatgtggtttggcaaaaagccgaagaaggaatcaaaaaattgaatcagtttacttatttgagtccaatgaaattccaagatacctatgccattgcggtaaaaagcgattttgctaaagagcaccaacttacaaaaatttcagatttagcaaatgtaagtggcttgactgctggttttgacgttgaattcgctaatcgttctgatggaaatatcggcctgcgcaagctttatggtttagacttgaacgtcaaaacaatgcaaaattcattgatttataaggcacttaacagcggagcagttaatgttgctgaagtttacagcacagattcacagattaaacaatataatctcactgttttaaaggatgataaaaatcttttcccaccttatcaagcagctcctctgatgaaagaatcacttttgaaaaaatatcctgaacttaaaaagatattaaataaactatcaggtaagattactgaccaagaaatgattgaaatgaattatgatgtcaatgttaaacaagaagatgctgctaaagtagcagaacggtatcttaaatcaaaagggctcatctaa

SEQ ID NO: 2930 - DNA, 1041 bp, Artificial Sequence
  Optimized genes for Lactococcus lactis
atgcttattcatcgtaaagaatgggataaatttttgacagatttacacttgaatgtcagtaactcttcagaaatcgaaacgattgatgaaactgttgcaatctttgctaaaaatggtgaagttttagccacaggttcaatagccggcaacgtaattaaatatgtggccacttgtactaaaggcgagcagtctgctggtgagcgctttaataaaattatcactgaattgatgaaccgtttggctcaaaagggaatctaccatgtatttgtgttcacaaaaccaatgtatgcaaaatcatttggttatcttggtttcaaagaattagctcgtgctgaacaaggagttttgttagaaaaaggacgtcctaatattactgacttcctcagcagcctaacagagaaaaaattagtaccagctggagcaaagaagattgcagcagtcgttatgaatgctaatccttttactttaggacattgttaccttgttgaacaagcagctgcagaaaatgattttgtttatgtttttgtagtttcgaccgaccgttcactttttagagcagatgaacgtcttgatttggttaaaaaggggttgtcagcacttacgaatgtttcagttgtttctggtggagattacctagtgagttttgcaactttccctgcttattttattcaaagtgacgaagaagtcatggatttccaaacacaaattgatgctcgaatttttaaaaattggtttgtcgaagcactcggaattacaacacgttatttaggggccgaaccattttctaaaactacttcaatttataatcaacaattaacagaagtactgtctgatgttattgacgtaaaaattattgaaagaaaaaaagctgatgataatgaagaaattattagtgcgacagctgttcgggcggcgattgctaccaaccaacttgaaaaaataagaaattttgttccagaaacaacttttgaatttatcgagcagcatttacaagaacttcaagctcgaatcaaaggtggtcaaaaaacaaatggaaattaa

SEQ ID NO: 2931 - DNA, 291 bp, Artificial Sequence
  Optimized genes for Lactococcus lactis
atggaaattaagcagcatgcgcttgctggaactcttgaaagttcagacgttcaaatcatgattgcaccagcaaataatggaatttcaattgacttgatttctgatgttaaaaaacaatttggtaaacaaattgaagcaacagttcgtcaagttttagctgcttatgcaatcgaaaatgctgatgtacaagtaattgataaaggtgctttagatttagtcatcaaagcaagagcgattgctgtggttgaacgtgccatagaggctaaagatttgaactgggaagttctctaa

SEQ ID NO: 2932 - DNA, 915 bp, Artificial Sequence
  Optimized genes for Lactococcus lactis
atggcagtagctgaaagattgcgtcgtacaatgatgtttgttcctggtaataatccagctatgattaaagacgcagggatttttgaagctgacagtatcatgttcgatttagaagatgctgtttctttagcagaaaaagatgcagcacgcgtgcttgtttatgaagcagttaaaaatattgattttggtggtgctgaactggttgttagaattaatggcctagatacaccattttggcaaaaggatgttcgcgcaatggtcaaagcaggaatcgaagtaattcgggctccaaaagtagaaaccgccgcgatgatggaagagcttgaagttgaaattgaaaaggccgagaaggaatttggaatagaagtcggaacaactcacgtgatggctgcgttggaatcagctttgggcgtcatgaatgctttagagattgctcgttcttgtcctgaacgtatgatgggtatcgccttatcgggaatggattatcgtgttgatatgaaaacaaaaagttacccggacgaaggcgaactttattttgctcgaaatatggttttgcatgcagcccgagctgctggtgtcgcggcttttgatactgttttcgggaacgtagatgatgaagaaggatttgtaaaaggagttgaattaattcatcaacttggtttcgacggtaaatcagttatcaacccacgtcaaattcctctcgtcaataaagtttacgcacccactaaaaaagaagtggttcatgctcaacaagttatggaagcaattgaagaagctaaacaaaaaggttcaggtgtaataagcctcaacggacaaatggttgaccgtccaattgttttacaggcggagagagtattgatgcttgcaaaagctgcaaatgttcttgatgaaggtggaaattatattgaaaaataa

SEQ ID NO: 2933 - DNA, 1539 bp, Artificial Sequence
  Optimized genes for Lactococcus lactis
atgaaaaacaaggttaatagagaattacctgacgaaattttgaaaacaacaggctataaaccatttgaatctgttgaagttaaagatttagtgattgaacgtgtttctgctaaagtaaggcagagcgtcaagccaaataagcttgttgattctctcgaagaagtagtcctgaaaactgttaaggatggcatgactatcagtttccaccatcattttcgcgaaggagattatgttttcaacaaggtcatgcgaatcattatcgaccatggattcaaagatttaagaattgccccaagttccctaacaaatgttatgaatgatattttagtggaagcaatagaaaaaggtgttgttaccaacattacttcaagtggaatgcgtggaacactcggtgatgttgttagtcatggtgctttaaaaaatccagtaatttttcgttcacatgggggaagagctcgtgcgattgaaacaggtgaaattcatattgatgtagcttttttaggcacgcctaacgccgatgaaatgggtaatgcaaatggaatggatggaaaagctccttttggttctttgggttatgctttgatggatgctcaatatgcagatacagttgtggcaatcactgattcactcgtgagctatcctaatacgccagcaagcattaaacaaacacaagttgattacgtggttaaaatagatgcagtaggaaatcctgataagattggagctggtgcaacacgctttactaaagacccaaaagaacttaaaatcgcttcaatggtaaatgacgtaattgttaactcaccttattttaaaaatggttttagtttccaaactggaactggtggtgctgctcttgcggttactcgttttcttcgtcaatcaatgattgaccacaatgtaaaagcaacttttggattaggagggattacaaaaccaatggttgaccttcttgaagaaggtcttgtcgataaattaatggacgttcaagattttgatggcgggtctgcacaaagtatgcacttaaacaaaaatcaacaagaaatagatgcgtcttggtacgctgatccagctaataaaggagcaatggttgataaacttgatgtcgtaatactttcagcacttgagattgatactaaatttaatgtcaatgttatgtcaggttcagacggagttattcgtggtgccattggtggacatcaagacgccgggacagcaaaattaaccattatttcagctccgctagtaagaggccgaattgctacggttgtaccagatgtgactaccgttatcacaccaggtgactcaattgatgttttggttacagaaatcggaattgcaattaatcccaaacgtactgacttacttgacaaattgtctaatattcctggtttaccagtttatacaattgaggagttgcaaaaaattgctgaagaaaaacttggtaaacctgaaccattggaatttacagataaagttgtcgcgctgatcgaataccgtgatggttcgttgttggatatcatccgggaggtcaaagattaa

SEQ ID NO: 2934 - DNA, 663 bp, Artificial Sequence
  Optimized genes for Lactococcus lactis
atgaaaaaaattcaaattgctattgatggcccagcttcatctggtaaaagtaccgtagcgaagattattgcaagaaacctggacttgatttatttagatactggtgccatgtatcgtgttgcaacttttgttgccctacagaaagaaactgatgatgcaaaagaaatcattgaatttattgaaaaaaatccaatttcatttatgaatggtcaaaaaggacaagaagttttgatgggttctgaaaatgtaacagaagtgatcagaacaaatgaagtaaccaatactgtcagtaagatatcggcaatgactgaaattcgtgaattcatggttgctgaacaacaacgtatcgctaaaaacggtggaattatcatggacggacgtgatattggaacagttgttttacctaaagcagaccttaaaatattccttgtcgcttctgttgatgaaagagcagaacgtcgttacaaagaaaatctttcaaaagggattccaacagatttagagcgattaaaaattgagatatcagaacgcgaccgtaaagattcaacacgggcgattagtcctttgaaacaagctgaggatgctatcctccttgatagcacgggaaaaacaattaatgaaattgttcaatttatcgaagataaagctaaggaattaatgtaa

SEQ ID NO: 2935 - DNA, 609 bp, Artificial Sequence
  Optimized genes for Lactococcus lactis
atgaaagaaatttatgataaaattcaagacattaatattattcttaaaagaagttttattgatttaggaaaacctttggcttatcaagaagtggttgaaaaatcagcaaaagtactagaaagttcactttttatcatagatacaaaacgtaactgtttggggtacggctttacagattcagataattcatatcaagatgatatcaatcttcaaaattttttcatctaccaaaaaataagtaaagatatttcaagccagctgctcaaccactatgaaatgtcagccagtttaccaatggctcaatcaattttggagcccgtcaaggagatttcttcgaaatttccaaataaattcttgtcttttttgccaattgaaggaaatcatttacgcttaggtacactctttttattgactgactcccctttagaagaagaaaagagaattttagttgattttctttcaactttcattggtaatcaaatgtcttatatcatgcttgctgaacttgaaggtcaacgtcgtaatgaaacttttgtttctcttgttcaatctctaagccgaagtgaattagaagcatttaaatctattatcgaaaaaattgaccgttaa

SEQ ID NO: 2936 - DNA, 432 bp, Artificial Sequence
  Optimized genes for Lactococcus lactis
atgattagaattaaaatgaaaaatgaaattttgatgactaaagcatttacacttttagaatctttgctcgtgcttttaattatttcatttatcacaactttattctcacttgaaatcattcaaaccattcatttgtttaaaggtgaattatttgttttacaatttgaaaatttttataaacgttcacaagaagatgctgccctcttgcagaaatcagaaagcctggtcgctaaaaatcaagaattgatttgtgaagaccgttctataacaattcctaaagaagttgcagttaaagattttacggtaaaatttgatgataaaggagaaaactcaagtcttcaaaaacttacaatcagtttaccatacgaaaaaaagttcattacttatcaacttgagatcggctctggtaaattcaaaaagaaaattagttaa

SEQ ID NO: 2937 - DNA, 594 bp, Artificial Sequence
  Optimized genes for Lactococcus lactis
atgactgataatttctttgaaaaaacacttgctgcaagagaaattagtcaaattccaggaatgcttgaatttgatattcctgttcacggtgacaaccgtggttggtttaaagaaaattttcaaaaagagaaaatgatgccactcggcttccctgaaagtttttttgctgaagaaaaattacaaaataatgtttcattttctcgaaagaacgtactgcgcgggcttcatgcggagccttgggataagtatatttcagtcgccgacggtggaagtgtgttaggagcttgggttgatttacgtgaaggtgaaaactttggtcatgtttatcagactgtcattgatgcttcaaaaggtatctttgttccacgtggagtggcaaatggattccaagttttgagcgatacagtatcttattcatacttggtcaatgattattgggcattagaacttaaaccaaaatacgcctttgtaaattatgctgacccgacccttggcataaaatgggaagacgttgaaaatgcagaagtttctgaagctgataaaaatcatccactattgaaagatgttaaagctttaaaagcagatgaattgtaa

SEQ ID NO: 2938 - DNA, 198 bp, Artificial Sequence
  Optimized genes for Lactococcus lactis
atggctcaaggaactgttaaatggtttaacgccacaaaaggtttcggcttcattaccacagaagaaggaaatgatgtttttgctcatttttcagcaatccaaactgacggatttaaaacattagatgaaggtcaaaaggtaacttttgatgttgaagatggtcctcgtggtccacaagcagtcaatattcaaaaataa

SEQ ID NO: 2939 - DNA, 1410 bp, Artificial Sequence
  Optimized genes for Lactococcus lactis
atgggttttatgcgtaaggctgactttgaactttatcgtgacgctgataaacattataatcaagttttaacaacccgagattttttagcacttggagttggtacaattatcagtacatcaatttttacattgccgggtcaagtagcagctcaatttgctggtcctggagtagtcttttcttatttgcttgcagcgcttgttgccggctttgtagctctagcctacgcagaaatgagtactgttatgccatttgcaggatctgcctattcttggatatccgttctttttggtgaaggatttggatggattgctggctgggctttgttagctgaatatttcattgctgttgcttttgttggcagcggcttttcagctaaccttcaacaattattggcgcctttaggatttcatcttccaaaagtactggccaatccattcgggactgacggtggtgtggttgatattatttcactattagttattctactctctgctatcatcgtatttagaggagcttcagatgctgggcgcatttctcaaattttggttgtattgaaagttgcagcagtcattgcatttattattgttggaataacggtgattaaaccagcaaattatcatccatttattccaccacataatcctaaaactggtttcggtggattctcaggaatttggtcaggtgtatcaatgattttcttggcttatattgggtttgattctatcgcggcaaactcagcagaggctaaaaaacctcaaaaaacaatgcctcgtggtatcattggtagcttacttatcgcagttgtcttgttcgcggcagtaacacttgtccttgtgggaatgcacccttatagcgcttatgcaggtaacgctgctccagtcggttgggcattacaacagtctggttatagtgttttgagtgaagttgttactgcaattgcgctcgccggtatgtttatcgctcttttgggaatggttctggcaggctctcgtttattatacgcttttggtcgtgatggactcttacctaaggggctgggtaaaatgaatgctagaaatttaccggctaatggtgtttggacattagcgattgtggcaatcgttatcggtgctttctttccttttgcctttttggcacaacttattagtgctggaactttgattgccttcatgttcgtcacccttggtatttactcacttcggcgtcgtcaaggaaaagatttaccagaagcaacttataaaatgcccttttatccagttttgccagctttaggtttcattggaagtttatttgttttttggggacttgatgttcaagcaaaactttactcgggcatatggtttctcatagggattttaatttattttgcttacggaaatcgacgctcaagaaaatcagaagaaaaataa

SEQ ID NO: 2940 - DNA, 456 bp, Artificial Sequence
  Optimized genes for Lactococcus lactis
atggctggtcaaaaaaatacttctgatatcatcgaagcttatttgagaaaattacttgaagaagcacaagttattgaaattaagcgggcagatttagcaaatcaatttgatgttgtgccaagtcaaattaattatgttataaaaacaagattcaccgcgtctaaaggttttgacgttgaaagcaagcgaggcggtgggggttatattaaaattgtaaaatatcaatattcagctcgtcatgaatttttaacagctttataccagaaagttccagccaatcttagttcaaaagctgctcacgatattgttcaacttctttttgatgaaaaagtattgacagaacgtgaaggaaatttactcctactggtcattactgacggagcaatttcaccttttactcgtggaatcatgatgaaatcaattattaaccgcttggaccgtgatgatgagatctaa

SEQ ID NO: 2941 - DNA, 1347 bp, Artificial Sequence
  Optimized genes for Lactococcus lactis
atgaaaatttataatacttattcacgtcaacttgaagatttccaaccaattgaaccaggtaaagttaaaatgtatgtttgtggaccaacagtctacaattacatccacgttggtaatgcacgttcagtagtcgcttttgatttggtacgaaaatatctagagttccgtggttttgaagttcaatatatcagtaactttactgatgtagatgacaaaattattaatggtgctaaggcagcaaatatgacaaccaccgacttttcagaacgttatattgcagctttctatgaagacactgacgcacttaacgtgaaacgtgcttcacaaaatcctaaagcaacagaatttatcgaagcgatgattgaatttattcaagaacttgttgataaagagtttgcctacgtaagtcaaggagatgtttattttagagtttctaagtcgaaggattatgctaagttagccaacaaaaatttagcagatctcctcgctggtgccagcggcagaacagatgaagaaacaaaattaaaagaaagtcccgctgacttcgcgctttggaaatcagcaaaagctgacgaagtatcttggcaagcaccttggggagcaggacgtcctggttggcatattgaatgtagtgttatgtctacttcactgttgggcgagacaattgatattcatggtggtggagctgatttagaatttccacatcatacaaatgaaatagctcaatctgaggctaaaacaggtcaaaaattcgtaaactattggatgcacaatggtttcgtcaatgttgacggtgaaaaaatgtcaaaatctctagggaattttacaacagttcatgaattacttcaagttgttaacccacaaattttaagattttttttagcgacaactcattaccgtcgtccagttaatttcacggatgatgctttgactgaagcagaaaataatatcaaaaaaatcgaaaatgcttatcgtcatttagatgaacaagctgaatcaaatttgtccgccttaacgacttttagaaatgattttgttgctgctatggatgaggattttaatattgctaacggaatgactgttttttatgattttgtgagctgggtaaataaaggaaatggaggacctgaagtcaaagaattctttgaccaagtcttggaaattttgggaattaaatttaaatttgaacagtcacttgattctgaaattgaggcaatgatagaagcacgccagcttgctcgagaagttcgggactttgctaaaagtgatgaaatccgtgatgcattgaaagcccaagggattgttcttgaagatactaaagatggcgtgcgctggcaccgagaataa

SEQ ID NO: 2942 - DNA, 1308 bp, Artificial Sequence
  Optimized genes for Lactococcus lactis
atgaaaaaaattgctattattttttgctcatttttaatcagcctcagtgttttatctgatttttcagtttctgcagcaacaactccaacaacgaacgactttacagttgctgccaaatcagcgattgcaatcgatgcaagctcaggtaaaatactttatgcacaaaattcagatgatgcttctacaagaatagcatccatcaccaaacttctgactgcttatcttgtttacaaaaatgttgccgaaaataaattgacttggaacactaaagtaccaattagtgattatgcttacgaattaactcaaaattctaatgcttcaaatattccacttgctcaaaacggtcaatatactgttaaagatttgttgaatgcacttttgcttccttcagcaaatagcgctgctgttgctttagcagaaaaaattgccggcagtgaaccaaaatttgtcgatatgatgactaaacaaatgaaagactggggaattacagatagtcatttggttaacgcctctggtttacctaatgatgatttaaatggacatatttatcctgggagtggagcttcggcaactaatacaatgagtgcaaaagcagtggccactttgtcttatcatttaattcaagattttccagaaattttacaaatcacaaagaagacagaaattccatttgatactggaaatgaagctaaaatgacattaaccaacacaaatcaaatgctttcaggattttcgacatctcgcacaggtgttgatggcttgaaaacagggtcaactagttttcaaattgattgttttgctggaacaacaaaccaaaatggtttccgtattatcacggttgttcttgaagcaaccgacccagcagctgataatagtacaccattcacgttgacaaatcagttgatgaattatgtttatggtcactggcgaactacttctctcgttcaaaaaaatcagagccttgatgacttcaaagaaatcactgtcattgacggaaaagagaagtcagtacaacttgtcgctccacaaaacattactccggtggttccttatgcgactgacggttcagctgacacaaaaagtctgacggtcaaattctcaaaagaaaaaactgcgtctgttgaagcgaccgtaactaagaatcaaaaattagtgactttatcaacaaccgtaaaggattcacttggttacctacccaattgtacagctgaacaaattcctttagtagctaaaaaaacagttccacgttcatctgctcctaaagttttttggaatcattttgtaaattttgttaatgagaaactctaa

SEQ ID NO: 2943 - DNA, 747 bp, Artificial Sequence
  Optimized genes for Lactococcus lactis
atgaaacgtcgtatcacattctcgcttattgttttagtacttttgattattggtgccctcggctttattttaattacaaatgataaatcaaactcaactaatgaatcagctaaaaaaacttctataagctcttctaaagaagttgcaaaaaagaaagaccttcctgatgctaagcaatctgactgggatttagtcctagtgagccgcaaatctcctaaagatgaaatgaacccaacattggctacggtcaacggaattcaagttgatcaaagaattgcctcagcagtacagcaatttttagcggctgctcaacaaattagtcctgctgaacatcttataagtggctaccgaagtgtttcttatcaagaaggattataccaaagttatgttcaagcagagatgaatggtcaaggaacagttaattcatccggaaatccaatctcagaagaagaagcaatcaaaaatgttcagacttattcacaacctccacgttcatctgagcatcaaacagggctggcgattgatatgtcaaatattgacagcttaaatgaaagtcaatatgctaaacaagtagcagcaattgctcccaaatatggttttgttttgcgttttccagaaggtaaaaaagcagaaactggtatcggttatgaagattggcattttagatacgtgggacttgaaaatgctaagtatatgactgaacacaatttgaccctcgaggaatatttgaaattacttccagcttaa

SEQ ID NO: 2944 - DNA, 240 bp, Artificial Sequence
  Optimized genes for Lactococcus lactis
atgaaagaacaaatttttgacatcattgaaacagtaagtggcactgatgagttccgcgaagatttagatatggatttgtttgaagaaggtatattggattcaatgcgtgcaatcatgcttattgttgaacttgaaggagcttttgatatttctttaccaccttcagaaatggaccgtgaagactggaatacagcaaacaaaattgctgccagagttcaagaaaaaaaagatgaaaattaa

SEQ ID NO: 2945 - DNA, 1659 bp, Artificial Sequence
  Optimized genes for Lactococcus lactis
atggcatatcaagcgctttatagaaaatatcgttctcaacgttttgacgaaatggttggacaggaagtagtcgctacaacgctaaaaaatgcaattgttaatcatcaaatttctcacgcttatcttttcagcggcccccgaggcacagggaaaacttctgccgccaagatttttgcaaaagcaatcaattgcccaaatcaagtagatggagagccatgtaataattgttttatttgtgattctataaccaaaggaagccttgatgatgtgattgaattggatgctgcttcaaataacggtgttgatgaaatccgtgaaattcgtgacaaatctacctatgcagctagtcaagcaacctacaaagtttatattatcgatgaagttcatatgctttcaactggtgcatttaatgctttacttaaaacattagaagaaccaacagaaaatgtcgtctttgttttagcgacaactgagcttcaaaaaattccagcaacaattattagtagagtacaaagattcgcttttaaatcaattactacgggtgatattcgcacttacctggctaaaatcatggctgatgaaggcttggaatttgatggtaaagccttagatgtcattgccaaggctgccgaaggtggaatgagagatgcattgagcttgcttgaccaagctctttccttttcatcaggaaaacttgaagaaaatgacgcactattggtaacaggttcaatcgcggccgacgccctcgtgacttatgttgcagcactttttgaacatgatgaggctaaagcaatgactgaacttgataaaatattcgcagaaggaaagaatatgctccgcttcactgaagacctgttagcttacttacgtgatttattactagataaaaattcacaatatgaccgtggacaaattttctcatggattgatgttgctatcgaaagtttaaaaaccattaaagaaacaacacaaactaaaattgctgcagatgttatgacaatgcgtttggcagagattggtcaaaataatcttcttacggcgtcgcaaggtgaaattcctaatcaacttactgctgaaattgctactttgaaaacagaaatcaaccagttgaaagctcaaatctctgctggtcaaattcaagttaactctgatagtcagaataatctcttgacagagaatgttaaagcttctcctaaacctattgcaagtaaaaaacgtcaaataaataaagatttgatttataaagcgcttgctgaagcaacaaatgaagctcgtaaagctgctttatcagcttggcctgaattagtcgcatcagttacaaaaccagctgaccgggcattactgaacaatacagctcctgtagcggcctctgaaaattttttagttgttacttttccacatgaaaatttggctaagcgagtatcagaaaacgaagagttacaattattttgtgggaacttgttgtcaagtatcgttggttttgctccagaaataatttcattagctgaacaagattggcaagaagttcgtgcagaatatgtgagtaatttaaagagtgaaaacgttcaagaagatgaagaagatgaaaaagagccggacgaaactgtgaaccttgcaaaagaactctttggagaaaaagtagttgaaattaatgattaa

SEQ ID NO: 2946 - DNA, 447 bp, Artificial Sequence
  Optimized genes for Lactococcus lactis
atgtcaaatgaacatacacaagaagttttaaatcaaactgtagctgatttaagcaaagcttcagcactcgttcatcaaattcattggtaccttcgtggtcctggttttctatatcttcatccaaaaatggatgaattaaaagaccaattagatgaacacttggacgaattcgcggagagactgatcaccatagggggatctcctgtatcaacattagcagaatttgataaaaattctaaaatcgaaatgactccagcagtttggggaaagagtaacagtgaacgtgttaaagaattgattgttgcttataaatatttgactcaactttttaaagatggaattaaaattgccggagatgatggtgacgatgttacggtcgacctttatacaactgctttgggtgatattgaaaaaacactttggatgattgaagctgaggtgggctaa

SEQ ID NO: 2947 - DNA, 558 bp, Artificial Sequence
  Optimized genes for Lactococcus lactis
atggttcttgctaaagatttaaaatcaggaatgactttcttaaatggtgaaaaattgctccgagtcatggaagcttctcaccataaaccaggtaaaggaaatacaatcatgcgtatgaaactgaaggacgttcgtagcggctctacttttgatgatacttatcgccctgaagataaatttgaacaagcagtcattgaaacggtgactgctcaatatttatactcaatggacggcattgcaaactttatgaataatgaaacctacgagcagtatgaaattccagttgagcaagtaaaagatgaacttctttatgttttagaaaatactgatgttaaaattcaattttatggtacagaagtaataggaattcaacttccaacaacagttgttttggaagttactgaaacacaaccaagtattaaaggtgcgaccgtaacaggttcagggaaacctgccacaatggaaactggtttggtggtaaatgttcctgattttgttgaagcaggaacaaaattagagatcaacactcaaacaggagaatatctaaagagagcttaa

SEQ ID NO: 2948 - DNA, 1302 bp, Artificial Sequence
  Optimized genes for Lactococcus lactis
atgtcaattattactgatatttatgcaagagaagttttagacagcagaggaaatcctactttggaagttgaagtctatactgaagatggtgcttttggtcgtggaatggttccttctggtgcaagcacgggcgaacatgaagcagtagaattacgtgatggcgataaatcacgttataacggtttgggaactcaaaaagcggttgataatgttaataatatcattgctgaagctatcatcggttatgaagtaactgaccaacaagcaattgatcgagcaatgattgctttagatggcactgaaaataaaggaaagttaggagctaatgcgattttaggggtttctattgccgctgctcgcgcggcggctgacgaacttggtgttccactttataattatttaggtggatttaatgccaaagtacttccgacaccaatgatgaatattattaatggtgggtctcactctgatgctcccatcgccttccaagaatttatgatagtgcctgtaggggcaccaacatttaaagaagcccttcgctggggagcagaaatttttcatgctctcaagaagatactaaaggctcgtggtcttgaaacagctgtgggagatgaaggtggctttgctccaaaatttgacggtacagaagacggggtcgagaccattcttaaagccattgaagcagcaggttacaaagcaggggaagacggagttatgattggttttgattgtgcaagtagtgaattttatgagaacggcgtttatgattatacaaaattcgagggtgaaggaggaaaaaaactttcagcatcagaacaagttgactacttagaagaattggtatcaaaatatccaattatcactatcgaagatggaatggatgaaaatgattgggatggttggaaaattttgacagaacgtttgggtaaaaaagttcaacttgttggtgatgatttttttgttacaaatactaaataccttgagcgaggaattcgtgaaaatgcttctaacgcaatcctcataaaagtcaatcagattggaacactcaccgaaacttttgaagcgattgaaatggcaaaagaagctggattcacggcaattgttagtcatcgtagtggagaaacagaagattcaacaatttcagatatcgcagttgctactaacgctggtcaaattaaaacaggatcgctatccagaaccgaccgtatggctaaatataatcaattactgcggattgaggatcaattggctgaggtcgctcaatataaaggtttaaaagctttctacaacttgaaaaaataa

SEQ ID NO: 2949 - DNA, 1284 bp, Artificial Sequence
  Optimized genes for Lactococcus lactis
atgtcaatagaagaagctcttgaatggattcacagtcgattaaagttcaatattcgccccggcctcagtagagtttctgccttacttgagctactcggacatccagaagaaagcctttcaatgattcatgttgccggaactaatggtaaaggtagcacagttgcattcactcgttcaattttcatgcaagctgggctaaaagttgcttcatttacttcaccatttattacaacatttggagaacgtatgagtattaatgcacttccaattgctgatgataaattaatttattatgttgaaatgattcaacctttggtagcagaacttgacaaagatgctgaactaaccgggattacggaatttgaaattattacagcaatggcttttaaatatttttctgatgaacaagttgatttggcagtcattgaagtagggttgggtggactccttgattcaacaaatgttattaaacctgtcgtatctggtatcacgacaatcggtttagaccatattgatatcttgggaagtacaattgaagaaatcgcagctcaaaaagcaggcattatcaaaccgggaattcctgtggttgttggtaacatagagttgaaagcgctgcgggtgatttgggaagtcgctcgtaaaaatacagctcgcgtttatcaatttccatatgattatcgtacagaagttgaagagcatgaacattttaatttcttttcaggtcaagaagcaattttggatattgagaaatcactcgttggacttcatcaaattgaaaatgctggaatggcaatcgagttatctttagtttacgcatcaaaagtaggaatcgaattgactgaagacgttatccgttctggcataagagaagccttttggccagctcgaatggaaaaacttggtgaaaaaccacttattttattagatggtgctcacaatgtccatgcgatgaatagacttttagaaaacttatcctctgagtttcctgataagaaaattactatcatttttagtgcgattaccactaaagacatcagtcaaatgataaaaatgcttcaaactgttaaaaattcacacttgattctgacaacttttgattacccaaaagctttaaatttaggtgattttcaacgtttggaagaagaaggagtagaattagcaccttcttgggaattagccttggttcgtgctcagaagaaccttgctgaagatgaccttttgcttgtgactggttcactttatttctcgagccaagtacgtgaatttttaaaaaaagaaaaataa

SEQ ID NO: 2950 - DNA, 1509 bp, Artificial Sequence
  Optimized genes for Lactococcus lactis
atgaaaatttggacaaaattaggactcttgactttagtaggattgtctttgacatcttgtggatcgaacacaaaaaatacaaaaggtcaatcatcaagtagtcaaaaggtggagaccagcgcaggtgctagtaaaagtaacatttatgctgacccatcaacactttcagataagtatgatgtcattattgttggttcaggaggggctggaatgactgctgctatcgaagctaaagatgctggaatgaatcctgttatcttagaaaaaatgccaattgccggaggaaatacttctaaagcaagtgctggtttaaatgcttcagaaacatcagtagaaaaagctcaaggagtggcggattctaatgataaattttatgaagaaactttgaaaggtggcggtggaacaaatgacaaagccctgctacgctattttgttgatcattctgctggtgcagtagattggttaaacactaacggaatcgttcttgataatttaacaaccaccggggggatgtcagtttcaagaactcaccgtccacatgatggttcggccgtcggcggttacctcgtcaaagggcttgaagaaaatataactaaaagaaatattcctttgttcgttaattctgatgttacgaaaatcactgaaaaagatggaaaagtttctggtgtaaaagtcaagattgaaggagagaccaaagacataagcagcaaagcggtagtggttactactggcggttttggagcaaacaaaaaaatgattgctaaatatcgtcctgatttaaaagattatgttaccacgaatgcggctggctccacgggtgatggcataacaatgatttctgaattaggtggtgaattggttgacatggataagattcaaattcaccccactgtttttcaaaaaacaggataccttgttagtgaaagcatccggggggagggggcaattttagtcaatcaaaaaggaaaacgtttctttaatgaaatggacactcgtgataaagtaagtgccgctgaacttaaacaaccaggtaaatactcttacgttattttcggcgaaggtacaaaggataaagtgaaggcggttgaacaatatatttcaaaagatatggttgttgaagcagattcaattaaaggcttggctgacaaacttgacatcaacgagaaagcactgacaagtacaattgatggttggaataaagctgtctcaactaaaaaagatgaagattttggtcgtacaactggtatgacaacagaagtatctggtaaatattatgccatcaaagttgcaccaggaattcatcatacaatggcaggtgttaaaattaatacaaatactcaagttctaaaaaaggacggaagtccgatccaaggtctttatgctgcaggagaagttacaggtggacttcatggtgggaatcgaattggtggtaatgcagttgctgatattgtaatttttggacgtcaagcaggaactcagtcagcagcttatgcaaaaacttcaaattaa

SEQ ID NO: 2951 - DNA, 693 bp, Artificial Sequence
  Optimized genes for Lactococcus lactis
atgtcaattatcaagctcagtaatgtttctaaaaaatattcaaatggcacaacagctttgagaaacataagcttagaaattgagcctggtgaatttacttatattgttggccctagtggggctggaaaatctacttttattaaattgctttaccgagaattaaaaatcgaccgtggttcgggaactgttgctcaatatgatttatcaaaactgaagcgtcgtgatgttccaatgcttcgaagatccgtaggggtagtgttccaagattataaattattgccaaaaaaaacagtttttgaaaatatttcttatgcaatggaagttattggtaaatcaccacgtgaaataaaaaagcgcgtaaatgaggtccttgatttggttggtttgaaacataaaattcgctcatttcccaatgaactttcaggtggagaacaacaacgtgtggcaattgcaagaagtattgctaatgctcctaaagttttaattgccgatgaaccaacaggaaaccttgacccagaaaactcttgggaaatcatgaatttacttgaaaaaattaatcttcaaggaaccacgattttaatggcaactcataatagtcagattgtcaatacactaaaacaccgtgttatcgcgattgaaaatggtcgtatcgtccgggaccaagaagaaggagtttatggttacgatgattaa

SEQ ID NO: 2952 - DNA, 2130 bp, Artificial Sequence
  Optimized genes for Lactococcus lactis
atggctcgggagttttctttagctaatactcgtaatattggaattatggcccatgtagatgccgggaagacgactactacagaacgagtactttattatactggtaaaattcataaaattggtgaaactcatgaaggagcctcacaaatggattggatggaacaagagcaagaaagagggataacaattacttctgcagcgacaaccgccgaatggaaaggaaatcgggtaaatatcattgacacaccaggacatgttgacttcacaatcgaggttcaacgttcactccgcgtgcttgatggagctgtaactgtcctggatgctcaaagtggagtagaacctcaaacagaaacagtatggcgtcaagcaactgaatatggtgtccctagaattgtttttgcaaacaaaatggacaaaatcggtgcggatttttattacagtctaagcaccttaggagatagactaggcgcaaatgcacatccaattcaaatccctattggtgcagaagatgattttattgggattattgatttagttacaatgaagtctgaaatctacaccaatgatttgggaacagatattaaagaaacggttgttggctccgatgagttcaacgcagaacttgcggcacttgattttaatgctgaagaatacactgaattagccaatgaatggagagaaaaattgattgaagcgattgctgactttgatgaagatatcatggaaaaatattttgctggagaagaaattccagaagctgaattgaaagctgcaattagaaaagccaccattaatgttgatttctatccaatgcttgctgggtcggcttttaaaaataaaggtgtgcaaatgatgttggatgcggttattgattatcttccaagtcccctcgatattcctgctatccaaggtgtcaatcctgatactgatgaagaagacgaacgtcctgcatcagatgaagaaccttttgctgctttggcatttaaaataatgactgacccatttgtaggtcgtttgagtttctttcgtgtgtattcaggaactttagatgcaggttcatatgttttaaatacaagtaaaggcaagagggagcgaataggacgtatcttacagatgcacgctaatacacgtaaagaaatacagactgtttatgctggcgatattgccgcagcagttggattaaaaaacacaacgacaggtgattcattgaccgatgaaaaagcgaagattattttagaatcaattgaagttcctgaaccagtcattcaattgatggttgagcctaaaacaaaagcagaccaagataaaatgggtgtagctttacaaaaattagcggaggaagatccaacattccgtgttgaaacaaatccagaaactggcgaaaccgtaatttctggaatgggggagcttcatttagacgttcttgttgaccgtatgaaacgagaatttaaagttgaagcaaacgttggtgctccacaagttgcttatcgtgaaacttttagagctggtacatcagctcgtggatttttcaaaagacaatctggtggaaaaggtcaatatggagatgtttggattgaatttactccaaatgaagagggagcaggttttgaatttgaaaatgccattgtgggcggcgttgtgccacgcgaattcgtaccggctgttgaaaagggacttgtcgaaacaatggcaaatggtgttttggctggttatcctatggttgatataaaagcaaaactttacgatggttcttatcatgatgtggacagtagcgagactgctttcaaggtcgctgcttcattagcaatgaaagaagcagctaaaactgccaaaccagcaatccttgaaccaatgatgaaagtaacgattacagttcccgaagaaaacctcggtgacatcatgggacacgttactgcacgtcgtggtcaggttaattcaatggaagctcatggtaaaagtcaaattgtcaacgcttttgttccgctggctgaaatgtttggttacgcaacaacacttcgtagctcaactcaaggacgcgggacatttatgatggtctttgaccactattctgatgtcccaaaatctgttcaagaagaaattatcgctaaaaatggacgaaatgctgattaa

SEQ ID NO: 2953 - DNA, 1011 bp, Artificial Sequence
  Optimized genes for Lactococcus lactis
atggttgtaaaagttggaatcaacggtttcggtcgtattggccgtttagcttttagacggattcaaaatgttgaaggagtagaagttgttgctataaatgatttaactgaccctgcaatgcttgctcacctcttgaaatatgatacaacacaaggacgttttgatggtaaagttgaagttaaagatggcggttttgaagtcaacgggaaatttgttaaggttacagcagaaagtaatccagctaatatcaattgggcagaggttggtgctgagattgttttagaagctaccggattcttcgcaacaaaagaaaaagctgaacaacaccttcatgcaaatggtgcaaaaaaagtagtcattactgctccgggtggatctgatgttaaaacaattgtttttaatacaaatcatgaagtactagacgggacggaaacagttatctcagcaggctcttgtactaccaattgtttagcaccaatggcagataccttgaataaacaatttggaataaaggtcggaacaatgacaacggttcatggttacactggggaccaaatgactcttgatggacctcatcgtggtggtgattttcgaagagcgcgcgcggctgctgaaaatattgtaccaaattcaactggtgccgccaaggcgattggtctggtgttaccagaacttcaaggaaaattacagggacatgcgcaacgtgttccagttcctacaggttcactcactgaattagtaacaatcttgaacaaagaggtgactgttgatgaaattaatgctgccatgaaagcagcatctaacgaatcatttggttataatgaagatcaaattgtcagttcagatattgtgggaatttcaaatagttcgctttttgacgcaactcaaacagaagtgacttcagctgacggagctcaattggtcaaaactgtaagctggtacgataatgaaatgtcttatacaagtaaccttgttcgtactttggcttattttgctaaaattgctaaataa

SEQ ID NO: 2954 - DNA, 1878 bp, Artificial Sequence
  Optimized genes for Lactococcus lactis
atgaatttccaagagaattatgacgtggtggtaattggaggtggtcatgcaggagttgaagcaagcctcgccgcagctcgtatgggttcaaaaacacttttaatgactattaacttgaacatggttgcgttcatgccttgtaatccttcaatcggtggatctgctaagggaattgttgttcgcgaaattgatgctttgggaggagaaatgggacgtaatattgacaaaacttatattcaaatgaaaatgcttaatactggcaaaggcccagctgttcgtgctttacgtgcccaagcggataaagatgaatacgctgattcaatgaaaaacacagtttctgaccaagaaaatttaactttgagacaaggaatggtagaagaattaatccttgatgaagagaaaaagaaagttattggtatcaaaacctcaacagggacaaaatatggtgctaaagctgtcattatcacaactggtaccgccttgcgcggtgaaatcattattggagagttgaagtattcaagtggtcctaataattcactgagttccataggccttgctgacaacctacgagaaattggctttgaaattgggcgatttaaaacaggtacaccaccacgtgttttagcaagttcaattgattatgataagaccgagatccaacctggtgatgaggcaccaaatcatttttcttttatgtcatctgatgaaaattacctcaaagaccaaattccctgctggttaacatatacaacagaaaacagtcatacaattttaagaggaaatttgcaccgggcacctcttttttcaggaatcgttaaaggtgtaggacctcgttattgtccatcaattgaagacaaaattactcgttttgctgataagccaagacatcaattatttttggaacctgaaggcagaaatacagaagaagtttatatagggggactaagcacttctatgccagaagatgttcaatttgaccttgtaaaatctattccaggacttgaaaatgctcaaatgatgcgtccaggttacgcaattgaatatgatgtagttatgccacatcaacttcgccctacgctagaaactaaactcgtctctggtttgtttacagctggacaaacaaatggaacttcgggctatgaagaagctgcaggtcaaggattagttgctggtattaatgctgctttgaaagtacaaggtaaatcagaattcatattaaagaggagcgaagcttatatcggcgtcatgattgatgatttagtaaccaaaggaacattagaaccatatcgtcttcttacttcaagagctgaatatcgattaattcttcgtcatgataatgcagaccgtcgtttgactgagattggtcgccaggtcgggcttgtcagtgatgaacaatgggaacactatcaagctaaaatggcacaatttgatcgtgaaatgaaaagattaaattctgaaaaacttaaaccacttccagatactcaagaaaaattggggaagcttggttttggtccaattaaagatgcactcacgggagcagaatttttaaaacgtcccgaagttcattataatgaagtgatagattttattggtcaggcgccggaaaaaatagaccggactgttatcgaattgattgagactgaaatcacttacgaaggttatattaaaaaagcaatggatcaagttgataaaatgcaccgtttagaagcaaaacgaattcctaaaaatatggactgggataaattagatagtattgctacggaggcgcgtcaaaaattcaaaaaaatcaaccctgaaacactggggcaggccagtagaatttcaggtgttaatccagcagatatttctattttgatggtttaccttgaaggaaaataa

SEQ ID NO: 2955 - DNA, 369 bp, Artificial Sequence
  Optimized genes for Lactococcus lactis
atggttaaagaacgtgaactccgtcgttcaatggctgtattgcctattgggacagttatgaaattaactgatttgagcgcgcgtcaaattcgctactatgaagaacaagaattaattttcccagaaagaagtgatggaaatcgaagaatgtattctttgaatgatattgatgctctttttgatatagccgatttacttcaagaaggcaacaatattgctgacatcaaggaaatttatgctaaacgtgatgcaaaaaaagcacagacactttcaatcggtgaagtccaccatgcattagagagagaatttgctcaacaaggacgttttggtacccctgacccaactcattttacacaaccacgtatgtaa

SEQ ID NO: 2956 - DNA, 1440 bp, Artificial Sequence
  Optimized genes for Lactococcus lactis
atggctgatcctaatggttttctaaattatccacgtaatgataacccttatcgtgaactcgccgaacgtatcaaggattttgctgaacttcaagttccactttcaacagaagaacgtcaaaaacaagcagcacgttgcatgcactgtgatgtaccattttgtcatcaaggaattttttatggagggaaaagagctgtttctggttgccctaacgataatcatattcctgagtggaatgatttaatttaccgtggtttacaaagaaaagcttatgaacgattgattttaacaaacccattcccagaatttacaggacgtgtttgtcctgctccatgtgaaaaatcttgtgcagaggcccttaatggagcaggagtaacaattaaagataatgaacgcttcctaggtgacttaggaaacgacgagggttgggttgcagaaataggcaaagcagctgaaccaacgggctacaaaattgctattattggttcaggacccgcgggtttgtcagctgcttggcgtttgaatcaattgggacatagtgtgactgtttttgaaaaatcagaccgtttaggcggacttttaatgtatgggattccaaatatgaaacttgacaaaaaagttgttcaaaaacgtattgatttgatgactgaattaggtgttacttttgtaaccaatacagaaatcggaaaaactatttcttacgaagatctgtcagttaattttgatagaattatccttgcaatcggcgctggaataccccgtgatttaaatatctctggaagagaagcagtcgggataagatttgccattgacttcttgactgaaacaacaaaaacagttttagaagaaggagaagacaatattagtcaatcattaaaaggtaaaaaggttgtcgttatcggtggtggagatacaggtaacgattgtattgggactgctgtacgacttggtgcagcctccgtctcgcagttggaaatcactccgagcttaccaacagatcgattagataacaatccttggcctgaatggccaatgactttgcgcgcaggttatggtcaaaaagaagccgagtttgttggaaatactgaccttattacttatcaaatgacagcaacagctttccaaactaatgctgaaggccagctcaccgggctaaaggtcgctaaagtaggtcctgattttaaagcgcttgaaggaacagagcaagtgattgaagctgacttggttttgctggcaatgggatttgtcggaactgatactggtctccttgataaatttggtattcaagaaatttatgatgattatcggacaaataatgacaaggtacttgttgctggtgatgctcgtcgtggcccaagtttagttatttgggcaattcgcgaaggtcgtaaaaccgcggaaattgttgatgaacaacttatcaaagtggcgacggcttaa

SEQ ID NO: 2957 - DNA, 540 bp, Artificial Sequence
  Optimized genes for Lactococcus lactis
atgtcagaagaaacaaaagaagagataaaaaatgaaaaagttgatgaagaagtaactgaagaattgaccgaagaagcattagaagatattgttgaggaggaaattaacgaacttgatgaagctcagaagttagcaacagaatgggaaaataaatttttaagagtgtctgctgaaatgcaaaatgttcaacgtcgtggaaatgaggaacgccttcaattgattaaatatcgaagtcaagaccttgctaaaaaaattttaagcagtttagataatcttgaaagagccttagcggttgaaggcttgactgatgatgttaaaaagggtctggagatggtccaagaatctctaatctcagccttgaaagaagaaggagtagaagaagtttcatacgaatcatttgatcacaatattcatatggcagttcaaacagttccagctgatgacgaacatcctgctgactctatcgtacaagttttccaaaaaggttatcaacttcatgaacgtttgctccgtccagcaatggttgtggtcgctcaataa

SEQ ID NO: 2958 - DNA, 2490 bp, Artificial Sequence
  Optimized genes for Lactococcus lactis
atgcaagataaaaacgtaattaatgtcaatcttgttgaagaaatgaaaacctcttttagagattatgcaatgagtgttattgttgctagagctttacctgacgtgcgtgatggacttaaacctgttcaccgtagaatactttatggaatgaatgaactcggtaatacaccagataagcctcataaaaaatcagcgcgaatcgttggagaagttatgggaaaatatcatccacacggtgattcatcaatttatgaagcgatggttcgtatggctcaatggtggtcataccgtcatatgttggcagatggtcatggaaatttcggttcaatggacggagacggtgctgctgccatgcgttatactgaagccagacttagtaaaattgctatggaaatgcttcgcgatatcaataaaaatactgtagattttatggataactttgatggtacagaaagagaaccacttgttttgccggcgcgttttccaaatttgttagttaacggcaccaccggaattgcagtaggtatggcaacaaatatacccccacataatctcggcgaaacaatcgatgcagttgatatgctaatggaaaatcctgaagcttcagtaactgatttaatgtcagtcattccaggtcctgatttcccaacaggggctttggtgatgggtaaatctggaattagacgtgcttatgaaactggtaaaggttctattacattacgtgcgaaaactcacattgaagaaatggcaggaggaaaagaacgtattgttgttactgaattgccttatatggtaaacaaagcacgactagttgagcatattgtccgtttaaatcatgaaaaacggattgaagggttaactgcggttagagatgagtctaaccgcgaaggcattcgggttgtcattgaagtacgtcgtgatctttcagctcatgttattttgaataatttatttaaacttacaagtttacaaacaagttttggttttaatatgcttgcaattgaaaaaggtattcctaaaatattgagcttgaaagaaattctggtggattatatcgaacatcaaattgaggtcgttgaacgccgtactgcttttgacaaggcaagagcagaagcacgcgctcacatccttgaaggtttaagaattgctcttgataatattgaccgtatcatcacaattattagggaaagtcaaaccgatgctatcgcccaaaaaacaatgatggatgaatttttattaagtgaaaaacaaagtcaagctattttagacatgagactacgcagactgacaggcttggaacgtgataaaattgaggctgaatatcaagaccttgtagcactgattgccgacttagctgatattttagcaaaaccagagcgagtcaagaaaattatccgtgaagaattagaagaggttaaacgtaaatttgctgacaaacgtcgtacagagcttttggttggtgaagttcttacacttgaagacgaggatttaatcgaggaagaagatgttctgattactttatctaataaaggatatattaaacgtttggctaatgatgagtttcgtgcacaaaatcgtggagggcggggagttcaaggcatgggaatgtctgatgatgattttgttcagcatttagtatccacatcaactcatgatcatttgttattcttcacgaacctagggcgtgtttatcgaatgaaaggttacgaaatccctgaatacggccgtacagctaaagggcttccaattgttaatttactcaaattggatgatggagagaaaatcgcaactattataaatgttgaccgcgaccaagccgctaaatacctttttttcacaactcgtaatggaatagttaaaagaaccagcacgtcacaattttcaaatattcgcactaatggcttaaaagctctcaaattacgagatggcgatgaattgattaacgtcttgagaacttcaggtgaagatgaagtgattattggaacacaccttggttattcggtgcgatttaagggtgcagtcgtacgcgatatgggtcgggccgctgcaggtgttaagggagtcaaccttcgtgaaggagattacgttgtcggaacttctcgaattgatgacagccaagaagtattagtgatttctgaaaatgggctaggtaaacgaacacaagcatcagaatatccaactaaaggacgtggtggtaaggggatgaaagttatgaatgtaacagaaagaacaggaaagcttgctggtttgactgctgttaatggtgacgaagatttgatggttatcactgacacaggtgtaatcattcgtaccaatgttgcaaatatctctcaaactggtcgtgcggctcaaggagtaaaagtaatgcgtcttgacgatgaagctcagattgtgacttttgcactcgttgacccagttatagaagatgaagaagttgatgcccccgaacttacggatgaaacgatttcaacagataataacgaagaataa

SEQ ID NO: 2959 - DNA, 1224 bp, Artificial Sequence
  Optimized genes for Lactococcus lactis
atgaaagaaagattaaaagctccagaattgcgttttgacggttttacagatgattgggaagaacgtaaattgctggacaatgttgaaaaagttcttgattatcgtggtaaatcaccggctaaatttggtatggaatggggaactgaaggatatttagttttatccgccttgaacgtaaaaaatggttatatcgataaatctgtcgaagcaaaatatggtgaccatgaactttttgatcgctggatgggaaataaccgtcttgaaaaaggtgatgttgtttttacgacagaagcccccctaggtaacgtagcacaagttcctgataataatggctatattttgaatcaaagagcggtagcttttaaaagtttacaagaaactgacgataatttttttgctcaacttttacgctcgccaattgttcaaaatactttaaaggcttcaagttctggtggaacagctaaaggaattggaatgaaagaatttgcaaaacttaatgcacgggttccagaaacacacgaagaacaacgtaagatcggtcttttctttaaacaactcgatgatacaatcgtcctccatcagagaaaactagatttattgaaagaacaaaaaaagggctacttacagaaaatgtttccaaaaaatggttcaaaaattcctgaattacgattcgcagaatttgctgatgactgggaagagagaaaattaggagaagttgcaacttttttaaatggacgtgcttacaaacaagatgagctattagatagtggaaaatataaagtacttcgtgtcgggaatttctatacaaatgattcttggtactattcaaatatggagctgggggataagtattatgttgataaaggcgatttggtttatacttggtctgcgaccttcggtcctcatatatggtcaggtgaaaaagtgatttatcattaccatatttggaaagtagaacttagcaagtttttggaccgtaactttactcttcaattattagaagctgacaaagcacgtttgctttcatcaactaacggaagtacaatgattcacgtgactaaaggagatatggaaagcaaaatcgtttcaattccaaatattgatgaacaaaagcaaattggttcttttttcaaacaattggataatacaattacccttcatcaacgaaaactcgaccttcttaaagagcaaaaaaaagggttcttgcaaaaaatgtttatttaa

SEQ ID NO: 2960 - DNA, 1065 bp, Artificial Sequence
  Optimized genes for Lactococcus lactis
atgcttatttctacaatggttgatgtctatgttgtttattatcctattattcttagttttatctgggcatcaggtgcttttctctcacgctggaaagaacgtgataagaaagcaattgatgaaactaaagaatttgaaaaaatttcaattgtcatcagcgcttataatgaagaggagaccattgaagaagttcttttatcactccgcaaccttaattaccccagtttagaaattttcatcgtagatgataaatctagtgaccggaccttggaaaaactttatgaagtgaaaaaatcatttgatgactgggaaacactgacaattttagaacaaaaagaaaataaaggaaaagccacagcgctgaatgttgccttgcaacaagttaattctaaatatatgctcgtgattgacgctgattcttacttgagtaaagatgcactttcatacctacttgctgaacttacttcttcttcagacatcggagcagtcacgggccgtccaattgtaagaaatcgaacaactttactcggtaaattacaaacacttgaatatctttccgtaatagatgctattaaacgtgcacagagcctttttctaggtgcaatcatgactgtcagcggcgtaatagttatgtatcgagtagaagctttgaaggagattggtggatttaatactgaagtaatgacagaagatattgatgttacttggcgtttgcatcgtaaccaatggaaggtcaaatacgtgcctaaagctttatcttatattttggttccagaaaacttaaaatcgttacttaaacaaagacgtcgttgggctgttggtggtgttgaagttttaatttcaaatttatcttgggttttcaaaagaggagagtttaaacaccgttttttgttgattgaaatgatttgtagtcatatttggtcatggtttttcttaatcgaaagttatcaatattttcttcaaatgttgttaaatcaagaatttaaagtttcaggacaaattatcgttatttttgttttgatatcattcttcgttttttttttagggccacaaatcgtaaaataa

SEQ ID NO: 2961 - DNA, 2799 bp, Artificial Sequence
  Optimized genes for Lactococcus lactis
atgaagataaaagacacacttaatcttggcaaaacagctttcccaatgcgtgctggtttacccaacaaagaacccaactggcaaaaagattgggctgatgctacgttatatgaaaaacgtcaagaacttaacgaaggaaaaccatcattcatgcttcatgacggaccaccatatgctaatgggaacattcatttaggccatagtttaaataaaatttcaaaagatattattgtccgttataaatcaatggcaggttttagagctccttatgttcctggttgggatacacacggacttccaatcgaacaacaacttgctaaagcaggaatgaaaagaaaagagatggatttacttgattatttggaagaatgtcgtaaatatgcaatgaaacaagttgatatgcagcgatctgattttaagtccttgggtgttctagcggactgggatcgaccttacctgacactcttgcctgaatacgaagctgctcaaatccgagtttttgggaaaatggctgaaaaaggctacatttataaaggtcaaaaaccaatttattggtctccttcaagtgaaagttcactagcggaagccgaaattgaatatcaagatgtcagaagtgcatcaattttcgttgcttttaaagctaaggatacgaaagggaagttaccagaagacgttgagtttgtcatttggaccacaactccatggacaattccaagtaatttaggaattttcgctcatccagattatgactattcagttgtcgcggtaaatggtcgtaaatttgttattgcttctgaaatgctcgaagcagtagctgaaaaattggaatgggaaaacccagaagtacttcaaactattaaaggaagtgagttggaatatatggttgccaaacatccattttatgatagagaaacattaatcatgaatgcagactacgtgactttggactcgggaactggtctcgttcatgtcgcaccaggacatggtgaagatgattactttgcaagtagaaaatataagctcccagttctttcaccgatagataatcgcggttattatacagatgaggcacctgggcttgagggtttgctttatgatgaagggaataaagtagtcagcaaatggttagaggaaaaagatgcactacttaaattagaattctttacccactcttatcctcatgattggcgtaccaaaaagcccgtgatttttcgagcaacaccacaatggtttgcctcaatcgacgatttccgtcaaaatattcttgatgaagtggaacgtgttgactgggttataccttggggtaaaactcgtttgttcaatatggtacgtgatcgtggtgattgggtaatttcccgccaacgtgcttggggagtaccgctgcctattttttatggagaaaatggcgaaccaattattactcctgaaacaacagaacacgtagcaaaactttttgcggaatttggaagtaaagtttggtttgaacgggaagctaaagaccttttgccggaaggctttactcacccagcttcacctaatggagaatttacaaaagaaaaggatataatggatgtatggtttgattctggttcttcttggaatggagttttgaacgaacgcgattatttatcatttcctgctgacttgtatttagaaggttcagaccaatatcgtggatggtttaattctagtattacaacaagtgttgctgttaatggtgtcgcgccatacaaagccgttttaagtcaaggatttgtattggatggtaaaggtaggaagatgtctaaatcgattggaaatacgattgttccaaaagatgttactaaaaaatttggtgcagatattttaagactttgggtggcctctattgatactgagagcgatgtaagagtttctatggacatcctaagccaggtgtcagaagtttatcgcaaaattcgtaatactcttcgttttctcattgcaaatacatctgactttaatcctaaagaagatgccattgattttgctgaattacgtccagtagataaatacatgttggtaaaattcaacgagttagttaagcaaattcgcactgcttatgacaattattcttttatgactgtttacaaatctatcatcaactttattacaaatgatttaagcagcttctaccttgacttcgcgaaagatgttgtttatattgaagcagctaattcacccgaacgtcgttcaatgcaaacagttatgtatgttatcctgaaagatcttgttaaaattttagtgcctatcttgccacatacagcagaagaaacttggacttatctggaacatgaacctgaaaattttgcttacttggcagaaatgcctgaggccgctgagattcctggctcagaagaattgctcggtaattggcaagaatttttagattttcgtgacaaaatattaaaagctttagaatcagctcgtgaagcaaaacttatcggaaaatcacttgaagctacggttacaatctatccaaatgaagtcgttagaactttattaaccgcaattgacgaaaatgttgcacagttattgattgtttcaaatttcgtcgtggcaaacgagccagtcaataatgctccagagtcagccatgaaatttgatgatttggcggtactagttgaacacgcagcaggtgaagtttgtgatcgttgccgacggactgatgaaaccgttggtcataatgctaacgagcatttgaaaatgctttgtgaacattgtgctcacatcgttgaaactgaatttccagaaattcttgaagaaggatttgaagattaa

SEQ ID NO: 2962 - DNA, 1023 bp, Artificial Sequence
  Optimized genes for Lactococcus lactis
atggcagtaacaatgtattatgaggatgatgttgaagtgagtgccctggcaggtaaacaaattgctgttattggctatggttcacaaggacacgcgcacgctcaaaacttgcgtgattcaggtcacaatgttatcataggggtacgtcatggaaaatcatttgataaagctaaagaagatggtttcgaaacctttgaagttggtgaggccgtcgctaaggcagatgtcatcatggtattggcaccagatgaattgcaacaatcaatttacgaagaagacataaaaccaaatttaaaagccgggtctgctttaggatttgctcatggttttaatattcattttggatatattaaagttcctgaagatgtggacgtttttatggttgctccaaaagcccctggacatttagttcgtcggacttacacggaaggattcggaacaccagctttgttcgtcagtcatcaaaatgctagcggccatgctcgtgaaatcgcgatggattgggcaaaaggaattggttgtgcacgagtaggtatcatcgaaactacttttaaagaagagactgaagaagatttattcggtgaacaagcagttctttgtggtgggctaaccgcccttgttgaggcgggctttgaaacattaacagaagctggttatgctggagaattagcttattttgaagtacttcatgaaatgaaacttattgttgacttgatgtatgaaggtggttttactaaaatgcgtcagtctatttcaaatacagctgaatttggtgattatgttacaggaccgcgcattattactgacgcggttaaaaaaaatatgaaactcgtgctcgctgatattcaatctgggaaatttgcacaagattttgttgatgacttcaaagcaggacgtcctaaattaactgcttacagagaagcagcaaagaaccttgaaattgaaaaaattggagcagaacttagaaaagcaatgccatttacacaaagtggcgacgatgatgcttttaagatttatcaataa

SEQ ID NO: 2963 - DNA, 477 bp, Artificial Sequence
  Optimized genes for Lactococcus lactis
atgcgtagaatgattattgctaaacttcataatgtaacaggaatcatgaatcgctttacggcagtgcttaaccgtcgtcaagttaatattttgtcaataactgctggtgttactgaaagtcaagatttgactcatacaacttttgttatcgaagttgatcatttagatgaagttgaacaaattatcaaacaacttaatcgactcattgacgttattgaggtcgctgatataaccgaccttccacacgttgagcgtgaagtagttttaattaaagttagcgcgccaccaacaatcagagctgaaatttttacaatgattgaacctttccgtgtaaacgtcgtagatgtcaatttagaaaatgttacaattcaactaactggtgattcagcaaaaattgaagctttgattgatgttgtttctccttatggaattttaaatatggcacggacagggtctgccggctttgaacgtggttaa

SEQ ID NO: 2964 - DNA, 219 bp, Artificial Sequence
  Optimized genes for Lactococcus lactis
atggctaaagatgatgttattgaagttgacggcaaggtcgttgatacaatgccaaacgctatgtttaccgtagaacttgaaaatggtcatcaagtgttggcaacaatttcaggtaaaattcgtaaaaattatattagaatacttccaggagataaagttcaagttgaattatctccttatgatttaactcgtggacgaatcacttaccgctttaaataa

SEQ ID NO: 2965 - DNA, 951 bp, Artificial Sequence
  Optimized genes for Lactococcus lactis
atgactgaatttattacccttggagaaccattggttgttttggcgagcgaaaatcaagatatttcactcgacgtggccgaacatttttcaaaatatctagccggggctgaattaaatgttgctattggtttaagcagattaggacataaaggaatttatctttctaaagttggtgaagatagttttggaaattttatcatcgaatcagtcaaaaaagcagaaattgaaactacttacctgacaaaagataaaaattattcaacaggattttatttgaagcaaaaagtttctgagggggacccaaaagtcgattattatcgtaaaaactcagcagcagcgaacctttcaattgctgagctcaaggcattagatttatcggggattaaaatcgctcacttatctggtatattccctgctttaagtgaaacaagtttaaagactttccaagcatttaatcagaaacttaatgaagctgacatccttacgatttttgatccaaatttacgtccagttctttgggataatcaagaaaaaatgattcgcacaattaatgatttggctaaacaatcacaaattattttaccaggtataaacgagggcgaaatcttgactggttcatcagaacctgaaaaaattgcaaatttctacctagagcaaagtccgctcaccaaaattgttgtagtaaaattgggcgctgatggagcttttgttaaattaaaaaatggtgaacaatattttgtatctggctttaaagtagcaaaagtggttgatacagttggtgctggtgacggttttgctgttggacttgaaagtgcccttttggaaggaaaaacattgaaggaagcagttaaacgtgcttgtgcagtcggtgcacttgcggttcaatcttcaggagattctgaaggttatcctactaaagaagaacttaaagctttctacaaagaaatgtaa

SEQ ID NO: 2966 - DNA, 1443 bp, Artificial Sequence
  Optimized genes for Lactococcus lactis
atgataaaattttttaattcaatgatctttaaaggcgttgttgctcacctcttgctcttcgtgattttatttatgtcaagttttgattataatttcgcccatttaagcacttttatcggctactaccttttttctcttgtttttgttttagttttcctgaaccaacaacacagaatgattgtcaatgtaagtaaacaaatgaatgatattaaaaatggttatttaaatcgtgataaaatccccaagggaacttctgagataaacgaactttatgacgaaatccttaaacttggtgaagatatcgttcgtactcaaaataatttagaaaatcaacgtaaccagcttgattctattttggcttatatggttgatggagtaatagcgactgaccgtcgtggtaacattatcatggcaaataaatcagcattgcattatttgaatacagataacgatttattgatgcaaaaaaatattgtcgaagttttgaaaattactgatcaatataacttttatgatctattggaaaaagaaccagaaattacaattgaaactcatgattcagggaatgaaagtatctcacttcatattaaattcgcgctctttagacgtgaatctggttttatttcaggcatcattgcagtattgcacgatatgactgaacaggacaaagcagaacgtgaacgccgtttgtttgtatcaaatgtgagtcatgaattacgaacgccacttacctcagttaaagcctatcttgaagcacttgaagacggtgcaattgaggataaggaaacagcttcatcatttattaatgtcagcctgacagaaacaaatcgaatgattcgtatgatttctgacttgttaactttgtcgcggatggaccaagatagaattgttcttaacaaagaaatgattaaccttatcgcttttttagactatcaaatcaatagacttgaccaaattttagagacagagtctaatgatttgatttccagtaattttaccctagtgagaaaatactcagaacaacctatttgggttgaaattgatactgataaaattgctcaagttattgacaatattattggaaatgcaatcaaatattcacctaaaggtggaacgattaccattagtgttgaaaaacgtgagagtgatgtattaatttcgatttcagatcaaggaatgggaattccaaaatctgatttattaaagatatttgaccgcttctatcgtgtagataatgctagtcgaaattctaaagttggtgggacaggtttaggactttcaattgttcatgatatagtcaagattcatggtggtactatttttgcttctagcgaaggagaaggtaaaggaacaacattctcttttacattaccatacagcctagaagctgctgatgactgggatgatggtacagatgaatttgaattcgaagataatgaataa

SEQ ID NO: 2967 - DNA, 963 bp, Artificial Sequence
  Optimized genes for Lactococcus lactis
atgtcaaaaaaaatcgtgactttggcaggtgacggaattggcccagaaatcatgtctgctggattatcagttttgaaggcggtaagtaaaaaaattgattttgaatacgaattagaagcaaaagatttcggtgggattgcaatagataaacacggtcaccccctaccggaagaaactcttcaagcagtaaaaaatgcagatgcaattttattggctgctattggacatccaaaatataataatgctaaagttcgtcctgaacaaggacttcttgctttaagaaaagaactcggcttatacgctaacgtacgtccattgaaaatttatcctgccctcaagaaattaagtccaattagaaatgttgaaaacgttgacttcttgatgattcgagagctgacaggtggaatctattttggtcaacatgaacttgccgatgataaagctcgtgatgtaaatgattattctgctgatgaaattcggagaattttgcattttgcttttaaatcagctcaaagtcgaccacgtaagttattaacgagcgtggacaaacaaaatgtcttagcaacttctaaactttggcgtaaaatggcagacgagatcgctgacgaatatccagatgttcgccttgaacatcaacttgttgattcttgtgccatgttgttgattacaaacccacaacaatttgatgtcattgttacagaaaatctttttggagatattctttcagatgaagcttcaagcttagctggttccctaggcgttatgccttcaagttcacatggttttaatggtctggcgctttatgaacctattcatgggtcggcgcctgacatcgccggtaaaggaattgctaatccagtttcaatgatattatctatcgcaatgatgcttcgtgaaagtttcggacaagaagatggtgcaacaatgattgaaaaagcagttacccagacttttacagattaa

SEQ ID NO: 2968 - DNA, 1383 bp, Artificial Sequence
  Optimized genes for Lactococcus lactis
atgagtgggaagacgatctttgataaactttgggatcaacatgtcatcgcgggaaatgaaggagaaccacagttactttatattgatttgcacgtcattcatgaagttacatctcctcaagcattccaagggctaagagaagctggacgtcgtgtacgtagaaaagacctaacctacggcacacttgaccacaatgtgcccacgcaagatattttcaatattcaagacttgatttctaaaaaacaaatcgatacttttacaaaaaatgtaaaagaatttgatgtgcctgctgaaactcacggtggtaaagggcaaggtatcgttcatatggttgctccagaatcaggtcgtacacaacctggaaaaacaattgtttgtggagatagtcatacagcaacaaacggcgcctttggagcaatcgctttcgggataggcacctcagaagtagaacatgttttggctactcaaacaatttggcaagttaaacctaaaagaatgaaaatcgaatttcaaggacatccacaaaaaggtatttatagcaaagattttattcttgctttaattgcaaaatatggtgtagatgctggtgttggttacgcagttgaatactctggcgacgcaatttcagatttatcaatggaagaacgtatgactatttgtaatatgtcaattgaattcggtgctaaaataggcttgatgaatcctgatgaaaaaacttatgattatgtcaaaggacgagagcatgcgccaaaaaactttgacgaagcggtatcaaaatgggaaaaattagtttctgatagcgatgcacaatacgataaaattttaagtttagatgttagtcaacttaaaccaatggtaacttggggaacaaatccaggtatgggacttgagtttggtgaaaaatttcctgaaattaataatgatttaaattatgaacgcgcttatcaatatatggatctcaagccgggtcaaactgcttcagctattgaccttggttatatcttcatcggttcttgtaccaacgctcgtttgggtgatttagaagaggcagcaaagattattggagaccgtcatattgctgatggtttgactggtatagttgttccaggatccagaccagttaaagaggccgcagaagctcaaggattggacaaaatttttaaagaagcaggatttgaatggcgtgaacctggttgtagtgcctgcttaggaatgaaccccgaccaaattccagaatatgttcactgtgcctctacatcaaatcgtaattttgaggggcggcagggtcataatgctcgcactcatctttgctcgccagcaatggctgcagctgctgcgattgccggaaagtttgttgatgtccgaacactcgtgactgattaa

SEQ ID NO: 2969 - DNA, 576 bp, Artificial Sequence
  Optimized genes for Lactococcus lactis
atggaaaaatttactatttataaaggaacatcagttcctgtaatgaatgataatattgatactgaccaaattattcccaagcaatttttaaaagccatcgacaaaaaaggttttggtaaaaatcttttctacgaatggcgttatcttaaagattatgatgaaaatcctgactttattttaaatgctccaaaatataagaaagcaagcctattgatttctggagataactttgggtcgggaagtagtagagaacatgctgcttgggcactttcagattacggattccgcgcgatcattgctggttcttactctgatattttttataataatgcattgaaaaatggtttacttcctattaaacaaccacgtgaagttttgaatcaattgactaaactgtcaagtcaagaagagataacaattgatttaccacaccaacttatcatcacctcactcggtgattttcattttgaaattgacccaatttggaaagataaattaattaacggacttgatgatatcggcataacattacaatatgaagaagcaatttcagcttatgaacaaaaaaaccagtaa

SEQ ID NO: 2970 - DNA, 1158 bp, Artificial Sequence
  Optimized genes for Lactococcus lactis
atgaaaaaagcagttcattttggtgcaggaaatattggccgtggtttcatcggtgaaattctctcgaaaaatggttttgatattcatttcgttgatacaaataaatcaattatcgcagaattgaacaaccgtcattcttatgaaattgggattgcttcaagtgaacatgaaaagatttcagttaaagcggtctcaggaattaataatagtgaaaaccctgaagcagtcattgaggcgattgctaaagctgatattttaactactgcaataggacctaatgttcttccctacatcgctgaattaattgcaaaaggcctacagaaacgtaaagaagaaaaagttcaaagtcctttagatatcattgcctgtgaaaatatgattggtggttcagaatttttggaggaaaaagtttctgactacttgagtgaatctgataaactttatctttcaaaatttatcggatttccaaatgctgctgtcgatcggattgttccagctcaaaaacataaagatgttttatatgttgaagtagaaccattttctgaatgggtaattgacgcgagccatttaaagaacaaagagatcaaattggaaggagttcactatacaactgatttagaaccgttcattgaaagaaaattattctcagtaaattcagggcatgcagctgtagcatacagctccgcttacaaaggatataaaacaattcttgaaggtttacaagatgaagaaatcctcaacatcttgaaagccgtgcaaaaagaaactcgagctttacttctggccaaatgggctcaatattttaaacaagacgagttgattaaatatcatgagctcataatttctcgcttttcaaatccagaaattattgatgaagtgtcaagagttgctcgtaccccaattcgaaaacttggttatgatgaacgttttattcgtcctattagagaattaaatgaccgtaagcttagttatcaaaatcacttggatatagttggtaaaatttttgcttatcacgacgaaaatgatgcacaagcaattcaacttcaagaaaaactaaaaattacagaattaccaatgcttattgaagaagttacgggattgtctaatcaaaagctgatccttgagatagaaaaagtaatcaatcattataagaaataa

SEQ ID NO: 2971 - DNA, 942 bp, Artificial Sequence
  Optimized genes for Lactococcus lactis
atgattgagaaatataaaaatatattgattacttttattgctttggccgcgatcgtcttcctcgtaggttgttcaaacaaaaaaactgaccaagttacagacaaaaagatcaatgttgtggtaacaaattcaattttagctgatattacaaagaatatcgccgatgataaaattaaccttcatagtatagttccagttggaaaagacccacatgaatatgaaccactgcccgtcgatgttcaaaaaacctcgaaagctgaccttatcttttataatggtttaaatcttgaaacaggtggaaatgcatggtttacaaaacttgttaataatgctaataaaaaagaaaatattgattattttcctgtatcaactggtgtagaagttatttacttagaggggaaaaatacagaaggtaaagaagatccacacgcttggttaaacttggaaaatggaattatttatgctaaaaatattgaacaacagttaagtaaaaaggaccctgtcaataaagatttctacaaacataatcttgataaatatgttaaaaaattgtcagatttagatcaacaagcaaagagcaaatttagtttaattcctgaaaatgaaaaaatgattgttacttcagaaggatgttttaaatacttcagcaaagcatacaacatcccgtctgcttatatttgggaaattaatactgaagaagaaggcacgcctgatcaaattaaaaacctcgtacgtaaattacgtgcaactgagttgaaatcactttttgttgaaagttctgttgataatagaccaatgaaaacagtttctaaagataccgggataccaatttattctacaatttttactgattcagtggcgaagaaaggtgaaaacggtgattcttattattcaatgatgaaatggaatctagaccaaatctataaaggacttgcaaaataa

SEQ ID NO: 2972 - DNA, 1314 bp, Artificial Sequence
  Optimized genes for Lactococcus lactis
atgagtctttttttagatactgctaggattgaagtcaaagctggaaaaggtggtgatggggcagttgcttttcgtcgtgaaaaatacgttcctgatggaggaccagcagggggtgatggtgggaaggggggttcagtaatctttaaagttgacgaaggaatgtcaactttgatggattttagatataatcgaattttccgtggtaaaccaggtgagaaaggaatgaataaaggtatgcatggtagaggagcagaagatttgatcgttcacgtcccgcagggaacgactgttaaagataatgaaactggtgacgtgctagtggacttgattgaaaaagaccaagaatttgctgtcgctaagggtggacgtggcggtcgtggaaacattcgttttgcaacccccagaaatccagctccagaagttgccgaaaatggtgaacctggagaagataaaattttacttttagaactccgtgttttagccgatgttggccttgttggatttccttccgtaggcaaatcaacattactgtctgtcgtttctaatgcacgtccaaaaattggtgcctaccattttacaactatcacaccaaatattggcatggttcaagttggttatggagatagcttcgtaatggcagatatgccaggattgatagagggggctcactcaggtgcaggattaggaattcaatttttgagacatattgaacgaacgagagtacttcttcatgttcttgatatgtctgaacttgaaggtcgcgacccttatgaagactataaaacaattaatgatgaattggaatcgtacaaccttcgcttaatggaaagaccacaaattattgttgcgaacaaaatggacatgcctgaagctgctgaacgtttagctgaattcaaagagaaattggcagctgatttaggtccagataaagaaatgccagaaatttttgaagtaagtgggctcacaaaaactggacttcaaggactactggcgcgaacatcagaattattagcacaaacacctgaatttctactttatgatgaggacgaactcgcggatgaaacagcttattatggttttgaagaagaagaaaaacctttcaaggtgagtcgtgatgatgacggtggttggcggttaagtggagacaagatagagcgcttgttcatcatgactaattttgatcatgatgaatctgttatgaaattcgcccgtcaaatgcgtgcaatgggagtagatgaaacccttcgttcaatgggtgctaaagatggcgattatgttcgtatccaaaaatttgaatttgagtttgttgattaa

SEQ ID NO: 2973 - DNA, 960 bp, Artificial Sequence
  Optimized genes for Lactococcus lactis
atgtggaaagttatcattcgtcgtatcctattgatgataccacaactttttatactctcgattcttgtctttttctttgctaaattaatgccaggtgaccctttttctggtttgattggtcctcatacagatccacacgaagttgaagcactccgccgcgccgctggtctttatgatccttggtgggaacaatatttgcggtggttagggaatgctattcatggaaatcttggaatgagttacaatttaaaggagccagtaatgactgtgattggacaccgtgcgattaatacattttggatgtcattactgagtgtcatcttgacttacctctttgcaattccaatgtctattgttgctgctcgtaatgaaggaaaatggcaagatcagctttggcttacttataattcaattacttttgggattcctccctacgtattttatcttttaattatttttatttttggctattctttgaactggtttccaacaggtggtacggtaagccctgatgctatgggaattattccggtgttcttctcaaaaatttatcatatgattttgccagcttttagtttagcagtttttggaactgttggtatctttacatattttcgttctggaatccttgatgaacaaactcaagactatgttcgtacagctcgagcaaaaggtgttaaagaaaaagtaatttttagacgtcatattttacgaaatgcatcacttccaattgcttcaaactttggttttgttattacaggacttttggggggagcaatcttcgctgaaacaattttcggttatcctggtttaggtcaattatttatcaccagtatttcaggacgtgattattcaatgattaccgcgctgatattgttaaatggtttcctaggcttattaggcgccttgctttctgatattatcatggcaatggttgacccaagaataagaattcaataa

SEQ ID NO: 2974 - DNA, 1638 bp, Artificial Sequence
  Optimized genes for Lactococcus lactis
atgaaaacttggaaaaaagtaactttaggtactgttgctttgggctctgctgctttacttgctgcctgtggaaattcagggtcgtccagctcttccagctcaaaagatattcaatggaatctcacttcaccaattcaaacacttgattctagcttagcgacagatacatattcaaatattattatcggtaatacaaatgctggcttaactcgggtcgataaggacggtaaagctcagccagaattagccaaaagtgttgacgtttctaaggacggacttacttatacatttcacttgcgagatggtttaaaatggtcaaatggcgatgcacttaccgctaaggattttgtatactcttggcaaagagcggtggaccctgctacggcttctgaatatggttatcttttaggaccagttaaaaatgcaaatgaaattaatggtgggaaggctgacaaatcaactttgggtgtaaaagcaacagatgataaaacattcgttgtaacccttgcacaaccaactccatattttgaatttcttacagcaaattctgtctattatccactcaaccaaaaagttgttgaaaaatatgggaaacaatatggaacttcttcagagaaaatggtttatagcggcccttacaaatttgagaagtctaaaggttggaacggttcgaatcaaactttttcaattgttaaaaatgatgattattgggataaatctgcagtgaaaactaaagaaattgatttccaagttgttcaagatccaaaaacaagttttaacctatacaaacaaggaaaaattgtacaagcaagtattggtgacccagatttatttaaagccaataagaacaacaaagatgtggtctcacttgatgaagcaacaactgcttatattcagtataatcaatcaggtaaaaataaagcattggctaataaaaacatcagagaagcttttaatttagcaaccgaccgtcaacaatatgttgatactgtaacaccagcttcaaacccagcaactggtctgacaccggctggaatggcaaagactaacacaggagttgattttgctaaatacgccgctcaaccttataaatatgatgctaccgcagctaaagctgcttgggcaaaaggattaagtgagattggagaaacaaaattaacgctgactctaacgactgatgacacatcagcaagtaaagattcagctactttcttgaagcaagcttgggaaaaacaacttcctggtttgacactaaatatcaaatcagttccttttaaacaacgtttaaatgatagtactacagggaattttgatatggtcataagtttatggggaggagattatgctgaaccaagtacgtttttagatctttttgtcaaagatggacctaataacaatggaaaaatcaataatgttacctacgataaagcgataaaagccgcggaagttactgacgccctcgatcctgaaaaacattatgcagactataaagcagcagaagaaagtctttacacagaatctaatttgaatcccctttatttccgtacaacacctgtattgcgcaatccaaatcttaaagatgttcgttttggttcaacaggtttgatgtatgacttcaaaacagcttacttgaaataa

SEQ ID NO: 2975 - DNA, 1050 bp, Artificial Sequence
  Optimized genes for Lactococcus lactis
atggctgaggaaaaagtacttgaagttaaaaaccttcatgttaatttccatacttacgctggcgacgtaaaagcaattcgtgatgtttcctttgatttggaaaaggggcaaacacttgctattgttggtgaatcaggttctggtaaatcagtcacaactaaaactttgatgggtttaaatgcaaaaaatgctgttatcccacaaggagaattgctttttaaaggtcgtaacttacttgacttgaaagaagaagaatggcaaaaaattagaggaaatgaaatttcaatgattttccaagatccaatgacttctttagaccctacaatgagaattggaaaacaaattgctgaacctttactaaaacataataagggaatgtcaaaagctgatgcgatgaaacgtgccttagaattaatgcaacaagttggaattccagatgcagaagttcatattaatgattatccacatcaatggagtggtggtatgcgtcaacgagcagtgattgccatagctcttgcagctgacccagaaattttgattgcagatgaaccaacaacagccttagatgtaacaattcaagctcaaatcatgcacatgatggcagaacttcaagaacgtatcaattcgagcatcgtttttattacccacgatctcggggttgttgctggtttcgcacacaaagtggccgtcatgtatgcaggcgagatagtcgaatatggaactgttgaagaaatcttttataatcctcagcatccatacacttggggacttcttgattctatgcctaccgttgattcatctgtagaccgtttggtgtcaattcctggcacgccacctgatttattgaacccaccaaaaggagatgcttttgctgctcgaaataaatttgcgctagcgattgattttgaagaggagcccccttattttgaagtaagtccaactcattttgctaaaacatggttactcgacccgcgggcacctaaagttacaccaagtgataatattttagcaagatggaaacgctgggaagaactgaagggtgataaataa

SEQ ID NO: 2976 - DNA, 1887 bp, Artificial Sequence
  Optimized genes for Lactococcus lactis
atgaaagaatttattatcaaaaatacagatatttggaaaatttttcttaaatattatcgttctgatgaagagatcgtattccttcattcaagtcaagtaacagaaaatgaacattattcaatattagctcataaaccttataaaaaagtttcaaaatacaaaggtcaagttttctttaacggtgaaaaaaagaaatttaattttttagatgctgttgatttactgaaagatgaacgtgttgaacgtcctaaaaattggccattttatcctgaactccttggttttgtttcttacgagcaagatccagcttgttttgctgcttatgacgaagttcttttatttgaccatcgtacaaaattgttaagagtggttcaatttgaacaaacagacggtcagtattggcttaccgagtcggaagaaattgaagtggatagtgaaattgaatttgatggccagaatggtattggtgctattttcattgatcaaactcgtcaagaatatattgcttctattaaaaagttgcaagattatatgaaagcaggagatatctatgttgcaaatttaacacaacaatttgaaatctggtcagaccaaaaaccaatcgaagtttttaaaaaaacaagaaaacaaattccagcaccattttcttcatttcttcaatatccagaatggaaaatgactcaaatcagttcatcagttgaaagatttgtgtccattcatgatggagcgcttatatctaaaccaattaaaggtacaatcgctcgtggagaagacgttggtgcagatagattacagaaagagattttatcagattctagcaaggagcgaagtgaattattaatggttaccgatctactacgaaatgatattgtccgcatttcacaacctttctctttgtctgttccaaaattcgcggaaatagaaacatttagtcatgtccatcaattagtaacgagcatcaaatcaaggataaaagaagatttaactttttcagagtttatgactgccctatttccaggtgggagcattacaggaacaccaaaaaaacgtgcaatggaaattattaaggaagtagaaaagcagccgcggggaatttatactggaatgcaaggttggttatctcgtgaaatggatcttgatatgaatattgttattcgcaccttagttcatgacggcgaacactatcaactgggcgtcggtggtggaattacttttgagagtaaagctgaagcagaattctcagaaatcctcttgaaggcaaaaccttttttggacattttgggcgtaaaagatgttccttcaattctttttacaactggtatcattaaaaatggagaattgcttaatcttgaaggacacgttaaccgtttgaaaaaacaataccatcatcctgatttggaagaaaaattacgaatctttgctcaaaatgttactgacggagttttgcgtatttcaactgatggtgattcactttcaccaggaattcgtcaacttactcactcaaacgaagcttaccgcgtgaaacttagttcgattaatgataaacccagtttactttctaatttcaaactcagcgggccagattttcaaaaagtatttagacaagaagtcttagaagcgaaaaaagaaggtttccaagacatcctttttcatacagacgggttgatttctgaacttagtattggaaactttgtagccaaaaagggaaatcaatatgaaactcctgctaaatatgctttaaaaggaactttcttggatttgtttgcaaaaaaccacacgctgatttacaaggatattgccctctctgacctaaaaacttatgattgtttctacatgacaaatgcagtacgtggtttggtcgagataaaaatagatgggattagttaa

(The sequence listing continues in the following parts.)
